United States Patent Application Publication US 2020/0109395 A1 - sequence listing, part 17

SEQ ID NO: 65735 - protein, 604 aa, Mollicutes bacterium HR1
MKRKEDWSAVEGIILDSVAYDIIKSEKSLLVTAGPGAGKTEILAQKSSFIFETTRKETRILAISFKRDAAVNLKDRVLLRCGLKYEDSFDSYTYDAFAKQILDQYYRILPDDNRPDINYIIEDGVGDIIKQFSIDSYNRSDWITLKNIRKKLDSTRISMLNQPGLKLWDELLTSKPSRLTFSMITILVLRMISSSPIIRNIISSSYDYVFLDEFQDTTTLQYELVRNIFKDSDITLIAVGDEKQRIMLWAGADNQAFTKFTSDFQAERKELMFNFRSAPKLIEFQLEVYNILNVNKISIGHNPLYKEDEGYISLYEFDDNNFESICISNEIIEKIKSGTNPKDICILTKQLPIEYTGNIIKLLGEECIYARIENEYQDLLKEPIVKLIISLLDLVEGNTNPNSWLIISNYFDKIHISGFKIENMIELDKNIRNISSSKMNFNSKEDLVELIDTLVALLDVNKIKMVFTEYSQGNYLMDIIKKFSELYCREYIRLNTSKIHLINEAFLGEHSIPIMTIHKSKGLEFTHVFFLGLEDSAFWNYSNNPMEDKSTFFVALSRAKKEISFTYCSKRLNFKPPLKRFNCINQSHRNISEIYDLVLQHKMN

SEQ ID NO: 65736 - protein, 582 aa, Burkholderia cenocepacia
MYLAQLTISNFRKLQKAELRFQAGLNVLVGANNVGKTAVIDALRALLAGHDEPYPRLDINDVHRPHGGTPAGDITFQYIFRGLDEDDEADFLPALRTDAVGNAEAHITIRYADADKIGRLRAKRWCGDHEDVGLTADMMENLRGVYLPPLRDASQSLKPGRTSQLSRLFQLLSDDIGRNEINEALKKLDEELKKHQPITNTHTAIKSRHDTMLGPQLAQLLELGLSGSDFQRLASRLSLMVDAFEIEQNGLGFNNLIFMAVVLSELAKNPESSYRGLIVEEPEAHLHPQLQAVLLGYLETIKATDGEKPVQLFVTSHSPNFASIADINSLACLVDTGGAVETFFPRDISFGKGKREKLERYLDVTRAEIFFARRVIFVEGAAELMLVSVLAEKAGYKLREHGVSLISVEGLNFDSFLPLFGEKALKIPISVITDADPVDTPSDGSEPKALYPAAGDSVKVSDNTAKMKESEDALVRIFHGVKTLEYDLALHEDNRSAMLKALKELHPKIGEAVETSVNAATADAEKARLLFSGMFERTQNNVQKGRFGQALAQILADGAPCTVPEYLRQAIEHACQKALARS

SEQ ID NO: 65737 - protein, 595 aa, Burkholderia cenocepacia
MTELSPEQSAIIEAPLDPMAVIACAGSGKTLTAVRRLAEIRRRLSDHRGWVALLSFSNVAVDTFRQSYQPLVREMSVGAGGHRVDIDTLDGFITRHVLHPHAHRTMQATQAAFLVTGGESFLSGFTFRPGSYPVSITSMQVGVRDAGIYFYYANHDQVVELNQHDASKLVHRLGKTGAYTHNLGRYWCFQTLKEQPLVLRALARRYPHILIDEAQDIGSPHQAILEQLIGAGVRVSLIGDPNQGIYEFAGANGQFLARYSNRTAITDLGLTRNYRSVPPIVDLSNKLSARDDVADREAPETAHGAYFIPYKTTDRDKVVTAFQAAVLAAELKVERSAVLCRGRDLADRLAGSNSPAGQGTVKGFAQAAVARDKKQDYMAAFKAVASCIVGLLAEPPKGLVAAITQPTRYPGGRSLRRLVWRFTRNPDTGLPSATLLADTEWHPQLLTRVKALLATLENEHGLKTTDNIGMKLAKKGLLNAPLVATADLAAPNAPRIRIDTVHQAKGESLDAVLYMATKEHVAALLAGVDSEVGRIGYVAVTRARNLLWLGVPANALTELRPKLIALGFHEIGMPVAPVAPNLPTETPLVAMGEQE

SEQ ID NO: 65738 - protein, 594 aa, Burkholderia cepacia; identical to SEQ ID NO: 62698

SEQ ID NO: 65739 - protein, 604 aa, Burkholderia cepacia; identical to SEQ ID NO: 64631

SEQ ID NO: 65740 - protein, 613 aa, Burkholderia xenovorans LB400; identical to SEQ ID NO: 62524

SEQ ID NO: 65741 - protein, 534 aa, Burkholderia xenovorans LB400
MSTSTPLYLKAAEDLRENEDQWCAYQATGNCVILAGPGSGKTKTITIKIARLLAEDVRRPRRVACITYSNACVGELRSRLTRLGVGDSDRLVLSTVHSFCLTELVFPYAKMAGLQMPDPLVVASPAQARALFSDAYRAQLGGNAPAWFRMACDRLRRTILDRGSDEWRAGSARETMVVEAYENLLLQNGLIDFDGLVLAGLQLVEKNEWVRHAIRAKYPVVVIDEYQDLGVPLHRIVLALLQAGVRIIAVGDPDQSIYGFTGAKPDLLTALAGLQQMESVTLKLNYRCADRIIAASRALLPEPAEFRSHDGRSGEIHIHRLECSIREQADYALGTLVPALLEANPSWAPGDIAVLYRTLNEGAPIAEAADALGLQYFRLDNGSPIKRTRVTEWLTDAARWCSGGWQTGEISLSQLLKAWRRMYRSVTHESELLATRKRLISALFSLRDSALPLRRWLLALRRDVLDELLEQEPGLADEKDNLEELTAAAGAGGPLRAFTVEIFGNQGKMPRVKQDESSASIWMRVLALRQRWRA

SEQ ID NO: 65742 - protein, 782 aa, Burkholderia xenovorans LB400; identical to SEQ ID NO: 62526

SEQ ID NO: 65743 - protein, 596 aa, Burkholderia xenovorans LB400
MVAGAGSGKTTSLVKAIAHLAETRGPALRRAGQQIACITYTEVAVGEIVADVGVSPLFHISTIHSFLWSIIRPFHIDIATWVATRIEEKIAERREHYDRPRTQERTKARLAQEIADLEAELDAIGGVGKFVYGNGSSYAEGILGHDDILKLAPACVASHPLLRLLVAKRFPYIFVDESQDTNPEVVEALRQIAGDHPDLCVGFFGDPMQKIYMSGAGAVPLNDGWAEVTKPENFRCPTSVLGVINAIRAGGDRLEQVRGRTVTVDGIQQPVAGSSNLFVLPADGERSAHLAAVRRWLAVETGDDLWLSDMREGDVRLLVLVHRMAATRLGFPNLYAALNDRAPMSLSEGLTDGTAWPLRPVAQHILPLVVAARAGDQFTVMSVLRSESPKLEPERLRGQATAPVLRALQQALDGLVALLAEGSQATVRDVLTLVRDSELLRLDDRFGVHLVAEPVDDGSSGFENVQAYLACGVDELWAYRRYFTEESPFATHHGVKGAQFERVLVVIDDDEAGFRQYSYGKYFGYVPLSESDEARIASDEESVLDRTRRLFYVCCSRAVKDLAVVVFAPDVTAARTAIVGKNLFPEAVIRGVEHLD

SEQ ID NO: 65744 - protein, 561 aa, Burkholderia pseudomallei; identical to SEQ ID NO: 63122

SEQ ID NO: 65745 - protein, 631 aa, Burkholderia pseudomallei; identical to SEQ ID NO: 62563

SEQ ID NO: 65746 - protein, 561 aa, Burkholderia pseudomallei; identical to SEQ ID NO: 63122

SEQ ID NO: 65747 - protein, 631 aa, Burkholderia pseudomallei; identical to SEQ ID NO: 62563

SEQ ID NO: 65748 - protein, 789 aa, Burkholderia pseudomallei
MDIPEVSAHSSATDPASSSAPSAPAVPPAETVALPGDSPIRLACVEVCNFRRLAKTRLEFDDATTILVGANNSGKTSLLTVLRNFLSDSPGFRAFDISLSQWAKLRQLSELWEALDEDPTTESKDAEKWEQQYRQLLGCMPFIDLWFDAKEGAYNYVAPFITSLKWRGGAVGVRVRLEPVADSDELRKLAWRYREARSPVRTLPKDGHAWPMDLLDYWLRYSADLRRIAVYRLDPAKGPLATEQCNELQELPPDSQPVELQLLRKLVRVDFVPAQRGLGAEDDETRSESAGTRPGLFSSQLLKFARQHLNVAPSGHGNREDLVAAIARAQAELDDSIYKALQPAMEDVEVLGYPGLHDPQQLHFRTRIQTADLLAHSTAVQYRLDETAVDESLPEHSIGLGYQNLQSLSFMLVSFRAARLNPPQGSPAAVHLVMVEEPEAHLHVQVQRNFSSNAHELIRPKELVHSNLRSQLLISTHSSHLAHGDSFTRLRYVKRIASTGAGVRPSSEVVNLGDAFGDDIQTRTFAERYFQVQHTDLLFADADIFVEGTAERMLVPLFIERDFPKLAKKYVSFLDIGGSHAHRLRPLVERLGIPTAVITDLDPVVPTTSKGGRVVRAAVHIAGQADLECGNDTLTSWHPKLADFHAYAKPTSAHLEWVSDSGVKVRFAWQLPVAAASDQWPSSFEDALVLTNIDWFKALDEEKDSVSGKKKDHRGTLGKVIGLVLDHSDHTELLKELHAMLHGNFSKGDFAATLFERLNAGQALACPTYIADALAWLSGQLEATAGETE

SEQ ID NO: 65749 - protein, 576 aa, Burkholderia pseudomallei; identical to SEQ ID NO: 64757

SEQ ID NO: 65750 - protein, 631 aa, Burkholderia pseudomallei
MVPCPQAAEAVPEQRQANGEYLPQPRTLCDYLADSIGDHLRRSFELRYYVLDSAQFGPDFRPAAGYTPLRMTHDKGRGSREILSSLIKVDFLHAQRHLSDSGGGARSEDLSRCLSRFYERNLEKHEEDYDAQRALYQSEALLNDHLERVFGPTLERLSHLGYPGLNNPKLLIKTALNPATILSSHDGARVHYAVGPEVGIDTQTTLPDRYNGLGFKNLIYMVVELLDAHARWLDIEENRPPLHLIFIEEPEAHLHAQLQQVFIRKVLDILDIPDEDAPHCTTQIVVSTHSPHVLFERGFQPIRYFRRVREAGVQRSEVLSMASFYETANDPNDPTDRTRDFLERYLRLTHCDLFFADAAILVEGNVERLLMPQMIAKVAPGLLSTYVSILEVGGAFGHRFKGLIEFLGLTTLIVTDIDSVMAPAAADPVAPDDEDDPDADPDLEEAAEDRAAVRGGRKACMANEPGALTSNQTLIQWLPGRSTIADLLNATVEQRIQVRTVASDALIRVSYQTSVNASWRGTTAAMVGRTLEEAFALENLAWCQDAARAEIRLRVRGCNKLSLEQIAQSLHRKIKSANFRKTDFALALLSQDPSAWTVPAYISEGLLWLEHEVVPHPPEIAAPPINAGAVA

SEQ ID NO: 65751 - protein, 631 aa, Burkholderia pseudomallei; identical to SEQ ID NO: 62563

SEQ ID NO: 65752 - protein, 789 aa, Burkholderia pseudomallei
MDIPEVSAHSSATDPASSSAPSAPAVPPAETVALPGDSPIRLACVEVCNFRRLAKTRLELDDATTILVGANNSGKTSLLTVLRNFLSDSPGFRAFDISLSQWAKLRQLSELWEALDEDPTTESKDAEKWEQQYRQLLGCMPFIDLWFDAKEGAYNYVAPFITSLKWRGGAVGVRVRLEPVADSDELRKLAWRYREARSPVRTLPKDGHAWPMDLLDYWLRYSADLRRIAVYRLDPAKGPLATEQCNELQELPPDSQPVELQLLRKLVRVDFVPAQRGLGAEDDETRSESAGTRPGLFSSQLLKFARQHLNVAPSGHGNREDLVAAIARAQAELDDSIYKALQPAMEDVEVLGYPGLHDPQQLHFRTRIQTADLLAHSTAVQYRLDETAVDESLPEHSIGLGYQNLQSLSFMLVSFRAARLNPPQGSPAAVHLVMVEEPEAHLHVQVQRNFSSNAHELIRPKELVHSNLRSQLLISTHSSHLAHGDSFTRLRYVKRIASTGAGVRPSSEVVNLGDAFGDDIQTRTFAERYFQVQHTDLLFADAAIFVEGTAERMLVPLFIERDFPKLAKKYVSFLDIGGSHAHRLRPLVERLGIPTAVITDLDPVVPTTSKGGRVVRAAVHIAGQADLECGNDTLTSWHPKLADFHAYAKPTSAHLEWVSDSGVKVRFAWQLPGAAASDQWPSSFEDALVLTNIDWFKALDEEKDSVSGKKKDHRGTLGKVIGLVLDHSDHTELLKELHAMLHGNFSKGDFAATLFERLNAGQALACPTYIADALAWLSGQLEATAGETE

SEQ ID NO: 65753 - protein, 576 aa, Burkholderia pseudomallei; identical to SEQ ID NO: 64757

SEQ ID NO: 65754 - protein, 594 aa, Burkholderia cepacia; identical to SEQ ID NO: 62698

SEQ ID NO: 65755 - protein, 604 aa, Burkholderia cepacia; identical to SEQ ID NO: 64631

SEQ ID NO: 65756 - protein, 665 aa, Sphingobacterium sp. ACCC 05744
MAQHKNPYISRVQIKNFRNFLDVDVALDHKQVIIGENNVGKTNFLRAIQLILDKDYSDSDRQLTTEDFHDSIDKPMENGEEIEINLEIKGYEHNSKLKAQFVDAVISDAPPTLRLTYKFIPNKDEFEKIINYKYIIFKGNNEEYKFRNEDRSYINIYVIRALRDVERELKSNRNSPLYKLVKQYEISSDHLEEISDALKEAAEGILELDEIVHIKDTLSNRFASLSGLQTDHQITLRTFDIDTERLLYTLQVYMGLKERPVSELSLGLANILYISLMLILLKDKTILPIIKPEQFDSLVAEDEKGILSQLYEASEKGNYILKKEIEDEDIEALYNFMDEHNYRHQAFTILAVEEPEAHLHPTLQRLIYREVLHNSNTSVIFTSHSTYITSVTPLNYVVHIRKVDNSSKVFSTVNLSLQDKEKRDIERYIDAKRGEIYFGKGIILAEGITEEYFIPAAADLIEKPLDNYGIVVCNVDSTNFKPYIQLLNTLNIPWVLFTDGDYYEIEEYFDKEGKPKTKRIYHIIDETTGRAWGYKGNENILNILSTLGIIAEDEKLDEEEIRDNGCFIGQYTLEVDMMNNADEDGIEILKNIYNELKSGGDEMQENFEDALDTEYYWSALRKIEGNISKGRFAQRLADELILQLVPDYISEGIEAIVQKVKDSYE

SEQ ID NO: 65757 - protein, 620 aa, Sphingobacterium sp. ACCC 05744
MNSLFFQDLELIKKDDKQYEAYRSMENSVIIAGPGSGKTRVLTLKAVTLAKSHIHKPCGLACISFSRESVRELKKRLKSYGYIPSSKDFIGTVHSFSLLHVIQPFAHLYPQYNVIYPIKILPDDIKERLYNSVLQELNIENDRDLSLVDINKHRSLSLKGRSEINMESSDLIAKAAEIYEAKIRETEFIDFTNIINLSAKIINEQEYVRETLRSQFPWLLVDEYQDLGKALHEMVLELVFYAGIKLYAVGDTNQSIYGFNGGYPDFLLELTRNDNIKTIELVSNYRSSQHIIDASIEALNPVPPYPKYVAGKRKDDIADFTFITCEEEMEAQYEVVAKKVISNLLVKGTPLNEIGIIASSNAQIHNMANYMQQQKIPFFIVNWSFENSAVVVWLQDCASWCSNKNTQSFEELFKFWKNLVNNHQDLRENWENIRLKSLFYRVLTGSISKTNVYDWLTYTINNLDLKDTLIDSEIYPNEVGNLEALLNEAKLRNLKDVNITRFANLGFPEDQVTITTRHSSKGLEFEVVILLGMEEEHFPSFYHLGNETALAEDQRLCYVCVSRAKTTCILLRSRIFTIQTRRGPWKKEYEASRYWKSLYNRFGNEQNTFTKDAYPLIQEN

SEQ ID NO: 65758 - protein, 623 aa, Cedecea neteri
MFLSNLKMDNFRQFEDFSLELNKGLNLLVGENNAGKSSVIDAIRIVLDTTSVEWVSIKSTDFLSGKNELYIQLKFEDLSARELGLFLEYLTNEEITTGVNKSCLYINLSASITINPFKKTQFIKTEVRSGLSNDGPIIERDIREYLATTYLKPLRDAEVELSAGRTSRLSQILGSNVSLAGDEGATQRIIELLIHATQAIQNDSSIQMTQEKISTLLNSLTFKSNIFTPFLSLLGSKEYTEMSAPEKAFALKSILEKLSLELNTSGIKHGLGYNSLLFMATELMLIRQEEDQYSLLLVEEPEAHLHPQLQLKFINYLRTENSKLQCILSTHSPVLSSKAPLESLILMQDGKAFPLRKECTALSGDDYIFLEKFLDSTKANMFFARGILIVEGIAEMVLIPKIAELLGRPLEDYAVSLVNVNGLSRKRYAKVYRSNTASMSPSHLPIKVGCITDLDLWPDEAEATISNSYGFKQKIQPNETTGRGGNLQHWLNELTSEQINQKKNSKSEFDGELVKTFISNDWTFEFCLAKYGLSEELYEALHGNLIGYENLSTDAQIRAVQLYGEIENKGDGKSEVSYLLAKILSKYSERPSELRSKLPPYIIEAIEYVTEEFSNDEETSNEH

SEQ ID NO: 65759 - protein, 620 aa, Cedecea neteri
MNIEISERDINDVEQELNLSFDDARREIIQSYNDVQACPGSGKTTMVAAKLLIIAKKWMSLHQGICVLTHTNVAKKEIIERLQTSIHGGKLLTSPHFIGTIQEFVNKFLAIPYLRSQGFKITHIDDEICCARGWGFLNRGTKNYLERNRIKSIQEMQYKFIDGCLDLNIPSFRRESQSNSYQDLINAKNTLMTEGYFFYHEMYEISKDYIHHNPDIIKAIQSRFPIVFIDEMQDTQKFQDEFLNTIFRNDNDQVKMQRFGDPDQAIYGTNEEENQTYNQAELEKVKNSHRFNSSIASIARNLSYNRINLTSEISHPNQSLHTIFLVDDSSRTNVFEHFANLCSQVVPINCEYPIKSVGAVGKKSENSLTICSYYENFEKTDSTVGFKNTKLIQYIYVARQQNRNSESYRTILDGIIHFGRVSNFQITMQDGSQSDISVANIKKHLKLSSLLVDFNLLAMSLMTNEISEETWGNSVTLLLSYLGINISNRNHIFLSFERNLINEPHDSPTRNIISFEIEGRIIENQIATIHSVKGETHAATLLLETKYHTNDITTLIDYILLENITQPTEARKKKFMKQIYVALTRPKYLLCIAMNKSGFPAEHISKHELAGWNICDLTQH

SEQ ID NO: 65760 - protein, 484 aa, Lactobacillus salivarius
MDDVKQFRNLFNFCFIKASRPLDDDLSDHSHSISKQMIKMAKLDGEWNELIDELPDEILKPIQDKDISKKVQETSLNSLKETIMAIEETNGGRSGELMLDMLITEEDISDLLQRITMATYCVDGYFLGEESQGLGYSNMIYIHLQLNEYENSTDSCKVNVFFVEEPESHMHPQMQQVFIKYLIEHYKNGIQGLITTHSNEMVRVAGIKHLRVIRKTDSFLSELHDLSKLINELQESSNSEDKLLANFYDWFFEIGYSELIFADKAIFYEGDTERLYIRKLLTLKKYEKLKQQYIAYIQVGGAYAKNYQKMIELLGIKSLIITDIDYSKDAKVIDEIESSEITNATIKTFYRIDNPERNPTVKDLYEWKDKNKNIISNGLIYTCFQTNNDGYSRTLEEAMLSKYFSIDVTTSLTKREWIEKRENSKLKFVIPTKEIKEENSIKLRDILKSTSSSKTNFMYSVVLNEKVEKTEPNYIQGGLEWLMK

SEQ ID NO: 65761 - protein, 648 aa, Lactobacillus salivarius
MVDEVENIYLVNAPAGSGKTTWIRKQVEKHLLENDDDNILCITYTNRAAEELGRDIKSNRVFFGTIHSFISNYMGSFFGHKEIIDLYWELYEEKIAQRIANVENKKNVSISNERYIEKYGVLDMETVHSNLKKISYGETQFTSLYYGLLSHDDLLSFTKKVVERYPVILKKIRDKYQLVFIDEYQDTNADILKLFYSSMVSGKGKLYLLGDKMQQIYKNYDGSFEDTFNILNKSTRLDVNYRTTPYIVNILNAIYNDKSLQQYPYDKNLDSQMLFKPKVIFTNDRDKTVNVFTKKNKDTLVLYLTNKERFYSIGVKKLYKSFNKIPKYQFTGKYSVVDVLTKEEVWNKDILLSIIFLLIDICDYYINGKIGNIFKITRNNEKIFNRKVFSIRFHADKKALHDKLDNLIAIYQEEGITIGSFLKSCCDNRLIEEEYYGEIIEDNDYASALEVTLSEILILRNFLENPYISTQHGVKGESHDTVLFVAENNSRIPIVNMSKFFDLWSKVNVVLRDFDNFYYAYLKMIKSIEKKCGMKISKISLNDYRKNETFISEKISKFNEMYYDNDYYIVLLKDKFDEYFVEKNNKSAQECLKENAVYGALVAYRLFYVGCSRARKNLAIVINNADIVAFEERLKNKFKDIGFEIEEI

SEQ ID NO: 65762 - protein, 665 aa, Paenibacillus graminis
MYISNLDVTGYKNSKSKSVIKLQKGLNILVGENGSGKTTIINALRLILRENEFSYLNIDEDDFYVSLDKDFSAPEIRIDLKIESLNSDEQVTFLSWCDADFNAQLHFEVSANPNRKGYYKKEIWGGASKSSIFEEETFDCIDCIYLPPLRDAEEKLVNGKRSRLAQLLKKQYGDNKDELVRSVKGFNEQITSNADKKYNEIEEAKKNINTKLEETLGQRLGQSINLQFAETTFNKIVESIKMVFFPGIKENNPEKFRDIAINSLGYNNLLYIATVFAELELLKDNNMMTVLLIEEPEAHLHPQLQVKFIKYLEELTRKLENLQVVITTHSPVLASSVDTDNLIHVAYKDDRIIATVLKYINLGESKSYINRWLDVTKSTLLFSKGVILVEGISEAMLLPTFAKIVLAEHNKNALNGGINNMLPNSLEEAGVSVVNINGINFKHFMRLFSNFKEATSQAHIPIYCAGITDNDPPKIKVIVYDKNGVMKSDKNGDPVTTAEDVYPLPSEAPIGANIALQLIDEINMSKWGRLYRSPLKTFEYDLAIEENTRQLAEVLHDLWSKDGSVKANCKTIITRNNQYFDNEELLRNDAEFIFTHIDADEVGKGVFAQKLADYLEEQIRSHMGNINASKSNLTEVYSEISSLITVPEYIKKAINWAIGGIKIDG

SEQ ID NO: 65763 - protein, 653 aa, Paenibacillus graminis
MDKLEMEHEIINTLCKNNKKTESYSLIIQDKVREKTEQQLEYVLSPINKNVFLEACAGSGKTEVVGMKTAYEISKWNFKNKGIAVLTFTNEATDTIKERVERFSGLSSMFPHYIGTLSAFIHGFISQNFGYKFFKHKNRDGDKSYRLVDKNLEVFDNHWLKKYKIPYINNNAGHHELFANQIYFDNKINDVILYQSETKKTPLKEFYNSSDFQKFVNDYREKSGNKTALGFEYIKEQIAKVKNSFFEDGFANFEDINNIALRILKRDSKLTELLASRFPIILVDECQDLSWVEMNILNEFKKAGTVLHFIGDLNQSIYEFKNANPEITKAFLSDFDKYRLTDNFRSCHPIVELSNRLLGITLPIRGLGIDKVGEKSISYLEYNDLSVVTEQYQKFLIGVNISYEKSAILVRQQNLKQELETNQTESKHLLLDALQLWLQNTPTSQMLALELAGKQMQKWFGGSKTKKNYFCPNAIESAFQWRIFLKNFLEGCLANDRLINVGDIEYSIWYKNFNACFLTMIEKAYQSLADFDIEKRDFNTLPKLRTPSGSAKNKIVIFNSKDNSNMVPINTIHSAKGKDFESVMVVSSRRNSGNSGGGHWKHWLEKELESGRIGYVANTRAKYSLVWAVPTLKKQEKIEVESYGFKRITLKDI

SEQ ID NO: 65764 - protein, 703 aa, Prevotella histicola JCM 15637 = DNF00424
MHISSLSIRNFRNFRSAKLKFTKGINTIIGENGSGKTNLFYALRILLDNTLPRHISFYETDFNRSLGTWKGHWLIISIVFEDLDASEEAQALAIHAFGQMKQESKGSYSIYFRPKKEFRKEFYDYSLSEDKNIEGLKDIQNRLTIEDYETVYLCRGEADFSDDENYRRYVGDFDKIEFPNPDDMEKLAFGTPLPSVISIHNEVSCTFIKALRDVESDLRSYANNPLLNLLRGREKTVKIAKQNEIIESIDNLNEQISSLDEVKEIRRGVDKSIKDAVGTTYAPNIDIRSELPNEMERLFQSLKLWVGDPDDLGYKGKIWELSLGGANLIYLSLKLLEYEKVKSEKIANFLFIEEPEAHIHTHIQKTLFNNLKENKTQVIISTHSTHISSVSKISSVNILARESQRSLVFYPAHKLKKDQTIRVERYLDAVRSNLLFAKGVVLVEGDAEQVLIPEMFKKVFGLSLDEIGVSLINIGSTGFENIAQIFHADRIQKHCSILTDNDQSIIPLPDEPDTDDDYQKHCRKSQESGLERKKRLTDFCNGNSFLKLFFAKHTFEVDLLMNDNSYEYVQCLKNIYQQDKYIKQSESKLENKSVEIAGKEVLRIADKVGKGWLALLVAEELVYNTYIPDYILDAIAFAAYSLNESSKVKAILYRLMVLSENDNNNYQEEASKFLKEGKSEETIINEFCDTFQDDQLTKFLKLL

SEQ ID NO: 65765 - protein, 591 aa, Prevotella histicola JCM 15637 = DNF00424
MTFNELNDEQKQAVKQEGNVLLTACPGSGKTRVIIHKLAYVASHFDETCKKKVAAVTFTVRAAEEIFRRVNALGINCDHVWSGTLHAFCLEWILKPYSCYVPALKNGFSIADETFCSELVSNLKAKYKIKQTEPINFQFQRDGSCVETNNVKLKLLDDYHTFLKEKKLIDFEQILCYSYEILTGNPKISKVLSNLFKLVCVDEYQDTQELLYAIISTIIKSGKGNTSLFLVGDIDQAIYTSLGGVAKSLDEIQAELDNLPVTPLTLAGNYRSSQRIIDFYSNFQTQPIVINAVGSNAEKRGLITLNQTVDKSNIVDEIARLIQNSLDKGIPEDEICVLVPQWRLITSVSKKLRVALPNVNFDASGLSPMSKNRDNIWYKLSRLFLTERNPKIYSARYRWATELIDGFRDITNTEFSERYSSERNLLRLINSINSNKEEGIDYLKDCFMQFLKTVEIDYTKHPLLVELWDFYFTSIRKRIEDSNFKIPSDIQSFKRFYRERAGVVINTCVGVKGEEFETVIAYGLLKGLIPHWNDILAQKGIEASKKLLYVICSRAKTNLHLISETGRKTKAENAYKMTDELKNISFQYDVI

SEQ ID NO: 65766 - protein, 593 aa, Prevotella buccalis DNF00985; identical to SEQ ID NO: 64556

SEQ ID NO: 65767 - protein, 593 aa, Prevotella buccalis DNF00985; identical to SEQ ID NO: 64557

SEQ ID NO: 65768 - protein, 712 aa, Pseudomonas cremoricolorata
MKIVRIEVGNFRLLKNFSLDLESNLSLVLGKNNSGKTSLLSALEKFINSSDKNKIVFDDFNVDLKAALSDLVSGVKPIGLESDYLPLGITLKLCIEYDDLDDLSAVSQLIMSLDPDDNHIVLGFEYLISYSQLTAMRNDFSAIKDKYDNDPSLFLKENQHIYFDQIRKKSFSYSDPEVFTDLNKENISLANVISFRSIGAKRSVTNRDNDKTLSTQTAIIYKKTSENQEQQEAVEGFKKQLRSTDTELSEIYQNMFSGLLSKVAKFGGSRLSETHIKIASTLQHRELLDGNTTVMYTHGSHDLPEHFNGLGYMNLISMIFEIEMLMSSFRRPSKESPATINLLFIEEPEAHTHPQMQYTFIKNIKSLLEESRVREDGIEIHLQTIISTHSSHIVAECDFDDIKYLRKSPFSNSVDAKNLKSLKSEYSSDGADDNAQGELCYRFLKQYLTLNRAELFFADKAILVEGDTEKILLPAMMRKLDKEFPDTGVMPLLSQNVSIVEVGAHAQIFEKFIHFIGIKALVLTDIDSGIKELLFERDGVTPQRYKNGNQKIETRKCRPDDPAADHTANGSLIFYHGKVREDLGYFTSLGAESKALSKVGGEWKVDVAGSVFLAYQTEDNGYHGRSFEDAFFSINKALLGTDHEKFPSLTPKWFNKYVNNECCAFEFAEKAVGKKPSLAIEILLNSIPDDKSEFSNWKTPHYIQEGLEWLRK

SEQ ID NO: 65769 - protein, 641 aa, Pseudomonas cremoricolorata
MVAQMKNLEGVSEETRKILDAINEGKSFLLSGGAGSGKTYSLVEVITSLVTLKPLARVACITYTNAAVREIESRASHPNLHVSTIHDFLWGVIKHFQIELKEVLLSLINDSDISNFKILDANGEPTSLAEIDGDVRYKEYVKFREGIISHSEVIVLANEMFKRYDKLCRILKDCYPYILVDEYQDTQAEVVDILLTQLTRVGCPNVVGFFGDAMQAIYEEGIGDLDLYKGEGVGQVREIKKEENRRNPKNIIDLANKLRNDGIFQVPSKDLNAPNMAEDGSVKNGCIQFIYSSNDDVNVVKRFLGWDFSEPSSAKELNLTHNLIAAKAGFSELMRIYDGDKILEYVRRVKNYIKRSEPDFICDGKTFGEVLVGLKSGKVGKTLKNIEPTDGMADYIAEHRAVYDEALGYQYTELASLYVNKDQLIDDQKSDRGELGRGGGNRDDLIKHLFKIQNNVQLYLEGRFNEFVRITEHAITSKKDKVRLKEEIVRLSRVDGKTVQQVIDEANAGGIVRIDDRLKLFVESKRYIYNQVAALPFAQFQKLFEYLEGFTPFSTQHKTKGREFSDVLVVLNNGRWNSYNFDYLFTDRADKESVVSRTRKILYVCCTRAKSNLALFYHSPSEAVIQKAKVWFGDENVTSLD

SEQ ID NO: 65770 - protein, 676 aa, Lactococcus lactis
MKLQKLKICNFRSFKNEEIFEFDELNGLIGANSTGKSSALLALCKLFSENSSERTISKKDFFQVEPEKNRYLYIEAVLQTNIGPTETPLFFEHYVVDNQGESPYLRIRLEATWEDDGTIEGAIDSRIYFITCPEDEEIHEANKMSANRNVLNKIRVIYVPALRNPNLQLKNVSGSMMNRIMRGINWSDDTKASIKNLINDLNDVTASEKGIVILQEAIKNKWGKYQSDKRYSKASLVFNSDNVESALTKAEVIFSSQEGEGYSSIDDMGDGHRSLFYISIIESFLDIEEKINTEESEGYKKSIDLSPPLLTILAVEEPENHIAPHLLGKLLLKLRNVSKKENAQVVLTSHSSAIIKRISPNEIRYLRLDIESQSTKVKSISLPEEEIYADEYKFVKEAVTAYPELYFSKLVILGEGDSEELILSKFFEINGGNVDISEISVVPLGGRFVNHFWRLLADLEIPYITLLDLDRERSGGGWGRIKYALTQLIARGYNRDEILQLADGNVMSKETFLRMHNWDVANIKCMESWITRLENYSIFFSSPLDIDFLMLEIFEDSYKYILSENEGPRLKIDGESKPIKELGDELFESKEYNSRIKDSVHATLKKEGGKGDTYTDIQQKLMIWYNYFFLGRGKPTTHISMFANIDEEKLKKSTPEVIKKIITKANHILTGDVQDE

SEQ ID NO: 65771 - protein, 613 aa, Lactococcus lactis
MNKIINETNWNPKGDIILEAAAEKAVKINKNVLVVAGPGAGKTELLAQKTDFLFQTNLSGPPRRILAISFKKDAAENLKDRIVKRYGNEYASRFTSLTFDSFAKRILDQFKSALPKNLIPSKDYLVEDRDRIEQVLSKYVYGFESWYKKQKSQEIEKQLYGEQNQKIWRDLLIGDESGNACLTFKMISILARKIIQENPLIRQALQATYSHVFLDEFQDTTTMQYELVKSCFLDGDSIMTAVGDNKQRIMEWAGARKTIFSDFQQDFVAEKISLITNHRSAPRLVELQKMMYESLGEYELEASSSTKWNSNDGEVTLFLSENEIDEGQKIANDIVQKVLLGIAPNEICILVKQLPENYTGQLIPLLKDKGIRARIENEYQDVLKQAIVILLLSIFKVSLKKQTPQEWNYLEEFYFEVVELGEFQNEKNFDFVQDCIKDITKYCSEKMGSITEENDFKVLVVGLINKINRNTIFKIYPEYKQGIYMDSILDQFIELFWKEYVIEEDFNTAIRTFQGENIIPIMTIHKSKGLEYESVYFIGLEDSAFWNFRNKPDADRSAFFVAISRAKKYLSFSYCSNRETMKNYYNPSGDQKRENINEFYDLLSQPGISKIIQ

SEQ ID NO: 65772 - protein, 600 aa, Pseudomonas aeruginosa; identical to SEQ ID NO: 62594

SEQ ID NO: 65773 - protein, 550 aa, Pseudomonas aeruginosa; identical to SEQ ID NO: 62595

SEQ ID NO: 65774 - protein, 693 aa, Pseudomonas rhizosphaerae
MRVEKVRVEGFRLLQDVEIMLEENSTVIVGRNNSGKTSFTDIFDRFTGETGARFRLEDFSPAQRERFFAAKMLREQATKPEDVLAALPTLALTLIFRYDSTAPNLGPLSPFVIDLDLDSTTAIVRLEYRATLATLHTLLDTPPAPEGVEPRTHFFRSLRDTVPKAYSIHVFAIDPTDDTNRRDFEGMAALTALLQCNFVRAQRTLDHAKHGDADVIGKLLSALFKTASAPTAAAADQELAAKLKASVEDIERNVQGDFDEMLKKLLPAMEVLGFPSLNDTELRPETSLNIEALLSDHTKVVYTGTDGVHLPEGYNGLGTRNLIYMLLQLESYHKAYRAKTTRPATHLIFIEEPEAHLHPQMQEVFINQLNAAIGKLSTSYPEEAAWNVQFVITTHSPHVANTASFEAVRYFLNESPTPANARQTKVKDFKKGLSSISPDDQDFLHQYMTLTKCDLYFADKAIMVEGTTERLLMPRLCELVDKSLEDKHKLARQYVTCVEVGGAYAQIFYPLLDFLELKTLVVTDLDSTKPVEKQNKHGKKITTWDKCPVAEGERTSNAAIKDWFRPDDAADKDGWQITPAELVAKTAEEKQSGYRRIAYQIAEKPGTNICARSYEDALVLANPDRFKWPKEQDEASEAWEIAKGLAKADTALRFAIREKEWTVPRYIQEGLGWLSAPPPPAQNVEAPVKEEAV

SEQ ID NO: 65775 - protein, 577 aa, Pseudomonas rhizosphaerae
MKEPTENPALVAAQEAQRKINEALDAGYSFRLEAGAGAGKTYSLVAALKRLITERGPALVQAGQKVACITYTEVARNEIAQEIEDHPAILVNTIHGFSWAFLHQFQKALRDLVGEMDDRKEKIEQGGGIGSKSVDYNLGYFSVDTDRITLSHDDIPEMMANLLQKEKFRRLLSQQFPVIFIDEYQDTHPQFMEAITEHFLRPATGPLIGLFGDHWQTIYRSEYELAEYPIEEIPKGSNFRSVPAVVDVLNKLRPELKQAVHEPEAKGEARFFHTNAYKGQRTNDRQSKEDLPPDLARRTREDLMQRLQAEGWDLSKTKVLMLTHNVLAAEQGYPNIAEVFSGRTEQFVKKEDPAIKFFVEVVEPMCAAYGASRFGDMFRVFGSGPTITKHEDKSCWRRDMDTLQMLRADGTIGQVIDHLKETKRPSPPDRLLRRDEELRALNGDPIPDDASALQRYNKLREIPYGEVIEVVKFIEKQTSFATQHSVKGAEFENVLVVLGGGWNHYNWPQLLELVKTKALNSKNTKGFYRARNLFYVSISRPMTRLAVLATQTMPGTALEAINNLFGSDNVEELAIAM

SEQ ID NO: 65776 - protein, 566 aa, Escherichia coli
MEISSLKLKGFRNFKDAYINFNSNTLIIGANDVGKSNMLHSLRMLLDKSISDSEIEPNELDFHLENGNSCEEFEIIIHFKNINEDAVLSILKGNVSDSGESFIKYFAQKSDLSYKLFIGDSLESLQEINSRYYLKFVNLKYIQSQRDLERFIRKEKRQLLKIAQQSLNSDEREEDDYLLGEISSDLQLINDKISQLIYVERATKEVNDELKKLAHHYSEYSVQLDTGAIGINDFIDNLQLGANTNGSNVMLGGDGRNNQILLALWKAKSIKEHDVDNEVIFYVIEEPEAHLHPHQQRKLADYLIAELPGQTIISSHSPQIAVNFEPDSIIRLLDRGGHTVAASEGCSKGISDGWEDMSYRMSILPAESFFSNGVFLIEGPSEILFYHSLAKSLNIDLDYLNISLISVDGISFKIYAAILDALEIPWVMRTDNDISKLKGQEKWNYAGINRCLDIVGIEKFEHSDKKITSLDTLTNGDWQTVSEVINKSGVYLSKIDLETDLVEELSAPILDALDKKDNQSAIEYLQKKKAIRMRIFLKKIKKDLHKLNAGDLVKPLNHLVKIVKGE

SEQ ID NO: 65777 - protein, 541 aa, Escherichia coli
MSIFSPTTQQRLAIDYPKSMVITTCPGSGKTTVIKEKIRNITGCLPEHKGVIAITFTRKASSELERRCKADGHDIKHSFFGTIDSFCLKEIIIPFLPRIWGGKPTECKVLKKLDSPYKYYLEEHFFGIPSVVNVNEDPGYKRLYDEGMLWMSSFAALALKILNESPAATRYIKARYSHIFIDEYQDSSLSQHQLFLKINELGLCSIAVGDVWQSIYEFRGGNAELLLDLVRDKQVFAHFEINLNHRCHPSIINYASRLLDPNFVLLPSENINVYRKRLSGNLKDVSMTISSWISKWLNEGKWGLEHANQIAIFARKEQSLLLLCSGLTSTFRVYIDTPLDKLGTECSDLYKDLLAYRYKAIGTAQELIDKVFDGLIINDNQQFLLRKKIKSLRAKLTDEELINKLHEIAEMLNIQFSISNDNAVLDIISDDIYLKQFMPSDKNEVQVMTLHKSKGLEFKIVLHLDMDEWSFPYRTVNEVDRNTALYPSLPQETNLHYVGITRAEKCCVLINAELRQNSTGAFKKSEASYFFKLPQLEGLYR

SEQ ID NO: 65778 - protein, 679 aa, Prevotella timonensis S9-PR14
MYIKEIKILNFRNFKEALIPFHEGVNVIIGHNNTGKSNLLRAMGLVLSYNYGHRLGVSDLFYETDIAVLKQQSPRIQITLVFCRSAGEALYSAEMGLFSSLMTDPALSEEAELRFEFKLIDVQEDHYKADVANANTAKEIWKIIEQDYIRLYKSSRSGGNQAAGININETLGQIDFQFLDAIRDVSHDLYAGYNPLLRDVLNFFIDYSVKNDSTKTEDEIKGQLKTLRDGFVQQSSPLMQTLQGRLQNGKNVFLKYALDTGATFNGAVPDFDGTVTENEMFAVLRMIIKYAVGIEVPATYNGLGYNNLIYMSLLLAKMQADSSITYMKRNAKVLSFLAVEECEAHLHPAMQYKFLQFLQDNNANGHVRQIFMTSHSTQIASAVKLDDLICLTSPALGQINVGYPRDIYKEDNDDESKQYVQRFLDATKADMFFANKLIFVEGIAEELLLPVFARYLDKNLTDEHVLVVNMGGRYFKHFLKLFDTNNPYTINKKIVCLTDIDPCRKKHESDATYEACYPYEYNIDADNYDYKHHADTEVNQYADHPNIRFYRQDVTYGKTLEYDIMRENPNCELLLTNSVSNLKEIKAMMAEQDVKKMMGKMRNSEANTRIKTSIGASKWTDEEKRKALLASRYLNSVSKGSNALELNVTLMANLEKPETDRKEFHVPQYIVDALTWLLS

SEQ ID NO: 65779 - protein, 553 aa, Prevotella timonensis S9-PR14
MAIIITSEQTIPVDKPFKVTAGPGAGKTHWLISHIKNVVSNSNKLDVVRKVACITYTNVGIDTIISRLNMRNDVVEVCTIHSFLYANIVKPYIHLVAAEFGLELSKLVVVDDSNFKSKGAAEIVLKSIGKSWLDTETYLNGLTKAIWRYENHEYKHYKPKYPQTYVTKSGKRYVGNDWYMGFKRWIWSGGYISFDDILYFSYILLSKYPNIYILIKARYPYIFVDEFQDTIPFVVDFLTKLGNEGVIVGVVGDKTQSIYDFLGATVQQFDSFTVPEMQEYEIRGNKRSTKQIIDLLNIVRTDFSQDWLNGSEGMMPELLVGDMLNCYQQSIEKSGTNDIQSLAFQNVLANSMRKKNGVREVEKILEIDFDSNARRQMIIKTLIKAVEYTRMNDLRNAWHQLDIINRDRTITIVALRRLLDGYKDYKDGSLMDFYNFLVNDLQLKITKITGKAIKDFYVNHTYADAALGVKYGDSNDKHKTIHKSKGEEFDNVFVILEKEEDLEFLLSPNLDGNNVHRVYYVAASRAMKRLFICVPTLSTENRIKLKDKPITIP

SEQ ID NO: 65780 - protein, 754 aa, Enterobacter sp. UCD-UG_FMILLET
MKINFIEIKNFRKLKSVRIDIAEKTTLFVGANNSGKTAAMEALGHFLVDASRFSVNDLTLCNWAKIKDITEQWLTEENIDLAKSQEAFSDLFPCMDIWIEAKENELQYVNHILPTLEWNGGLIGVRLRYEPKKFDVFFEDFISSRQNSLDIHDRISERIDKENYTIALWPKDIYEYLSRKLNSMFTIKCYSLDPSKLESSDNGIANPQRIDSQQTLLDGIPLKDLIRIDEINAQRGFGSPSAADKENSKLNTQLRDYYSKHLNPIESPELSDIEALQAIRDAQDTFDERLKNCFSQAIKEVEGLNYPGVTDPKLKISTKIEPIDGLNHDSAVQYELTNALSNVSLDYLRLPESYNGLGYQNLISIAFRLMGFRDSWMKVGKATNKKLADDNQEDFPAPLHLVLIEEPEAHLHAQVQQIFIRKAYDILRNHNNLGDKEELHTQLIISTHSSHIAHECKFSSLRYFRRIPACKEHEIPVSTVINLSNVFGVNDDTEKFVIRYLKATHCDLFFADAVILVEGPVERILVPHLIRRHYPFLNQSYITLLEIGGSHAHRLKNLIVSLNLLTLIITDLDPKDSQDGKVKPSKKGSGFVTSNTTLASWVPEVTGVDELYKLTEDKKEKKYNDFFYVYSAFQIPVLAAFKGVNQEFLPNTFEDSLVYNNLDFFSNLTGNGLVKKFKASITNCKNAEEFGEESFLHLSKGNKAEFALDILYHDESDKLNTPNYISNGLKWLEEKIKIKQLELVSDLASDGENK

SEQ ID NO: 65781 - protein, 612 aa, Enterobacter sp. UCD-UG_FMILLET
MTIKQTEEILDSNIHNYLTGTQKHSFLLYAGAGSGKTRTLVNVLEMILKSHSEEFRLRGKRIAVITYTNAACDEIKRRVKFNKLIDVSTIHSFLWELIRHHSSDIKSWLMENIAAEIADLRDKQSRTTRVSQASLERERKIVSKEKRLQNLSDVYKFTYNPTGDNRTKDSLNHSEVIKLGSYFLDRKYTMQKILVYRHPILLIDESQDTNKLLMNALLEVEKNNRDTFSVGLLGDMMQRIYSDGKSDLEACLDEHWKKPEKSINYRSPKRVVALINLIRSQVDNHKQKAREDAEEGYVRIFIKECHSDNKDRDESFVKKRMREITLDDDWENHDSLVNTLILEHHMAATRMGFIDMFTPLYQIERLKTGLLEGSLGNINFICGIVSPLISACIKNDTFTITNILRTNAPLLKREHLLKNTNNTSPLTQIRNSLDMLKSFISTNPELITINLLHKINEIKLLDVPDSIQEILESNDNSQDDIIEAWQKAFSSPLCQFDKYYNYVKGKTNIDTHQGVKGLEFPRVLVLIDDSEAKGFMFSYDKLFGVKEKTKTDLDNEKEGKDTSEDRTRRLFYVTCSRAQKSLAILAYTDNTEMLRKNLLHKGWFDSSEIEII

SEQ ID NO: 65782 - protein, 674 aa, Vibrio coralliilyticus
MRIKSIKVENFRLLQNSMLDMTDGLTLIVGKNNTGKTSFVVLLEKFLSKPNPSFSFSDLPVSVRSKLYDISEETDIDELSIRLCISVEYADEDNLKNISDFMLDLDPDKSTINIMFEARIDRDTLLNRIPTKKDGADEEKYLTEKRSFIERNVSKFIKTSIYAYDDSGYEGDRPYYLQNREELEEKEFKDVCNLINFQVIHARRNVASSDETGKSPLSTVTTQFFKKLNDTDDERLEQVRTALIDIDKGLETQYSDVFSGFLSSAAKFLNLDGLKVISDIEASSLIGSSSKVIYGTTEDHLPENLNGLGYLNILYLLLKIEMMKQEFEASSSDINLLFIEEPEAHTHPQMQSIFSKKIREVVSEIQGLQAVITTHSSYIVANSDFEDIRYLLKHENLNVEFRNFHTELARKYKAEQGDEGAKLYQFLEQYLKIQNAELFFADKAIFIEGTTERILLPWFIKKYDEKCGDESQPISSQNISIIEAGANAKAFAPFLEFIGIKSLILTDLDSTKQDVKPDINGKDRTSYVACPVSDSSHTSNETLKHFFSAPDLKDAGFPEWFNKLKRGELTETAGCVKVAYQTEEHGYQARSFEDAFFNSNKAELKRACTNSEVLGLKNKDEIEKIDTVNIFKLTDRVIDKKSDFAASLLYLGLTGKADWVTPEYINEGLKWISQ

SEQ ID NO: 65783 - protein, 723 aa, Vibrio coralliilyticus
MDQSVSTPLEKIKECIELEQSFVLQGGAGSGKTETLKRTVRFCSENHPDKKIVCITHTNKAVDEIVERVGSGIEISTIHSFISKLIKPYKRNLLKLLPELFYLPLFEELGIDHYNGDDKTRKTEEHKRFKALHESLANRRSIVLQEGTAKVTGKREYDKDPSSFNTSLNNDIEQLNEAIAETIKQHHFNEVVYNDTPFDSFKSATFGHDGLIKIAALLFSQYSIFGRIVRDKYDCIFIDEYQDTDENIIHSLIYSTPDKGLTIGLFGDSEQAIYEGGIGSAKRFIDDGQLTLIEKEDNFRCSRQVIDVANKFRSDGLTQKVALKETNGIMETAEEREGSATFYYSIKPPAPEKPASPKKSDSDEIKSVYQIAKAQYDQQLEEHKLDISRRLEDLVVCAQADIGENVLLKLPNKSVARDASFGNLYELFDGRFRDTREEIKKHLDRLQFGQLAELLQLFNSSADDNRAYNKLIGLLKKQGLFIKTKQDKRELHHMLQELSSSNEAAYTVMNRAVIAGLISLSESHQSYLKRKDSELERIDKDNNIYAFKKLQESGCNTKKQICDYINQNNGTDLTVEAIEEHYDQLAKDVLSEKFYSGLFGSDLSFNEVLAFYKYEGDDSNFMTMHKTKGTGIENVVVVLDEFNWSKYDFGSCFRSETDNPTRQALTRKLLYVACSRAKKNLRCVRLLDSSGELANIENYFDNLVPVNLQKPRQPSLCVHGSHQ

SEQ ID NO: 65784 - protein, 691 aa, Paracoccus halophilus
MKLHNVKIENFRLLQDVEIGFEDRTTLIVGRNNSGKTSIAELFRRLLSEKTLTFRLEDFSLGCHEKFWNAFEAFSAGAEVSDVLDTLPVIRIIIDVSYDVDMPDLGALGDCIIDLNPDCTYGRLVLTFGPRPDATTFLFADLPAPEEDAENARSALFRALGARVSANYISIFEAIDPNDPTNRKPLETKVLTAIIQGGFINAQRGLGDDTKRERDVLGKVVEILFQSALSDPTDPEKRTTAEQLKSAVEDIQSDLHSDFNVKLTSLLPTFELFGYPGLADPGLITETSFDVERLLSDHTKVRYVGKNGITLPETYNGLGVRNLVFMLLQLLRFFREYQATPTAAGVHLIFIEEPEAHLHPQMQEVFIRQLDQITNAFVTQLNDNHPWPVQFVVTTHSPHMANEARFESMRYFLSKADENGVRRTIIKDLRRGMGTAPEPDREFLHQYLTLTRCDLFFADKAVLIEGTSERLLLPTMIRKTDNAAPGAPQLGSQYLTVMEVGGAYAHRFFDLLTFLELRTLILTDIDAVRPNANNKREAVPVAQGQFTSNGCLKALYGADISPAALLIKTPDEKITNGRRIAYQIPEQDGGACGRSFEDAFIIANPGLFALGEEDVATAAYELAAEQKKSAFALQYAITNTEWIVPRYISEGLRWLAQGNPAPVPPPVAVAVEILAEAAGVEIAPIQGGEHG

SEQ ID NO: 65785 - protein, 586 aa, Paracoccus halophilus
MAEGQESPADAAGRIALERMFACLDEGRSFRLEAGAGAGKTYSLERALRRLIEKQGSALLRQRQQIGCITYTNVAKDEIIARTNAHPAVRPETVHGFCWSVLQDFQPTLRELVPGLPTWEERLAETGGVGHRRIHYELGYPGVTDDQVSLRHEDVLSLMIQAMSRPKFRRVLTSRYPILLIDEYQDTDAGFVDGLKEWFLDRGEGPLIGLFGDHWQKIYGEGCGLVEHQALEVIDKQANFRSVDPIVQVLNRMRPDLPQMVSDPAAQGETRVFHTNNWPGQRRTGQGGGHWKDDTSPEAARAYFQHMKDRLAAEGWDLSVEKTKILMLSHSILAREQGYENIRSIYGQFNDPWLKKDDPHIKFLADQLEPACAAFEANRYGEMFEAFGSGMPRIRRHEDKIAWTNGMNVLIALRQTGTIGEIIDFIAAQPHMRLPAAVEQREAKLAEVGDEPVEGEPRRITQLRKLRTVHYTELIALDRFIDGHTPFATKHGVKGAEFENVMVIVGRGWNKYNFVQTLEWMDAAPPADKQDFFENNRNLFYVACSRPKVRLALLFTQLVSPAAMAKLTELFGENNLVALPPDPVVT

SEQ ID NO: 65786 - protein, 708 aa, Bacillus megaterium NBRC 15308 = ATCC 14581; identical to SEQ ID NO: 65704

SEQ ID NO: 65787 - protein, 599 aa, Bacillus megaterium NBRC 15308 = ATCC 14581; identical to SEQ ID NO: 65705

SEQ ID NO: 65788 - protein, 637 aa, Colwellia psychrerythraea
MHLNKLVTKGFRCFDDAFTVEFNAGLNVIVGENGAGKTAIISAIRQLFIDSESGRYAVSEIDFHRAFKKESVASDEFTIKAHFDELDGDEKVAFLHWCDEKGKASLNLQVENKEIRGRYKRALWGGKSRTTAFEPETIDLIHCIYLPPLRDAESKLINGRQSRLSKLLKALSKREIDKLRKSKKQHPLEKKIIEFNQELADSDDFGIKEANKLIVDSLKKSIGESFGQNTLIQFAESDYTRIVEGLRLLFFPDLTEQENSTFRSLQENSLGYNNLLYIASILAELTIDDVAGEIKESYFKLLLIEEPEAHLHPQLQVRLLKYISDVATRKSVQVIVTTHSTVLASSVDIDSIIHLSNSQPPIATPLRNCDLPDNSKQFINRWLDVTKSNLLFASGLILVEGIAEQMLIPLLAKSILKDQIKGRCSLEDVGVSVINLNGIYFKHFMRLYCNLTDQDKEEDQAGVNIPIRCAGLTDLDPAKRKTEKDAKGEEITTTIKPHDGDMHDGTNHALKLVDTISKSDFSRLFVCEYKTLEYDLAMQGNNIPVMAQVLYDLWPKEGKVKRSLKPLIKGDWTCKSPKEKSEAAHLILKRVDDDEIGKGQFAQVLADKIACSKVIIDVPEYIAEAIHWACSTVANDD

SEQ ID NO: 65789 - protein, 590 aa, Colwellia psychrerythraea
MMTNFTLEQKDYIKSTIDGHVYLEACPGSGKTEVVAAKVAKEISNWKKDPSGIGVLSFSNSATDELKDRIGKFSTSNLKFYPHFIGTFDSFIYKYIVSPVAHKITKYAGTHDDYAIRIVESTSSIFIQTKYQYAGRGKLRANHYSYNSDSDTFSFHTGEKRYDQSLDVIKFKHWEKKDLLDTKKRFLKAGFSTYNDIELLAVEILNDVDLTGFSKNLTLRFPVIIIDECQDLGEIQLSILHKLDKFGVKLHFIGDLNQSIYGFRNCEPDNVLEFTKELGFEFYPLTKNHRSVQPIVNLCNTLVAGENVIGRTTSEINHCVVLEYLECPTEVLPTFTRLSKPYNNSVIIARGHSMLNKFNTSATKLNEVQKLALAINLFDIDDFERLEKSITLFSQYLRTLIKESVKPLSFNCPDSIDSPLRWRNFLFNALIFLVEDDLNDSTVSWKVWTGKTKLRIKEILKQSFVDDDIAVVLNSLSDCNIRSPNGLGQEGLGLSLKIVNTTTCSLRKETIHQVKGETHDVSMFVSSAGKQGGVGGNWKEWLDDPTTESARLAYVASSRPKELLIWAVKKLKPKETIQLQDIGFLVMPLD

SEQ ID NO: 65790 - protein, 771 aa, Klebsiella pneumoniae; identical to SEQ ID NO: 64244

SEQ ID NO: 65791 - protein, 625 aa, Klebsiella pneumoniae; identical to SEQ ID NO: 64245

SEQ ID NO: 65792 - protein, 594 aa, Klebsiella pneumoniae; identical to SEQ ID NO: 64492

SEQ ID NO: 65793 - protein, 605 aa, Klebsiella pneumoniae; identical to SEQ ID NO: 64493

SEQ ID NO: 65794 - protein, 690 aa, Citrobacter farmeri GTC 1319
MRIHQVQIKNFRLLADVELVLEEQTTVIVGRNNSGKTSLSEIIRRFLADGSATFQLEDFSSSCYDRFCDALKALNEGEEDHVIRDLVPAIELRLKFQYDSAQPQLGPLSPFVIDLDPACTEALVVVRYELKDGQLARFLEGQPTEPLTQETRIAFFRALRERIPNDFCVKIWAEDPNDPENHRDLQSSALRGLIKSGFINAQRGLDDVTSRESDVLAKTVEHLFATASSASADTADKQIADALKGAVQDIQTQIDTNFGSQLKSLIPALKTFGYPGLGGQELHTETLLDVRKLLSNFTKVRYSGYSGVTLPESYNGLGTRNLIFILLQLAGFYKAFRAEVTEPGVHLIFIEEPEAHLHPQMQEVFIRQLAKIVQQLVDGTEDRSPWPVQFVVSTHSSHIANAAGFESIRYFLGATVQGTQEGVRTTKIKDLRKGLRHIPTEDRNFLHQYMTLTRCDLFFADKAILVEGLSERLLLPAIIKKLESAEPERPKLSSQYATVMEVGGAYAHLFFELLAFLELQSLIITDLDAVLAPRGKACAVHLGTYSSNACLKAWFSEDTPFTLAGLIAKSDDDKARNGNRIAYQCAEVTDGPCGRTFEDAFILANSALFGLVGRNTQELEIEARDKAAEWKKSEFALKYAITEAEWNAPKYIVDGIRWLAGSNEPMTQDPVLAQVVEAATSIEEGASADV

SEQ ID NO: 65795 - protein, 577 aa, Citrobacter farmeri GTC 1319
MSEIHSPAEAASQRALESMYACFSEGRSFRLEAGAGAGKTYSLIKALRFLIERNKNLFEKHSQQIACITFTNVAKDEIVARTDRSPIVFCDTNHAFCWSLISSFQKPLRVLIETMPEWREKLEEAGGSLGNRSVEYNLGHRSIRDHRITIHHDDVLSLTISLMEHDKFRKVITERFPIILVDEYQDTDKDWIEAIKRHFLGRTGAPLFGFFGDHWQKIYDGGCGKLEHPDVIEIGKEANFRSDKTIVDALNLMRPELPQCVKDPEAEGLVRIFHTNNWQGVRQKGVHWGGDLPLAEGQATLERVKETLQQDGWDFSPAHTKILMLTHRLLANQQGYSNIVATFRYNESFTKKENEHIAFFIDKLEPACDAFEARKYGAMFEVFGGTAPQLRSHSDKESWHNAMMLLLAIRKTGTIGEVVEFLRTHRKPRLPDNVEKLEQELLNFDRTAGAEIPRRLKELEKLKDIPYSEVKSLRRYLDGHSPFETKHGVKGAEFENVLVVVGRGWNQYNFGEMLGFAGEQMLPAGKEDSFERNRNLFYVACSRPQKRLAILFTQALSPEALATLGNWFGADTIVPAP

SEQ ID NO: 65796 - protein, 487 aa, Nonlabens ulvanivorans
MRILDDKKNDKNKTLALGFSKYYNERDKTDTNVKAVEDKLKEVSVDLKEKYDLVLKKILVDLGKFGAETPIVIPKITIDSEFDSEAVIRNNIKYYYKQEEINLPESYNGLGYSNLIYMVLELASFIQRFRNAKEDKVSEFLTVLIEEPEAHMHPQMQQVFISQIKGILEEAKKDNIHVQLLITSHSSHILSEAGIDSDKGFKRIRYFNRIDTGIEVQDFNTLEISNEKQTARFLKQYLTLHKSDLFFSDKVIIVEGTTERMLMPQLIFKSAPSLSTQYVSILEVGGAYTHKFKEILEFLKLKTLVVTDIDSVDSVNGERCEVNGGIGGELTSNHTLKDWIPNKSTITELIACEDKDKIENNIIRVAYQTTENSIVGRSFEEAFINTNLDLLKSSYSNEKGEVKNVKNLFSFAKGKTLETLNSETPFELAPTSSSAKTNFAFDIMSFPEDDIDNWKVPVYIDEGLKWLEKPIDKEVVEENVEATGEEE

SEQ ID NO: 65797 - protein, 570 aa, Nonlabens ulvanivorans
MEAIDKIKEKITLQKSFVLEAGAGAGKTYALIQTINFLIETNGKQLSLKNQKIVCITYTNVAKNEIIHRLENNPFVLVSTIHEFLWDCIKLFNKQLITEFDAINTLKHEEKPDKHTLGLADRIKSVEYSDRAFSDFENGTVGHDDLILLSQRMFQNYDLLTSIIASKYPYLFVDEYQDTAPEIISAFLDFLLPRNEKNILLGFYGDSHQKIYNSGIGSLKSYVDAKRIENIDKIENYRSCQEVIDLLNNVRTNIKQEIPKGAEKEKGSVEFINSENYPDKIKSQKVKEYEDSLMPQKSKNYDYVIKELESKGWEFGAGSEDKILIIANSRVARRGGFGKLYGIYNRRFPLGAADALIKREHPLTALFVGSMDKKTSIERKTGIEHLVNHYHNGSYNEISSFLKRNGSQSINLKKHSDKKVINEKIEGLITTRNTKSTKDVLDYALENKLIVLSKGMHRLQEKVNKNTARLSDDEKAKIEKEKIFYDSVMALPYKEIVSLFGYTQNQNVFSTKHGTKGEEYRNVLVVIDDTSWKSQYNLKVILTIVIHQMVVKKEQKTFFTYPVHEQKKIL

SEQ ID NO: 65798 - protein, 323 aa, Algibacter lectus
MRIKKKKKVRQIFVTTHSTHITSAVSLDEIICLHNEKGVTKIGYPTKVFPETKNKKYVQRFLDATKSDMLFAQKILFVEGMAEQLLMSVFANYLDKSLEDNHVAVINVGGRYFEHFLYLFDSSKENTIPKRVVCITDRDPERKVKPNGSFKKCYPYEYNQNLDDFDYKTNPSADSYSKGSHQNITFFSPEVNKGKTLEYELLMSNPTSRLLLTDSINNKQELEDLMVIFETDGSTVQNLLDKLRDSDANTRIKESITLNTSLDDEEKKKSIIASRYLNSVGKGENALELSYILSKNIDKKGTDEFVEFNIPQYIKDAIEELCQ

SEQ ID NO: 65799 - protein, 198 aa, Algibacter lectus
MPITTINSDYKIADIDNNFKVSAGPGAGKTYWLVNHIKNILHTSNKLSITRRVACITYTNTAVETIYKRLGTSSSQVEVSTIHSFLYKHIVKPYVSFVAEQYNLDISEIDGHDNIVLSNYSFLKEWKERTGQQRINDDNIVSEAFNKLRWKIDNDELIARTPYPFKIGRYPIKNDSYLEYKKMTWEKGIIHHDDVLFF

SEQ ID NO: 65800 - protein, 323 aa, Algibacter lectus; identical to SEQ ID NO: 65798

SEQ ID NO: 65801 - protein, 138 aa, Algibacter lectus
MMMYFFFSYQILKQKPFVAKILFSKFPYLVIDEFQDCNPIQIEIFKILGLEGGVTTGVVGDSSQSIYKFQGADYTQFGTFNLPNVHEYKLIENRRSSNEIIELLNSIRTDISQVPYRNVSFEKPKIIIGGYDIGVKKV

SEQ ID NO: 65802 - protein, 361 aa, Algibacter lectus
MIIEEPEAHIHNHIQKTLFDKLDYTDTQIIYSTHSTQISEVSNVENINILAKKLNFAEVFQPSNGLDPKNVNQIQRYLDAIRTNLLFAKGVILVEGDAEEILIPQMVKKAYGVSLDELGISLINIRSTGFKNVAQLFHDNRIRRKCSILTDLDDAICDTTINDGESESSKKYKTKVENSRIKGLERKVILDEFEKDNDWIKTFYAKYTFEVDFVMRGNAWEVEQIIDNVYVDKPTIKLTKEELDDEDVAVFGKRVLTMANQEGKGWFAIMLGKHISYKTIVPDYIVEAIAFAKESYSKNIIADIIEYRVTKNAKDVEIDFTLLKEIIASYRVDKATIDEVIVEIKNRIPEDQILTFIEKVK

SEQ ID NO: 65803 - protein, 601 aa, Algibacter lectus
MFVWDKEDLNQEQEDAILNSESILLIACPGSGKTRTLTYKIAYELSRLESSKEFVIAITYTNNAADEIKHRIELLGVNTEQLWIGTIHSFCLEWILKPYHLYSDRLKNGFRIINSYESEEILTELCKPYKSQRITYWDCGLLAKTDDIYLTCLDSSKHKNLKSIISEYFQILEKNNQIDFEQILFFSFKLLESNPIISKILCKLFPFILIDEYQDTKEIQYNIIASILKANKGESKTLIVGDPNQSIYDSLGGYPMSKEELEKLIGFNLQQNSLSKNYRSSKKIIEYFEYFKTFENEISSEGTNKDYPSKITFNPTILVENIIDEISKLILFNINEEKILPNEICIVAPQWVHLAGITRQLMIKMPDYSFDGPGMAPFSRDIENFWYKLSRIVLTEPSPYMYIRRLRWSSELINDLDLAGVDVTELTSKRLLKICNSIKVDETDGLTHLELFFNEASRLLSINRINYPTLTEHYDSFFNSSRKRIEKLVKEGNEFIGNIESFRKVFKQREGITVSTVHGVKGEEYDTMIGFAILDGYIPYFSDGNGDENSRKMLYVLASRARKNLHILSEKGRAVHNYHAPEGKTPTPHLVEYEYEYDVLE

SEQ ID NO: 65804 - protein, 702 aa, Burkholderia cenocepacia
MKLHKVVIRNFRRLENVMIDVEEKETLFVGPNNSGKTSATAIFRAFLGGREFKIHDFSVSRVADFDRFAETGDVDNLPEIGLDLWFEIDPNTVAFGRVFTLLPKLSDFTQVGFRLQFGIADAKKLREEYFVAYPADDNGRRARSLFQYLATDTNLHRHTTTRYASLEAVAGDGGETAIVATPLEPDEGKRLVRQLVRVEFVDAQRNINDDDNSRSNRLSAAFASFYRKNLDQAEYAAEAHRVIDQNNADLTRHYEKQFAPLMDLIRGLGVPSVNDRELKIISSLSPESALRGNTELLYVDPGRKHELPELYNGLGFKNLIYMAIQARHFHSQWLATADSRPLCLLIFIEEPEVHLHAQVQQSFITNIWSVIEASAKTADQPTLMPQLVVTTHSSHILDAVDFEKVRYFQRCHLGGEAAQDGIRNASDVRSLRAFQPEADVVDGVTISPENTLSFLKRYLRLTHCDLFFADAAILVEGAAEKLLLPSMIEISAVRLRTCYLTILEVGGAYAHRFEGLLEFLRIPYLVVTDLDSVEPTGYPTTCRADVAGARTSNASLKKLCGKGTVAELIAMSPADKIHTSKDRCIAFEVGVQVSEGGTQLEMIPRTFEEAIAYENFELLRTETLSIGKDIPSNLSEAYTVIYERISSKEFKKTEFAMDLLATKSRWTVPAYIAEGLRWLELRLRGEQAPHPSTHKRLRQRQE

SEQ ID NO: 65805 - protein, 615 aa, Burkholderia cenocepacia
MSSKVETQADVDVRACIDGHHSFALVAGAGSGKTTSLIEALARVREREGRQLRQNGQRVACITFTKRAVEVIKARLGFDELYLVSTLHSFLWGQIGRFNDDIRAALRDARIPALIQKERDKDNGGNSRTATDARTKVLRYEQDLTELNSVRTFVYDDAQWGDYSAGRLGHDDIIEIAAHLFEHNATFRRIIGLRFPYIFVDEAQDTSPGIITGLNMTCSGEGLPIVGYFGDPWQQIYDGSAGEFAPPLGGKPITKTENFRCSKSVIRLLNAFRSDVEQYPAGENKNREGSVLFRLVQAEKPELPRNRYSEDQITRALARMDTAIADWGWAERDDVIKLFLANQMIARRMGFAELNRLFNGPYASTRAEEAFEAGEHFLIQPLTDIVYPLVAARAVNDNRAIVDILRRNSPAFAADGINAENTLKAMIETSLSLVEQLEALWASASIGEILRFCAARQIIPVSSNLSEQLDRAPHNEDYVEELHVLDKGEWLADALFAMKPNEIAAYASFISKNSAYSTQHGVKGEEYAKVLIVYDDVEAAWNLYNFGKTLTPVTAGEPTDGQRNRGQRLAYVSFSRALEDLRVLFFTCNPDAARQELIDRKLVTAEQIEIVPTQV

SEQ ID NO: 65806 - protein, 634 aa, Pseudomonas sp. HMP271
MKLQTIRLSNFQSFGVQPTELGLDEITYLIGPNGSGKTAALQALCRLFAFDPSLRRILRSDFHVPFDEENVPEERQLWIEADFVFPELAEDEDNSTIAPHFGHMRLDEADGIPRVRFRLSATMGPDGDIEETLVYVLDINVDGSPLNTAQVPRSERNHIHVHYLPARRDPADHIAYGANALLGRMLRAVNWDAERDVIKGLTDQISDSLATNSSVDAFSASLKAAWGALHKGSFFTDPKITFVTSEVEALLRHMSVSFSPGHDEQLVDFSRLSDGQKSMLYLSLVLSSQAIGRAVLAEEDKSFDVDKLRPPVFTLVAVEEPENSLSPHYLGRIVNALGLMTGNGDAQALIATHAPSMLRRVAPERIRYLRLTEGRTSRVTHIQLPDTADEAHKFVREAVQAFPEVYFSRLVVLGEGDSEEIVLPRLLQAKGAPVDESAVSIAPLGGRHVNHFWRLLSALQIPYLTLLDLDVARHQAGWGRIKYVNDQLGKYRLDQKLPKDYVIPKWDSTKDMVRDFDNYLEELEDRDVYFSYPMDLDFAMLLAYPDAYAVVRETPDDSTIVAVLGKSHHDASQYSEDEQKLFGTYHSSFKLGSKPAAHIEALAKLNDEDLLANMPESLGRLADAVISKLAELPE

SEQ ID NO: 65807 - protein, 557 aa, Pseudomonas sp. HMP271
MITADTWQPADGLTLEPNALRAAKEQVHCLALTAGPGAGKTEMLAQRADFLLRTGTCRYPKRILAISFKVDASSNLKERVKRRCGSELASRFDSYTFHAFAKRIIDRFRPVLTGEYALDAGYKIADRKPGPSRSLIEFADLVPMAIQILQKSEMARNAIRQTYSDVFLDEFQDCTNLQYELLKLAFQGTSIRLTAVGDTKQKIMGWAGALDGIFQTFSADFAATPLNMYRNFRSKPRLLRLQNEIIRVLDPTSVMPDEQLVGDEGEVFAWRFEDSRKEAEYLAGLIDGWIKTKQLSPAEIAVLISKQLDLYADHLMAALEARGIPFRNEQQMQDITVEPAARLIVDYLSCLYGKREPKAWIRLMNQLVPFADEDIQSNARKDLDRLIKQQRKEAAIADLIAEPFSGWWEFVRAFLKQISLETLVALSPDYESHERLKEVVRNTKARIEELLELEPDLPKALERFSDDQAVRILTIHKSKGLEFDTVIILAVENEIFFGNQAENRCAYFVGVSRAKRRLILTYAEHRERPADAKRWDIHRSAQKEYFDYALPFVKLQQ

SEQ ID NO: 65808 - protein, 763 aa, Pseudomonas syringae pv. tomato
MHIQHLEIANFRKLLSVRIDLAAETTLLVGANNSGKSSAMLALRRFLVSKASAFRLQDLTLSHLVTIEAIGQAWEAAGAIPSANDWAEWLPTLDIWISAEQGELHHIRDLIPNFAWRGGLVGMRFRLEPEDMEDLYVDYRKQRERVEILKTEIQRLAAEGEDPPHLPLWPQSLHDYLNRRLGKMFKVRWYRLDPAQLQDPDPRTRSANRQSLSATSVALERNPLINLIRVHEINAQRGFGDSADEGHDDGKQSGGRKLSEQLRAYYNRHLDPGDSPDISDLGALRAIEAAQVAFDTRLSTSFEPALKEVAGLGYPNNSDPSIRVATRLAPTDGMNHEAAVLFELDSIGGAPGAPPLRLPETSNGLGYQNLISMIFRLMAFRDEWLKKFRTADEQSAAGVEPIHLMLIEEPEAHLHVQVQQVFVKHAYHVLCRDPLLERFPNLKSQLMVSTHSSHVAHEVEYQNLRYFRRLPAGMDGVQVPVSTVSNLSTVFGKKPQTKDFVTRYLRAQHADLFFADAVILVEGAAERMMLPHFLRKHFPFLDQCYITILDIGGSHAHRLLPLIDALGIVTLVITDLDAGSLRSAQPVQRDAGQQTNNPTLRHWTKAGGLPHSVDALLALADDLKTQQIDQLFAIRIAYQTPINIHLPLTGEQVEMLPNTFEDSLVLSNASHFSAKQVRRGLMRAFARALNGAESSNNLASLLFESLRDGDKAEFALQVLGDPGFAELTIPEYIREGLTWLQSKLERKQRELLVVPTAITEVTA

SEQ ID NO: 65809 - protein, 621 aa, Pseudomonas syringae pv. tomato
MVQRAEPDAALDADQIIQTCLNLDRPTSFFLYAGAGSGKTYSLVEAVRSFKERERERLIFEGRQIAIITYTNAACDEILRRLEHDPLVIVSTIHAFAWRMIQGFNDDIREWLRVKLGEDIAALQRQLDRSRGENKTTQTNRASRARKIRRLEELEQVTTFTYSPTGENRGRQALNHSEVIQMAAAFIQQQPLRDVMTDLHPVLLIDESQDTYGPLMEAFLIVQQQIPDRFCLGLLGDTMQRIYSDGKANLERAIPEHWAKPEKKINRRCPTRVIDLINTIRASADDHWQIPKEGAVEGAVRMFCTRQVAGRGFELEEEIAHRMAAFTQDAQWAVGQSGRKTLILEHKMAGRRMGFEGVFTPLHAAEHLRTGLLDGSLPILKLFMDDVMPISASAQQDSFSLMEAVRMRSPLLEPRHMKEAPDQLALMEQVSNATQELLALFEENDPLIADVVHVILSTGLLNVPDRLLAAQLLGVTDEEPPESIDRETLEIHAYQVVLGRRFSEMAAFAGYTQGLSPFDTHQGVKGLEFPRVMVILNDEEAGGFLFSYEKLLGVQPPSANDLKNQREGNDDSLARTRRLLYVTCSRAEQSLAIVVYTPQPEVAKQRVIDAGWLKADEIEII

SEQ ID NO: 65810 - protein, 784 aa, Burkholderia thailandensis E254; identical to SEQ ID NO: 62512

SEQ ID NO: 65811 - protein, 639 aa, Burkholderia thailandensis E254; identical to SEQ ID NO: 62513

SEQ ID NO: 65812 - protein, 684 aa, Lactobacillus helveticus; identical to SEQ ID NO: 64670

SEQ ID NO: 65813 - protein, 588 aa, Lactobacillus helveticus
MDYKRVSSHENININQNFLVSAGPGSGKTEFLVNHIHHIIKESGKINTLRKVLAITYTNVAADNLSRRIGYTSGLTQVSTIHSFLSEFILLPYSWLLEGKYSLPKKLTITPHQLASFSDFKELCQKYKCQYMTYYDNIRDRISSSIYFKKLNDHYSLTIDQKDTRVPNKRYPIKNDPKFFMEYKQSCWKNGIINYDDVLLLSLIILENNPFVAKLISNSFPFIFIDEFQDTSIIQAEIISILADNGSKVGVIGDENQSIYGFAHSSLETFRKFSLPKLNKYCININHRSSDPIIKLLNGITENSGKDPQILQNIPGPKPTIVVGDPRLVVNWFLKNHPQNSACSKMIISYSNDYIEQIKPNYSAPSKKIKDNINKMRTDDRGRFIYSIIKSLKLASEGQINASISSFFRSYEKTNADEKYVISKFYYAYNKINNYLNRDISTWFNEILLDKNIHEANSDNISKIMKKITGRNKCFLGLKVKYLLSDVPLEGTNSEFRTIHQSKGDEADAVLIMIDDSGKKRESNFSFLLKPSLSGSNEDDRVYYVAMSRARHELFFSIPSLNKNIRKQIEATGLVKIQDILDILNSEV

SEQ ID NO: 65814 - protein, 684 aa, Lactobacillus helveticus; identical to SEQ ID NO: 64670

SEQ ID NO: 65815 - protein, 588 aa, Lactobacillus helveticus; identical to SEQ ID NO: 65813

SEQ ID NO: 65816 - protein, 798 aa, Pantoea ananatis
MKIEYIDIQNYRKLKTCRIRLTEEETLLVGANNSGKTSAMDALIFFLDQRGRTAASIASGKSPSSRKLGAADFTLSNWHQLNQFGQAWVNAEEVGEKISDWQPLCPTLDVWLKVEKNEVHRVRHLIPTLKWDGGLLGIRMIYQPKDLDALKADFIAHFKAAEQLKITAEKNAEKALGGSASELSDFKFSVWPGSLREYLEREVSKAFEIKSYILDPAKLITDQGSKFLPQVLVEGQIPLDFYPFNGLFKVDIIDATRGFSDPYVATGSQHGTSNLASQINQYYNRHLNPTDFPCDEDLDALEAIAYAQHSFDGRLNKVFNKPLKEIETLGYPGFNDPHIRLSSRVNPIDNLDHEAAILFEIQKTSHAAGVPLMSLSEKYNGLGYKNLISMVFTMMSFRDQWMRVGKASLRKPEEDAFVEPLHLILIEEPEAHLHAQVQQVFIKKAYSVLRNHDDLRTSKRFSSQLVVSTHSSYLAHEVGFEKLRYFKRKPATGPHDVPTADVIDLSCTFGSGKIRSDDVLQTAQFVARYLKTTHCDLFFANGIILVEGAAERILMPHFIRNNPNANTSLDNSYISILEVGGAHAHRLRALIDILGIPTLVVTDTDAQKPPLKLPADDQKVSSGNKPKAIRPEFGKGYITGSHTIKIWLDVEGGLDTVLRMPEHEKIRGKVRIAFQYGIPIKFGKEEEAEAFPYTFEDAIALTNPELFKKVEKPTGMMKKMQDALNLDTLEQCCEKLYLALKDDKAEMALDLLYCADPAELAAPKYIQEGLDWLKKELEVASRDLTPEVPEVTDVWEGE

SEQ ID NO: 65817 - protein, 622 aa, Pantoea ananatis
METPSTNEPVVEELFSYLDLENPRSFLLFAGAGSGKTRTLVSVLEKMKQRYSSELSRCGKKIGIITFTNAACEEVQRRLFFDANFMVSTIHSFCWDLINPFTSDIKLWLKNELEKSIDQLTRDIEKSRKPDGITAQRNRRSLASKTKRLQYLDKIQKFSYSPTSNRPEKGALNHSEVINVTAYLLQNEALLREILFSRFPVLLIDESQDTNKYLIESLIMTQQEHPTKFCIGLFGDMMQQIFSGGKSDLASPLPPGWASPEITINHRSPVRIVTLINSIRQFNDTHIQEPRPDAQPGTARLFVVDMNTHKERADIERQVAEYMAEQAADTEWNNKKSVMVLTLEHHMAARRGEFENFFLPLLEVEKLGDAAINGDSQEITFLSSQLWPLIDAIRSDDDFKIATIMRKYSPVFSSSRLEYADDPLLLFREAQCQIDKIKVLLGENLAFPILEVCKLIHEGELLILPEAFLLHLALVPHKDDESTEEVDINKEHEAWSRSLSASTRELENYISYISSTSSYDTHQGVKGLQFPRVMAILDDEEARGFMFSYDKLLGVTPHSKTDQENESAGGDSSPKRSRRLFYVICSRAQESLAVVAYTKAPDLVERTVIASGWFVKEEIMHM

SEQ ID NO: 65818 - protein, 727 aa, Listeriaceae bacterium FSL A5-0209
MYLSNLKIKNFRNYKSGNFNFKKGTNTIIGENDAGKSNALTALRILLDDSYYYGSKNLKESDFSYYLGENWRGEWIIISATFGGITEEDMDNEICSTLSIAEIEKIDETENIGEVSRLLTKDIDGIGSLTLFIRPNKSIRKKLHDNKGTAEFEKIRGNIRLVDYEFYYTSKSDFDFLSDDHYYSLVGNLNESLAMDPSDDDSAILGTKIDMIDIYQHISVVYIDALRDVLREMKTSKNPIRRIIEAIESSIEVNRIEDVKGKIKALNDEIISIPQINDIGNILNSELKDILGSVYSPDLSLSSNMSDEISSLSKFLSMRSKDDDELELLGLGHLNMIYLALKIVEFESCRSRELLNIMLIEEPEAHIHRHIQKTLFEGLSVKEGYTQLIMTTHSVHLAESSEISRMNIIKSYDKESIVMSPSSGLDLFASEKLEKNMNLEKNIERYLDVKRNGLLFSKGVVLVEGDAEEILIPNLVKKAFGISLDEIGIGLINIGGTAFEYIASLFDAERVMRYCAIITDLDQKAIPEESPLYKKRAEEIGAKRKRKLNRLFEENNWVDMFYADTTFELEFLEDNEKYIIPIIEGNFSKTTTVQEYLNALDGDDIKNRNLAMLKLANKLGKGWFAIEISNTIDESVSIPNYILDALAFASQESMSIAIYIKLIKHEALYIGKEDEFIKDIEVAQNNEDALKNIVKKYLEKYDYEASYFINACEDYLTLLDEGVSCDG

SEQ ID NO: 65819 - protein, 604 aa, Listeriaceae bacterium FSL A5-0209
MMDDATEFLHDLNEEQKKIVESLDNLYITACPGSGKTRVLTRKIAYQSVVNKNSTKKIVAITYTNRAAEEIKDRLDFLGIDSPSVWVGTIHQFCLEFIIYPFGMNLSRLSKGFNIVDGYTQSEYVEEILSKLNIEIKGHEKNNINLSLTTEGGILEKRFPKVTSMYHQKLLDNKEIDFDLILLMAHQILKESKITCKNIARVLRTIYVDEFQDTRDIQYNIIGLLTFANKSIQALFVGDVDQAIYGALNGVVKTVDELAELTGLPFKVEKLSGCYRSTQRMVDFYSEFQQNSYKISSRGENRKYIGKISHITDVHKDDVSKKIADIILYHLNQGVPENEICIVAPQHYILFSIGDKLKELLPDSKFDALTVSPIKVNDHSMFFKLSRLYFTDSGNKNRLRKRISSEILKILINEFNVNLPEDFISTDLLKEINASKRLCQTNNGLEYFKETTVSLFCKLNITSPLYPEIFAAFESFIKETKERMERNKLASDIENFRKVYYSRSGITLTTAHKVKGEEYNTMIAINILDGKIPHWNEIFGSPDKGLGSATKLLYVICSRAKENLYLISERGYKTNKGIEYEPTFLMKKYQFSYDILSHSSKVIE

SEQ ID NO: 65820 - protein, 723 aa, Listeria booriae
MYLSNLKIKNFRNYKSGNFNFKKGTNTIIGENDAGKSNAITALRVLLDDSYYYGSKNLKESDFSNCLGENWRGEWIIISATFGGITEEDMDNEVCSTLSIAEIEEIDEAENIGEVSRLLTNDIDGVGSLTLFIRPNKSIRKKLYDSKDTIEFEKIRGNIRLVDYEFYYTSKSDFDFLSDDNYYSLVGNLNESLAMNPSDDNSAKLGIKIDMIDVYQHISVVYIDALRDVLREMKTSKNPIRRIIEAIESNIEANHIEGVKRKIKALNDEIIAIPQINDIGNSLNSELKDILGSVYSPDLSLSSNMSDEISSLSKFLSMRSKDDDELELLGLGHLNMIYLALKIVEFESCRSRELLNIMLIEEPEAHIHRHIQKTLFDGLSVKEGYTQLIMTTHSVHLAESSEISRMNIIKSFNKESIVMSPSSGLDLFASEKLQKNMKLAKNIERYLDVKRNGLLFSKGVVLVEGDAEEILIPNLVKKVFGISLDEIGIGLINIGSTAFEYIASLFDAERVMRYCAIITDLDQQAIPKGSYLYKETAEKSGTDRKEKLNRLFEDNNWVDMFYADTTFELEFLDDNEKYITPIIEGNFSNKTTIQKYLNALDGDDIENRNLAMLKLANKLGKGWFAIEISNTIDELVSIPNYILDALAFASQESMSIATYIKLIKHEALYIGKEDEFIKDIEVAQNNEDALRIIVEKYLEKYDYEVTYFINACEGYLTLLGEGV

SEQ ID NO: 65821 - protein, 596 aa, Listeria booriae
MDDAIEFLHDLNKEQKKIVRSLDNLYITACPGSGKTRVLTRKIAYQSVVNKNSTKKIVAITYTNRAAEEIKDRLDFLGIDSPSVWVGTIHQFCLEFVIYPFGMNLTRLSRGFNIVDSYTQNEYVEEILSQLNIEIQGYEKNNINLSLTTEWGVLEKRFPEVTSMYHQKLLDNKEIDFDLILLTAYQILKESKITCRNIARVLRTIYIDEFQDTRDVQYNIIGLLTSANQSIQTLFVGDVDQAIYGGLSGVVKTVDELAEITGLSFKVEKLSGCYRSTQRMVDFYSEFQQSSYKINSRGENRKYIGKISHIKDIHKDDVSKKIADIISYHLNQGVPENEICIVAPQHYILFSIGDKLKELLPDSKFDAITISPIKVNDHSIFFKLSRLYFTDSGNKNILRKRIGSEILKILINEFNINLQEDLIPTDLLKEINSSKRLCQTSNGLEYFKETTLSLFCKLDITLTLYPKIFVAFERFINETKERMERNNLSYDIENFRKVYYDRNGITLTTAHKVKGEEYNTMIAINILDGKIPHWSEIYDTPDKGEGSATKLLYVICSRAKENLYLISERGYKTNTGYEYKPTFLIKRYQFPYDRLS

SEQ ID NO: 65822 - protein, 698 aa, Flavobacterium psychrophilum; identical to SEQ ID NO: 62716

SEQ ID NO: 65823 - protein, 633 aa, Flavobacterium psychrophilum; identical to SEQ ID NO: 62717

SEQ ID NO: 65824 - protein, 603 aa, Porphyromonas sp. COT-239 OH1446
MYIKQFKIKKFRVFDEVSLLFNKGINIIIGENNSGKTAIIDALRICLGYGKPDVNIYIQESDLHLNPSDPNKCNTEIQFDLIFEIESEIERCCFYDFISQDFENPEFQTIQFHLKYSLEENGRRRFFKRSVWGGDNEGQQIPYEALQEIFYTYLGPLRDAVSGLKPHSYNNKTAQLFNKLTKYRKGDDTINLSDEIKKSLAEKLYSVFESDEYDWKHILCEGKSKVNDHLNGTGILDKSPQIEMNYVGRKFSDVVRGIEIRRPIYTEPVEPRLQKYFEIYQNGLGENNLIFSSVVLGDLMNRCEDSELEIYNALLLEEPEAHLHPQYQNTFFEYLSTLTNRGLQIFITSHSPTITAKSDIDNVKVLQRQGSYVKAFCFNILSEADYTNSNRKYLRKFLDTTKSQMFFANGTILVEGIAEAILLPILSRKFLKPRKIDLEKNGVEIVNIGGVAFEHFAKLYNHDDENKRLFSKCAIITDSDPTADKAMSDRAVIAQGLKKNHLEVTLATNTFEHDLFETSDINRSIMRTVYRSMHPDTQDLQGDFNVEVLMQKLKSNKDKAEFALQLNDRLMREDSFDVPPYIKAAIEFVVPTREISQEMAIEV

SEQ ID NO: 65825 - protein, 586 aa, Porphyromonas sp. COT-239 OH1446
MFERLSPTQREIVDCPDRRIVVKACPGSGKTFSVTARLARLLCNNQLNKHQGIAAISFTHTACDEIKNGIQKFGVSNVTYPHFIGTIDSFINNYIFFPYGHLFMGCNKRPEVIGTEYNPWFNYDATIRNYDRTKIIDPNYYFDKVSFGLSDNLLRLAPYHVFNFRKSDWDNPYKKDGNLKKVISDLIEMKVIHFRSGKANQADANYIAYKILTKYPVIAKNIAQKFPILIVDEAQDTTAIQMVLIDILDRANVNSILLVGDPDQAIFEWNTAEPSLFMAKYDSPAWTSLELTENRRSSSNICRVNNRFFNSNMVSVSEEDIDYPAIPSIVGHSTQSDSINQIKNDFVNECQKLGISEDHYAITYRGRKFGEIHFGLMDESRTDQNEKPWVHGYYYVRDLVHGKYLINKGAHKKGFSLIERGYHKMQEGQSYIPIEFIRNKIKNLGFRNYRDIIFQFIRKLPDTNCTLSQWIAQARNNGLNFSINTNKGDSNISNLFHEDGITTTDIPKYLRTIHSVKGMTLEGMLVFLVKKDVFNYATLLPQAYNATPEGLEQMRIVYVACTRPKKLLWIAVPAEDVGVWTKKLLE

SEQ ID NO: 65826 - protein, 728 aa, Porphyromonas sp. COT-290 OH860
MKIQSVHIRNFRKLKNCHIDFGEKETVFVGANNSGKTSAISAIVWFLNNNEKFTLREFTATNWVKINNLGDQWLTKDSVDAELLDAHKWDNIVPSMDIWINVEDGEEYKVYHLIPSLNTWNGRKVGVRGQYVPKDVEMLYIAYRDAKKKAQELQSTEEWKKASSPELFPKNLSEFLGKGSNLRDYFDVKYYIIDSEIEPKDDHEVQPTPDNALDKNPLEGLIRVDAILASRDFSDPNGHSDSEIDTLSRQFQRYYSNSNPEEEILLPGDLELVSGIAKANETYNAKLTKTFETPVAELRNINYPGFQNPEIKICSRIQIEEAIKHDSAVQFALQGLGELALPEKYNGLGYRNLISIYLKLMDFREKWLKTSSERKNIEPIHLVFVEEPEAHLHAQAQQVFVKKAFEALCNNKIIKDEPWLNTQLVLSTHSNHIVNELDLSCMRYFRRVMDNAGDKIPISDVINLSNTFGSSDETKRFVTRYIRLTHCDMFFADAVILVEGPAEKILVPSFLAKAGLDSFYISVVEVNGRHAHSFRSLINKIGIPTLIVTDIDATEVVEENGKVKHKAVITTRGKGYKTGNPSIRSWLPDKGLIDDLITLEGNSKTIDNVRIAFQTPIKINWTKEKDEYTEICPYTFEDALIFSNLELFRQDGLKKMGTITTIANLLQQNHSAEDLQKSIFDKLESKGGFQKADFANSLLYKEDFCEMNAPAYIQEGLEWLKKCLDSKE

SEQ ID NO: 65827 - protein, 614 aa, Porphyromonas sp. COT-290 OH860
MMSNNNIDSHVDDTLEKCVLATPRKSFFLFAGAGSGKTYSLVLLLKKIRDRIGADLLLQGKNVAVITFTNAATDEIINRLGHSSVFHISTIHSFVWDVIKWYPKDIRELYCQYIEKDIQELSRKIEAAKNKNTKTYSTNVAKCEYLKEKLEKSRTIEKFVYNPNGSNLEYNALKHAEVIKISAQMILNSRMLQQIIAQRYPILLIDESQDTKKELVDAFFEIQKNFGDVFTLGLLGDQKQRIYTDGKDNMVSIIPPEWEQPVKKMNYRCAKRIVKLANTIGKDIDTHAEQTSRENAIEGFTRLFVVQQCDGINKNKVEQTVMKSMCNLTKDAKWFESNADVKILTLEHMMAAKRLGFEQFFGPLAKVTKYQMTLLQGTVSELEFFTKMVLPIADSIKTDGRIALDILKAYSPLLSKQNIENPYKLYLRCREEAGKVSNKVNDDQSIREVAKAVWNSQLLTVPEVIRQASELTPDDINDELEEELQAWAKVMNLPISMVRRYDDYVNQRTCFDTHQGVKGLEFDRVMVIIDDSEAKGFMFSYDKLFGVKELTRTDMEHIEAGEESSVNRTQRLFYVTCTRAKESLAIVMYTNDPNKVKNQVISKDWFTEQEIELL

SEQ ID NO: 65828 - protein, 729 aa, Staphylococcus aureus subsp. aureus; identical to SEQ ID NO: 62500

SEQ ID NO: 65829 - protein, 597 aa, Staphylococcus aureus subsp. aureus; identical to SEQ ID NO: 62501

SEQ ID NO: 65830 - protein, 582 aa, Alcaligenes faecalis
MHLAQLTISNFRKLQKAVLEFQPGLNVLVGANNVGKTAVVDALRALLAGHDEPYPRLDVDDVHRPHGGTPAGDITFQYVFRDLDEDDEADFLPALKIDAAGKAEAHISIRYAEADKVGRLRAKRWCGDHEDVGLTTDMMENLRGVYLPPLRDASQGLKPSRSSQLARLFHLLSDDTGRNDINEALKKLDEELKKHTPIINTHTAIKGRHDTMLGPQLAQLLELGLSGSDFQRLASRLSLLVDAFEIEQNGLGFNNLIFMAVVLSELAKNPESSYRGLIVEEPEAHLHPQLQAVLLSYLETLKATHGEKPVQLFVTSHSPNFASIANISSLTCLVDTGEAVETFFPRDIAFEKGKREKLERYLDVTRAEIFFARRVIFVEGAAELMLVSVLAEKSGYKLREHGVSLISVEGLNFDSFLPLFGEQALKIPVSVITDADPMDTPADGDEPQALYPSLGAVVNVSDNTAKMKANEDALVKVFHGVKTLEYDLALHEANRSAMLKALKELHPQIGKTVEASVNAASGDAEKARILFSGMFERKQNNVQKGRFGQALAQVLADGEKCVVPEYIQNAIKHACQKAPTHP

SEQ ID NO: 65831 - protein, 579 aa, Alcaligenes faecalis
MTKPSLEQSAIINAPLAPMSVIACAGSGKTHTAVRRLAEMRRLLGSHRGRVALLSFSNIAVDTFRQSYQSLALEVSVGPGGHRVDIDTLDGFITRHVLHPHAYRTMQATQAAFLATGGESFLSGFTFKPGNYPVGITSMQVGWRNSGIYFYYVNNDQVVELNHDYASAIVHRLGKAGAYTHNLGRYWCYRTLKEQPVILRALASRYPHILIDEAQDIGTLHQAILEQLINAGVQVSLIGDPNQGIYEFAGANGRFLSQYGARTGVTELKLTRNYRSVPPILKLANKLSARSDDPDRIAPETEHGAFFISYKTAERDNLVHAFQAAVIAAGLMAERSAVLCRGRDLANKLAGNDSPVGQGTVKGFVQATIARDKKQDYVEAFKGVAVCIAGLLVDLPKGWVATVTQPARYPEAQPLRRLIWRFTRNQDAGLPSASLLADTEWHPLLLTRIKALLTTLEKDHGLKPVNNIGMKLAKTKLPNAPLAAAADLAASNDARIRVDTVHQVKGESLDAVLYIATKEHVTAMLDGVTSEVGRIGYVAVTRARDLLWLGVPANSLSELRPKLVASGFQEIGKLPVLTT

SEQ ID NO: 65832 - protein, 634 aa, Morganella morganii
MKLEIIRLSGFQSFGQEPTELNLEDITYLIGPNGSGKTAVLQALCRLFAFDPGLRRVQRSDFYIPFDEEETPRERQLWIEADFIFPELARDEDNSTVAPHFGHMRLDELDGVPRVRFRLSATMGLDGDIDESLVYVLDINEDGSPDNTSKVPRAERNNIQVHYLPARRDPADHITYGTNALLGRLLRAVRWDAERNTIKELTDQISGSLAANSSVNAFSETLKTTWASLHKGTFFADPKVTFVASEIEALLRHLSISFTPSHDGSLVDFSRLSDGQKSMLYLSLVLSSQAIGRAVLAEDDISFDPDKLRPPVFTLIALEEPENSLSPHYLGRIVSVLNEMTKNEDAQALIATHAPTMLRRVSPELIRYLRLTESRKTRITCIELPAKTDDAHKFVREAVQAFPEIYFSRLVVLGEGDSEEIVLPRLFQAKGAPIDESAITIAPLGGRHVNHFWRLLSALQIPYFTLLDLDIGRYAAGWGRIKYVNDQFSLHEPHKKLPDGYGIPIWNSTKHKIRNYNHYLEKLEERGVFFSYPMDLDFSMLQAYPEAYDVEDKEPDDSTIKAVLGQNHYDSCQYREDELELFSTYQQRFKLGSKPAAHIEALAQLTDTELLARMPASLSRLADAVIVKLAELPE

SEQ ID NO: 65833 - protein, 555 aa, Morganella morganii
MITVEEWQPADELILEPNALRAAKEHEYCLALTAGPGAGKTEMLAQRADFLLRTGTCRYPKRILAISFKVDACKNLKERVERRCGFDLASRFDSYTFHAFAKRIIDRFRPVLVNEYTLDFGYSIVDKKNGPSRTEIEFGDLVPFAIQILQSSEIARNAIRQTYSDIFLDEFQDCTNLQYELVKLAFQGTRLRLTAVGDTKQKIMAWAGALDGIFQTFVNDFNAVPLNMYRNFRSKPRLLRVQNEIIRTLDPASVMSDEQLRGDEGEVYVHSFEDSRQEAIYLVDLIDKWIHIEQIPPAEISVLVSKQLDLYANHLMVELGNRGIPYRNEQQMQDITVEPVARLIVDYLSCLYSEREPKAWIRLMNQLIPFADEGIQSSARKDLDLLIRKQRKIVFNARSTELPFSDWWQLAIDFLKNTSIETLVALSPEYENRKRLKEVIRETSIRIQDLLRLEPDLLKALGRFTDDQAVRILTIHKSKGLEFDSVIIMAVENEIFFGSKNENRCAFFVGVSRAKRRLVLTHAQQRERPLDAKRWDVKRSAQEEYFNYVKPFVNG

SEQ ID NO: 65834 - protein, 597 aa, Acinetobacter baumannii AB5075; identical to SEQ ID NO: 62720

SEQ ID NO: 65835 - protein, 593 aa, Acinetobacter baumannii AB5075; identical to SEQ ID NO: 62631

SEQ ID NO: 65836 - protein, 614 aa, Pontibacillus yanchengensis Y32
MRLKTVTINNYRTFEDATFEFSNYGVVIGANNSGKTSVFSLLDKILNPFKSLYYSEFEVSDFRVLDEPLVVNMTFDFLSEVQMSEFKFHLNRVEMEDFQSEEEKLQIYLKYECIYESSTESFSKKLYIISGDEQFNMSEKQRKLFPFIYRGAQRDNRTELRMGRNTFLSRLLDTVEIDGNAKESIQELMGQASDILSEQLKNISNLIEQNSKHVIDYPIKPSEDEEKQNIRFNLLNLESEKLLNNLEIYILEAFKSDFESLTKQGLGYQNAIVLAIFKSFATSAIKGDLILALEEPELFLPPHAQRALARDFKELSSENQILIATHSPSFMLSTNPKDIVILRRLNSGMTSVSQFNKNASKKDIEWFSKRINAINGEAFFSNVVLLVEGETEEGAINELSYKLDAKNSEYSFDKYGITIINCGGKSKIKDFNRLVKYFSLPTVALIDFDPDGTDPNLDRDEGEVNYLSSVVDNLKQLPRDPEWGDFEGVLSKEAPINNLLQIIEDLEMKKVFCGQLIKISKELEIEQDIDFIKDVSANEEDIQLDDLIRIKEHIKSIDHKYIKDWYRAGIRDTLKRQKSVITGDIIAANLSGNEIPNDFAGVIMSCVELSRDRF

SEQ ID NO: 65837 - protein, 609 aa, Pontibacillus yanchengensis Y32
MNENIIEEIILDNKSSALVLAGPGAGKTRLIIRKLEILAQQDYFNSSGKKALVLTFNKKASIELQSRIEKANIPDSSFIEVFTYHGLGYKILRTYGYLIDISYPLKLFPIDERKALIKELESTYQAFSFDLFYQKYASIANEKDRERFVGKHAQEYADALCSYNSFKEEKGLIDYSDLISKCIELLQNSNWLRRVFQGAYPAILVDEFQDTDQLQFKMLMILGLYSNILSVADEDQIIYEFRGAEEKNINDFIDVFKASKYHLSYNHRSTNNIVQVANSLISNNTNRLSRIPMHTNNPDGSKIGIYMCSSIDEEVLRIKNLIIYWNKENKGNCAILFREKVNLSKIIISRVSKELDEVGVQTYELKPDMILKDPVVQWFIVALRFKEYLTLSLLSEFVLFLPGIGRRTQEKIYDYIRKHDDILYDDVDLALFFSKKQLYIVDGILNELFKSHHILDVFDLAYNKVSEKEKLKNKEKFYGNIRRVIEQETNGSAKELVKNYRYILDVNNLLKLSKNEVFIGTIHQVKGLEFENVVISGVSNGIFPKIKQGVENTIQEERRLFYVGITRAMFNLCITASREWFNPLEKRIERLEVSPFLRELPREYLVFNQ

SEQ ID NO: 65838 - protein, 578 aa, Pontibacillus chungwhensis BH030062
MKLIWVEIWNYRNLDGIEVALHPDMNFIVGENNLGKSNFLAMLNTISASRYFRERDFKNPDNSIEINLQLQLDDEEIGLFDDYFSPHDEQINIINITLKQDSPEEIFKFLHKETEEEISHKTLRKLNFINYSSFRNPQNELNFDRGTGGGKFLKYLVERYLKENSTDGKNQFIDENDFTDLLKYLNKSIGKIETINNFSIAAHLDNEVEKVLSKLIVLKGNGDHYINDMGYGVQFLNIIPLVIIDNIYNIIEKSRRSGENVLEQDRNEHYLPVIIGIDEPEIHLHPFMQRSLIKYLSEITKGEDQNFNSILKDLFDVDRVKGQLIFVTHSPFSIQNNYKHIVRFFQDESGELSVKSGSQITFKPDIEKHLNKNMEIIKEAFYAKSVLVVEGETEEGAFPIFAQKLGYDFDKLGVSIVRAGSVNSVPPLMNLFNKFGVNAVGIIDKDDGNMERKAFQNVENLFETNFVDFEEELSHSFQPEDYASFLVENIPEKKGFLIGTAKKLNIQFNPANPNLHEEFKAIKEQDKIRLKSELQSGIHSQLSNIKSIIVGKELGKHTTVIPQIYIETIRCLVGGSDD

SEQ ID NO: 65839 - protein, 594 aa, Pontibacillus chungwhensis BH030062
MIEHTDIKDKITEIHGDDKSQLDVIFSDGKKIMVEAPAGYGKTQTLISKIAYDIVAKKIKNYKKILVITFSVNAAHKVKKDIKSKLPVLLQDALKPKPKEIDGKVVVSNYHGFCRGILKKYGYLLHQNLKEVDSFKIFNTKEEIGLTKEELKVISKFEHDVRIINYAGIEQNKHKYLKILIKKLLDNKYITYDGIILLTELLLKNYPSVLKFYQSIFQSIVIDEFQDTNVLSWELMNLIISDKSNVQFYGDSLQKIYGFIGAIPNLLDDAAEKFDMEYHHLKYNYRFKDNKEMLLLDNNIREIAKNPINPNMESESEVKLNLFDSQYDEAKGIVQLVNSLDLNQANEKVAILYRQRGRNLDIVLKEFEDKGVPYFNGLYLQDEDPVYKDFHQQCLNRFIEFFKNRDSVSKKNLMEFYLDFKSIIKINSKSQPLLRLLKVFIEQVIKEAIWKHLNSEDRKNFIINFLMGKGLKNYIEYVKESVIISTVFGAKGLEWEYVIIPDLEKDSIPNYMGMCKGCSFKQNCRLIIDEDNEKSFIDELGVFYVALTRARIQTYFTASEINGYGYRTNITCFLKLQGISMNINKDVKSIFKEA

SEQ ID NO: 65840 - protein, 689 aa, Gallibacterium anatis
MILKKMEVNNFRLLKNFQLEFKEELSLVIGKNNSGKTSVLIILDKMLNSYRIMWEDINLERQKELYQEIIKFNIIELKTDRPLEAISLKLFIEYSDKDSYTNIQKFMMDLKPENNIIVLEFVSLISAKKVVELRNNIDENKINDFTLFSKFLSKNFSKFFEVKKYSRGFDVTQHKIEEVRSEEIESSDIQKLIKVVGVRADRAVSNDDRNHVLSKLTGKYFDSYKSVKSKSEVIFTQLEKKLEEADNELYKIYNGSKAENGKVVDGVFSEIIKVIKQYGGAGQGIDIAIESSISEKNLLSDNTNFSYRQGNESSLPETYNGLGHLNLIGILFEIETKIQEIFEQPADINLLYIEEPEAHTHPQLQYIFIRNIKNHIESHKKKLSGMGKQLQVLITSHSSHIVSACNFDDVIYLNREKNEVIAKNFNSLKDEYSGDSQKGFKFVKQYLTLNRSELFFTDKVVCVEGDTERILMPMMMYKVDKNNTLANSELPLLSQNISIIEVGAYSHIFIPLFEFLDIHVLIITDIDAAKKGENGRYVKSHPQDADHTSNAAIRNFFQGTNLDELDSPFKALVNKSAEDKIKKKLRIAYQIPEKDGEYQASSFEDAFIALNKDFIIKNKKNLCEYGALKSFEDESMKSDYYNFALNNIEKKSAFASSLLYFDNEYDEMEDEKWKVPYYIEEGLLWLRQA

SEQ ID NO: 65841 - protein, 636 aa, Gallibacterium anatis
MVTTGLEPEVLEALQCIKTNKNFILEGGAGSGKTYSLISLINVLMKESPNVNIICITYTNNAVAEILSRIENDRLLVSTIHKFIWSLISKYQREIKEILVELINDKNDKKEKIFKKPKDFSGTLISIDYFKNLYVDYDEYYSITSENDCRISISHDHILMIAEKMFERYKKISDILKDLADCIFIDEYQDTSPLVAKILLTHLSQSCKKNVIGFFGDSMQSIYDDAVGDLSQYDLVKIIKKQNRRNPKSIIELANKFRNDIQQIPSEEVNAPNMESGVIREGTIKFLYGKELHIINIRGKSLFKSWDFSDGSQTKELRLTHKYNAEMSEFKDLYDLYHDDLIIKLIKQINDKVDSENLDKDETLGNLVARIEPTFKKQKLLDLVDDSRVYKSLYNDLKDMPWKEVFKKCRIAEQSLMSYKLNGLSRKYEANSYRDRILRRLDILSELIELYESNKINDFLRITKFSIGSTNDKIHLKETMDYLVNEEDKTIGDVLLFAEGKGLLKNDELYSSYILNKGYYLWKRIQEIPFKQYRKSIAYLKEFSPICTQHSVKGSEYDNVLLILESNWSKYDFNTLFGKGSSSTKVQQRTKKLFYVCITRAKKNLVIYMPTDDLEIVSKAKNIFGEEHVIDVSLLE

SEQ ID NO: 65842 - protein, 707 aa, Vibrio tubiashii ATCC 19109; identical to SEQ ID NO: 63430

SEQ ID NO: 65843 - protein, 739 aa, Vibrio tubiashii ATCC 19109; identical to SEQ ID NO: 63251

SEQ ID NO: 65844 - protein, 689 aa, Gallibacterium anatis 7990
MILKKMEVNNFRLLKNFQLEFKEELSLVIGKNNSGKTSVLIILDKMLNSYRIMWEDINLERQKELYQEIIKFNIIELKTDRPLEAISLKLFIEYSDKDSYANIQKFMMDLKPENNIIVLEFVSLISAKKVVELRNNIDENKINDFTLFSKFLSKNFSKFFEVKKYSRGFDVTQHKIEEVRSEEIESSDIQKLIKVVGVRADRAVSNDDRNHVLSKLTGKYFDSYKSVKSKSEVIFTQLEKKLEEADNELYKIYNGSKAENGKVVDGVFSEIIKVIKQYGGAGQGIDIAIESSISEKNLLSDNTNFSYRQGNESSLPETYNGLGHLNLIGILFEIETKIQEIFEQPADINLLYIEEPEAHTHPQLQYIFIRNIKNHIESHKKKLSGMGKQLQVLITSHSSHIVSACNFDDVIYLNREKNEVIAKNFNSLKDEYSGDSQKGFKFVKQYLTLNRSELFFTDKVVCVEGDTERILMPMMMYKVDKNNTLANSELPLLSQNISIIEVGAYSHIFIPLFEFLDIHVLIITDIDAAKKGENGRYVKSHPQDADHTSNAAIRNFFQGTNLDELDSPFKALVNKSAEDKIKKKLRIAYQIPEKDGEYQASSFEDAFIALNKDFIIKNKKNLCEYGALKSFEDESMKSDYYNFALNNIEKKSAFASSLLYFDNEYDEMEDEKWKVPYYIEEGLLWLRQA

SEQ ID NO: 65845 - protein, 636 aa, Gallibacterium anatis 7990; identical to SEQ ID NO: 65841

SEQ ID NO: 65846 - protein, 159 aa, Streptococcus phocae subsp. salmonis
MSTNGTLQYFIKKELNDKEAKYDKINPKIIEMISDRDELVVNYKNISMYSQGKINGYYATSFEETIILTNAVDDDEKKYKKSLIKLLQHVHPKMRYFKDIDENSEIAERSYMYQVKLSDGKSKFSTGLVYLSITDSAFELKLPKYIQSGLQAICKYFKE

SEQ ID NO: 65847 - protein, 205 aa, Streptococcus phocae subsp. salmonis
MTYKISPENKQLELDIQQGINECFDNFKSFCFDAGAGAGKTYALQKSIEHVLKTKGENLKLSNQKILCITYTNAAKDEILDRLGRNSAIVVSTIHEFLWGFISIQQGLLTIEHTKKIQVELDCIERKINDNPLSGSVEHSEFQNVVCNDDFIKVFYNYYSISARDFRDVMKNHDTYFEPYLSNIANFKNLVKDINKKSRLSKTLK

SEQ ID NO: 65848 - protein, 642 aa, Lysinibacillus manganicus DSM 26584
MYISKLSVKNYRNFGEGKFSIPLKPFTAIIGENNIGKSNLIDCIGLVLSQDITMFKKRFLDVDDINSKTKEIFKNSVVNLIEEETIDESKIKFPDVRVELILDELDEDQLAVVGDWFYEKTFTKAKLTYWFKPRAGFKRQEWVERQVVNLRELLSEGKVKKEELYHHVEFPIDQYEYIIFGGNNPTNKCDPYFLKMLKLEVLDALRDAKKELVANGEYKLLYRILNRNYENDFVEIQSLLGDLNQKLKENKKLETIKKELTTYLDRVSLSNPSELNSIDFNFSSPEVNEILKKLSIVYGENPVSIERNGLGKNNLLFISLVLSHLASQTDEKTKLAFRVIGIEEPEAHLHPHLQTHLAKNLSKVINLKGEGVEKEGEKEEEEKKDTQIIITSHSTNITTSIDLDNLVILYRDKDQIKYHYILDGFSDKKEGQDHIKYLKKYLDATNSSMFYARRLILVEGISEQILVPLFFELYSKKTLESIGSNIINVNGVAFRHFLEIIKNGYFIKCGVLTDKDAGKKTEKRAEKLKEHYKINSDVIAVEINDDTFEKEIIKYNLKDKGRELLLKVFKQLHPIKYTELEKSWEKQIDVKTYFENIENDKSDFAFALHEELLKDSTGFIIPKYIVSIFKFILGEENEEQTK

SEQ ID NO: 65849 - protein, 531 aa, Lysinibacillus manganicus DSM 26584
MKSKLNNSLIIAAAGSGKTTELIKQIIQKVNKLPNDKYLAVITYTNTATNEILERLQKKVSIQPNIFVGTIHSFLIKFLIKPYGKVLGLVPNELIITDYDIKVNKSSKNPFIEKNMIVNRLSEKGVLTYDYIVTLSKKILENDEAKKRFCNRIRYLFVDEFQDSTNTQFEIFDTLRKGKNSEVILVGDPEQRIMNFRNKPRKRKDSSGAKKVPLHPIDSLQNKKTYSISKLNCNYRSSETIVNFINHFHSSIQQEWSNKEITSKNPVMFIQSTKLKSIINDFNNLCINSNYCKTVPKTRFFLAYENKVYKNYRKVDFNHKSKENLPLFTSIFEYLSAFYNIKKDQLLFALGLEEIELRKKCLLLLFEINYNIDFDFEDFVSFVETTFNRKREETGEEVKFNIKDRTKRLVEELSNSMSDNYEDMAKELKEYQDSFLTIHKSKGLQADAVLVVAKNEKELLMWLEDDKENRLLDQQDNCRLGYVAFSRPKEFLCIACLTPVGKETVEKLNTFNVNLFLQLEEQEQLSLKNMN

SEQ ID NO: 65850 - protein, 634 aa, Pseudomonas coronafaciens
MNLVRVRVRNFRGIAYGEVHLNGHTAFIGDNNAGKSTLLEAVDLVLGPERLSRRPVIDEHDFYAGTYVDPAKNEVVPIQIEVVVAGLSDEQQRHFRDHIEWWDTQAKTLLVAPPEGTDAPHVGAAMRVFFNGWYDVEEDDFAGDTYYAIPEMPDASYLRFSAPDKRKCGFLYLRTLRTGARALSLERGSLLDVILRLKETRLTMWEDLLDQLRALPVGETEDIGELLVAVQDAVRHYVPSDWVEQPHMRVSDLTRDMLRRTLTVFMGTGAKRRDGSIYSAPYQHQGTGTINTLVLALLSIIAELKQSVIFAMEEPEIALPPHTQKRIISSLRHKSAQAIFTSHSPFVLEEFEPAQVVVLKRTAGVMTGIPATYPPAVKPKAYRTEFRTRFCEALLARYVLVLEGRTEFDALPAAARRLGELEPTLFKSLENLGVAIVDARGDTNVAPLGGFFRSLGKVVFAVFDKQSPEALATIKASVHHPYESTSTGFEDLVLQGASEAALRGYAAVVVAAGDWPQHLAALTPTVAMPLANLRAGLSSYFSWAKGGGDAGDLLASCPTANDMPEYVRATLAAIKNVIEPPPPPPPPPLPPLLPALPPQVVVAPLPEMSIAAAEPVPLATAYGKFQPSPPQPLP

SEQ ID NO: 65851 - protein, 549 aa, Pseudomonas coronafaciens
MGGPGSGKTHVALVKARDEIRSGILKPSQKILFLSFARPTVARIIEKASELISREDLKQLEVSTYHGFAWSILRSHAYLLNGRSSLKLMPPPEAAAHLTDIDKTQHEAEKRRLFEQEGRLHFDLFASLVSELFSRSDRLGAIFSDTYPIIIFDEFQDTNSDEWALVRQLGIRSRLIALADPEQRIYEFRGAEPKRVGDFLEVFGAAQFDFAGENHRSSGTDIATYGNDLLTGANKGKTYQQVKIVRYNFMYGKNLHFSAKAAVCSALGRLKNIPNKSIAILVPSRRLMLELSDYLSSSADGLPELHHDVAMDAEPPALAAGVIAILLVGGAPCDVASRLIGALHTHIRGRRGGRPTPQAELDLAGALTGFIASGKIRGTKRQQIVSEVQRISELRRHLQLSGDPSQDWLQLSSLLASSTAEALRQVAMDARYLRLLHRGSVLRANLGALWRAQGGYNGAEEAVRSALLQEHFAAAQKDWRGIHLMTIHKSKGKEFDEVIVYDGLYQRIAKAPQDPKNNAQDLLALRVGVTRAIRRTTIVTPKRDSCPFL

SEQ ID NO: 65852 - protein, 749 aa, Burkholderia pseudomallei MSHR5609
MKIKTIKIKNFRLLHNISLQLEDETTVVVGRNNCGKTSLTDIIRKFLSERSTFEIADFSSACYDKFCAAHRAHLKGAGDEEVRALVPSIELRLHVSFDPTVPEFGPLREFVIDTDDNCTEAVIVCSRSLADGRIADLFEGHEEAVLHGADESHSAGDRLALFRSLADRVPTLFTTRIWAEDPQDPTNTRDVTPKAVTNLLSLGFVNAQRALDSTGGRDTDVLAKVLEGLFQSASVSTADGSQKNIADGLKKAVEEIQSGMDTDFKNELAKLMPAIEQFGYPGLDNVPLQPETKLEVGKLLSNFTKVQYAGYSGVQLPESYNGLGYRNLLYILLKIVGFFREYRAHVNAPGLQLIVIEEPEAHLHPQMQEVFIRQLPEIVKKLCALEGENVSWPVQFVVSTHSPHVANEARFDTIRYFAVTSTDLPVGVRCTQVKDLSSDLAGLKGPTSDFLHQYLTLTRCDLFFADKAILIEGTTERLMLPQVIRALDDADPSLKLRSQYITIMEVGGAYAQLFIPLLKFLGLRSLIITDLDAVKRNAKKKLEACLVHEGETTSNSCIKHWFSSAEAAAPEPNAPADKPATMPVTTPQAASTVPVPATAGVTDDDDEEEVADGATLFPLSTALAADNAAKTRGSLRLAYQVPEAADGPCGRTFEDAFILANQTFFGITGATNDALAKAAQNKAAKQKKSKFALTYAIEKTDWVTPRYIEESVRWLAASNTAVADPGVALAAEAQAANALVDKPTSGDAT

SEQ ID NO: 65853 - protein, 579 aa, Burkholderia pseudomallei MSHR5609
MNENTRSNPAEAAAATAWEALKDCLDGGSSFVFEAGAGAGKTYSLIAALRYLLQGRTRELQRRHQQVACVTYTNVARDMIIAQTDGNPAIYCDTTHAFAWMLVSPFQKRLRELVRTLPGWADRVEELDAANITAVGYALGRRSIEDGTANLHHDDIFPVFIELMRSAKFRNAAASRFPIILVDEYQDTNAKLVECLKDQFIGKPYAPQFGFFGDHWQKIYGDGCGSITHDALKRIYKKANFRSAKPIVDSLNLIRPDLAQAVKDPAAPGEVHVFHTNGWGGKRLTANHWQGDLPATEAAQALRNVRAELESVGWDFAGDTKVLMLTHRALATEMGYGSMRTVFAFNDSFTRKANEVIAYFHEHLEPAARAYLSKRFGKMFEAFDAERPVMNSPADKGRWTNAMRRLCELRDTGTVGDVIAHLSSTGLPILSDAVVRQERALADALAGGEPLTGRVKELHALHAVSYQEIIALCKYLDGHSPFETKHGVKGDQFENVLVVFGRGWNEYDFNLYLKMAGNPDLIGTQTADYERYRNLFYVAVSRPKRRLALLFTHRLEPSAMATLSKWFTGYPIRDIGPAL

SEQ ID NO: 65854 - protein, 634 aa, Burkholderia pseudomallei MSHR4378
MKLQSIRLSGFLSFGPEPTELTLNDITYLIGPNGSGKTAALQALCRLFAFDPSLRRIQRSDFHVPYDEDAVPDERQLWLEADFVFPELEADGESATVAPHFSHMRLDTADGLPRVRYRLSATMGVDGDIEETLVYVLDLNSDGSPMTTAQVPRVERNHVQVHYLPARRDPAEHIAYGTNALLGRMLRAVNWEDEREEVKGFTDQISGSLAANRSVAALSESLKATWSTLHKGSFFADPHITFVASEIEALLRHLSVSFSPGHDEELVDFSRLSDGQKSMLYLSLVLSAQSIGRAVLAGEDDSFDPDKLRPPVFTIVALEEPENSLSPHYLGRIVNALVAMTGNEDAQALIATHAPSMLRRVDPKHIRYLRLTDERTTKITRIRMPKKTDEAHKFVREAVQAYPEIYFSRLVVLGEGDSEEIVLPRILRAKGIPVDESAVTIAPLGGRHVNHFWRLLSALEIPHLTLLDLDVARYQGGWGRIKYVNDQLGEYAPSKTLPPDHSVPDWNSAEHKVRDYDNYLDKLESRDVFFSYPMDLDFAMLLSYPGKYGVESKPPSETTIKAVLGDSYHDAKQYTADELGLFGTYHKRFKLGSKPAAHIEALAQLTDKQLLEDMPESLSRLADAVIAKLEELPE

SEQ ID NO: 65855 - protein, 513 aa, Burkholderia pseudomallei MSHR4378
MLAQRADFLLRTGTCPYPKRILAISFKVDASKNLKERVKRRCGPDMAARFDSYTFHAFAKRIIDRFRPVLTGQDALDADYRIGDRRVARRQIEFTDLVPLATQILRISAVARRAVRLTYSDVFLDEFQDCTNHQYELVKIAFRGTAIRLTAVGDTKQKIMGWAGALDGIFQTFATDFDAVPLNMYRNFRSEPRLLRMQNEIIRVMDPSSVMPNEQLGGEEGLIFAWRFPDSQQEAEFVTNAIDGWINHDKLAPSEIAILVARQPDLYADHLMAAMERRNIPFRNEQQIQDISVEPAARLIVDYLSCLYGQRAPKAWIRLMDQLVPFGDEDVQANMRRNTQRFIAEQRKKAVLVELLGEPATDWWESVREFLRHVGIETLSALSPDYESAARLKEVIADTKARIEELLNIEPDLPKALERFSDDQAVRILTIHKSKGLEFDSVVILGVENQTFWGNPDAERCAFFVAVSRAKRRLILTVCDCRQTPPSNPYRWQENRTTHNEFMAYATPFLSPQ

SEQ ID NO: 65856 - protein, 543 aa, Burkholderia pseudomallei MSHR5596
MPTASGSATTGRAEDLSKRLSRFYKRNLDQRQQDHKALRALFDSEVGLNEHLADVFKGTLDRLSKLGYPGLHNPRLEIKSALNPAAIMSSQDTHVHYVLGDGDDALRLPDTYNGLGFKNLIYMVVEILDLHARWVADKEQRAPLHLIFIEEPEAHLHAQLQQVFIRNVLELVKASAEDGSAFQSQLVVTTHSPHILYERGFKPIRYFRRQALDDGQSTKVLNLSAFYDQNPDEREFLQRYLKLTHCDLFFADAAILVEGNVERLLLPVMIEKEADSLRSVCLSILEVGGAYGHRFKSLIEFLGLIALVITDLDSVTVTAAATAAGAADEVADEEEDDGTEFEVPNDTPGQPAVKKSGSACLPSIPGALTSNQTLIQWLPAKQTVADLLVATEEEKFKQANDGKGYRVRVAYQVPIDVTWNGSTVNLCGRTLEEAFGLENAEWCQAAAQRHLGLKLKSAPTTPESLAEGLHKRVGGKSFDKTKFALGVLTELPSNWTVPLYIKQGLHWLSSVVGLEIPSPLPDTTEPAAAAAADPEPAPAGASA

SEQ ID NO: 65857 - protein, 648 aa, Burkholderia pseudomallei MSHR5596
MTSRANRRDTNADLELYQCLNAMPPRSFMMIAGAGSGKTTSLIKGLTEILNSHGERLNLRRQKVACITYTEIAAGEIWTDIGNNPLVHVSTIHSFLWSLVRSFQSDIQQWVASRIDERIANLRATAAGFGPRVQQRTRDKNQSDIERAQDQRARIGRVRSFTYGTGSDYLNGVLGHDDIIKMVPEIIIERPLMRSLLAQQYPFLFVDESQDTMDNVVEAFKAVDQDLGDRFCLGFFGDPMQQIYATGIGAIPLAQNWVSITKPENFRCPSNILNVANAIRRDGDGLMQTRGRMAGPPGAEISMPGSAHLFILPVDELRDQRLAQVRAWSAAHNDDPLWNPDGRDDSVKVLVIVHRMAAKRLGFGDLYAALNDNAPDSFKYGFLDGTAWPVRPFKNFVVPLASAIVNEDEFEVMKVLRMQSQLLRKENLSGVNVAERLTALRAFTQQLEAMMEPSSDATNGDVLRLVRDLQVIELDPRTLSYLEIQDAPQAGAEAGADNVREDDDGEELTKEISAMEAFLSCPASQFWGYYKYINDESPFSTQQGIKGAEFERVLVILDDDEGTHAQFSYEKYRGIKPLSARDQANLRANKETAVERTRRLFYVCCTRALKDLIVVLFTDAIETAKHQVVALGLFPEEAIHLEAELNGH

SEQ ID NO: 65858 - protein, 580 aa, Acinetobacter sp. HR7
MNLNKIYLLRFGGDMEIESLRIKGFRNFKDAFIRFNGDTLVIGANDVGKSNMLHALRILLDKSLSEDDIEPSELDFHLMPKKVCNNIEITISFKSVFEDAVISVLKGYVDDKGRTFLRYTANRNDLTYRIFIGHSLQDLEEINSRFYLKYVNLKYIQSQRDLHRFIQKEKRQLLKLAQQNLTENQKEEDKLVLEEICEDLKEVNEKISQLFYIEKATEEVNEELKKLSYHHSDYSVKLDSGAIQVTDFINSLKLGASTHGNNVLLGGDGRNNQILLALWKAKSIAEHDTNHEVVFYVIEEPEAHLHPHQQRKLAKYLIDELPGQAIISSHSPQIASYFLPDSIIRLLIKSNSTVAASNGCAQCIKDGWEEMGYRISILPAEAFFSNGVYLVEGPSEMLFYNDLAKAIGIDLDHLNISLLSVDGVAFEVYTQILNALEIPWVMRTDNDVSKIKGKELWQYTGINRCLRAIGASGWHHSRVEITSEHVPKDRRWESFSKMINEKGIFISNIDLETDLVNSLTKEVLASLNKSNKIEAIDYLQKKKAIRMRKLLKGIRNDLGKLKKDALAQPLIYLKELLEKK

SEQ ID NO: 65859 - protein, 296 aa, Acinetobacter sp. HR7
MMSTSYTSQQIEAIKYSGNLVIAACPGSGKTTVVKEKVRNITLTLKDHQGVIAISFTKKASFELKRKCKAEGHNTKQSFFGTIDKFCLEEIIFPFLSQLWKGRPRESTIIDKLNNKQKGFFREVYKYPTVNDIILDNGFKLLYKQGYLWIEALPALALYILNKSESAVRYIKAKFTHIFLDEYQDTSKAQHHLFMKLVELGLIGTAVGDVNQSIYNFRGSSSDYLRELLSSKFFKKIYVDTNHRCHISINNYASRLLDPYFSIEDHQEECRVYRLKLTGDYSEISKDISEMALLHK

SEQ ID NO: 65860 - protein, 764 aa, Xanthomonas axonopodis pv. phaseoli
MRIQHVEISNFRKLLSVRIDFANETTLLVGANNSGKSSAMLALRRFLVSKGSAFRLQDLTLCHFAKLDEIGKEWENPPANFEIPTAKDWADWLPSLDIWVSADQGEFHFIRDLIPSFAWRGGLVGMRFLLEPDDMNMLYTDYRKERARVAELEDALGKEEPLGSPLTLWPQSLHDYLNRRLGDKFKVRWYRLDPQQLKKPHKSTRMAQMQQLSPTSLPLESNPLSGLIRVHEINAQRGFGDHSDDNQGDNTRPSGARKLSEQLRSYYSRHLDPGDSPAISDLEALRAIEAAQSAFDTRLSSSFESAIKEVEGLGYPGRNDPRIKVASRLAATDGMNHEAAVLFELDSIQGAPGAPPLHLPETANGLGYQNLISMIFRLMGFRDEWLRKTRAASAEVIDRVEPIHLVLIEEPEAHLHVQVQQVFVRHAYQVLCRDALLERYPNLKTQLLVSTHSSHVTHEVEYQNLRYFRRLPAGMYGIGVPVSTVSNLSNVFGDGTKTKEFVTRYLRAQHADIFFADAVILVEGSAERMMLPHFLRNKFPFLDRCYITTLDIGGSHAHRLRPLIDALGILTLVITDLDAGLNKAAKPVQRNADQITNNPTLRSWMKLMHLGSTVDELLELPANQKEHQIDDLYSVRIAYQTPISTHLPATGKPIQTLPNTFEDSFVLSNAGHFAEKTNGTGMMKAFVKVLNEAQTSEAVGEGFFNELREGKKAEFVLLVLGDKNFPNLEIPEYISEGLNWLESKLRSKQIELLVIPPECAEVTP

SEQ ID NO: 65861 - protein, 615 aa, Xanthomonas axonopodis pv. phaseoli
MSEAVIADADDTMQACLNLADPKSFFLYAGAGSGKTHSLVEAIRELKGRERERLTFEGRRIAVITYTNSACDEILRRLEFDPLVEVSTIHAFAWRLIQGFDNEIREWLRIKLPQDIEKIEGELARSRGDNKTSRANRRKLQSKRRRLENLDEITKFIYSPIGDNRERQALNHDEIIKLTAAFVPERPLLDVLVDRYPVVLIDESQDTHAPVMEAFLKVQQLAKTRFCLGLLGDTMQQIYGHGVTRLDKAIPDDWLKPEKVVNRRCPRRVVDLINVIRSTADTHQQTPKPDAIEGVVRMYCISQSQEQAPNLEEGIAQSMAAITDDGEWATGSAGRKTLILEHKMAGRRMGFEKLFTPLYGVEHLQTGLLDGTLPALRVFSEGVLPILTAKDDHFLVLEAVRSRSPLLSKDAMQSTGDQSAHMQRVEDATHALLSLFEKNDPTLSEVATLLLQTQLLDVPDNLVGAMVLGAPSEAPDPEDTNAMTNYAYQLFLERPFSELAAFASYADGLSPYGTHQGVKGLEFPRVMVVINDEEAGGFLFSYDKLLGVKEPTKTDRDNERDGKDNALARTRRLLYVTCSRAEKSLAIVVYTPQPALAKRNVVAAGWLQESEVEIL

SEQ ID NO: 65862 - protein, 626 aa, Xanthomonas axonopodis pv. phaseoli
MHLVRVRVRNFRGIAYGEVHLNGHTAFIGDNNAGKSTLLEAVDLVLGPERLSRRPVIDEHDFYAGTYVDPAKNEVVPIQIEVVVAGLSDEQLRHFRDHIEWWDSQAKTLLVGAPPEGTDAPHVGAAIRVFFNGWYDVEEDDFAGDTFYATPEMPDGSYLRFSAPDKRKCGFLYLRTLRTGARALSLERGSLLDVILRLKETRLTMWEDLLDQLRALPVGETEDIGELLVAVQDAVRHYVPSDWAEQPHMRVSDLTRDMLRRTLTVFMGTGAKRPDGSVYSAPYQHQGTGTINTLVLALLSIIAELKQSVIFAMEEPEIALPPHTQKRIINSLRQKSAQAIFTSHSPYVLEEFDPVQVVVLKRTAGVMTGVPATYPPAVKPKAYRTEFKARFCEALLARYVLVLEGRTEFDALPAAARRLAELDPTRFKSLENLGVAIVDARGETNVAPLGAFFRSLGKIVFAVFDKQSHEALATITASVDHAYESANKGFENLVLYGVSEVALRSYAAVVVAGGDWPQHLAAWTPTPATPLADLQAALSSYFSWAKGGGDAGDLLASCPTASDMPEYVRTTLAAIKNVIEPPPLPALPPLPPQLAGVPPLPGAAAESPPLAPAYGKFQPSPPQPLA

SEQ ID NO: 65863 - protein, 551 aa, Xanthomonas axonopodis pv. phaseoli
MALGGPGAGKTHVALVKARNEIRSGILKPGQKVLFLSFARPTVARVIEKASELISREDLKQLEVSTYHGFAWSILRSHAYLLNGRPNLQLLPPPEAAAHLADIDKAQHENEKRRLFEQEGRLHFDLFASLASELLTRSDRLSAIFSDTYPIIILDEFQDTNSDEWALIQQLGKRSRLIALADPEQRIYEFRGADPRRVGDFLENFGAAHFDFAGENHRSSGTDITSYGNDLLTGANKGKVYQQVKITRYDFMYGKSLHFTAKAAVFSALDRLKKVPDKSIAILVPSRRLMLEFSDYLSSAADGLPALNHDVAMDAEPPALAAGVIATLLAGGTAGDVASRMLGALHSHIRGRRGGRPTPQTELDLAGALSGFISSGKIRGSKRLLIVSEVQRISELRRQLQLTGDPAEDWLHLRGLLASSTAEALKQVATDARYLRLLHRGSVLRTNLGALWRAQGEYMGAEEAVRSALMQEHFAAAQKDWRGIHLMTIHKSKGKEFDEVIIYDGLYQRVAKAPQDPKICAQDLLVLRVGVTRAIRRTTIVTPKRDPCPLL

SEQ ID NO: 65864 - protein, 561 aa, Burkholderia pseudomallei MSHR983
MTHDKGRGSREILSSLIKVDFLHAQRHLSDSGGGARSEDLSRCLSRFYERNLEKHEEDYDAQRALYQSEALLNDHLERVFGPTLERLSHLGYPGLNNPKLLIKTALNPATILSSHDGARVHYAVGPEVGIDTQTTLPDRYNGLGFKNLIYMVVELLDAHARWLDIEENRPPLHLIFIEEPEAHLHAQLQQVFIRKVLDILDIPDEDAPHCTTQIVVSTHSPHVLFERGFQPIRYFRRVREAGVQRSEVLSMASFYETANDPNDPTDRTRDFLERYLRLTHCDLFFADAAILVEGNVERLLMPQMIAKVAPGLLSTYVSILEVGGAFGHRFKGLIEFLGLTTLIVTDIDSVMAPAAADPVAPDDEDDPDADPDLEEAAEDRAAVRGGRKACMANEPGALTSNQTLIQWLPGRSTIADLLNATVEQRIQARTVASDALIRVSYQTSVNASWRGTTAAMVGRTLEEAFALENLAWCQDAARAEIRLRVRGCNKLSLEQIAQSLHRKIKSANFRKTDFALALLSQDPSAWTVPAYISEGLLWLEHEVVPHPPEIAAPPINAGAVA

SEQ ID NO: 65865 - protein, 628 aa, Burkholderia pseudomallei MSHR983
MTLRASQPDTPADLELRACLDERPQRSFVMVAGAGSGKTTSLVKALTHLAQTRRRELKMRGQRIACITYTEVATKEISGDVGDDGLFHVSTFMWSVVRPFQIDLKTWVISRIHEQIAEAREHYNRPRTRPATRQRLEREIARHERHLEEVAHRTHFSYGAGRDFARGVLGHPDVIAVAVELIEQSQLLRDLIASHYPVLFVDESQDTRADVVAAFRLIAETTPLEFCLGFFGDPMQKIYADGAGAIDAPATWSQITKPENFRCPQQVLRIVNGIRRAGDGLEQTRGRMTRVDDVLIPVAGTARLFLLLADERRSAKLSRVREWLRRTNNDELWVSEDRAADVRTLVVVHRMAASRLNFPNLYAALNDNSPQNFKEGLKDGSAWPLRPFLTYLLPLAMAVRDRRDFDAMTLLRSQCLLLSSVGLAGNGAPEVLRNLRAATEGLATLMHSNDATLRTVLIFASNTGLLQLDEAWSKYLDDDAEALAADDDPEVPSIIAFLNCQVSELRGYRHYLEDLSPFATQQGVKGAEFERVLVLIDDDEGRGQRLFSYEKYFNIAPLSETDQENIDAGDDNVIDRTRRLFYVCCSRAKRDLAVVMFVGDLAAARGKIEESGIFMPDDIVDEAALELD

SEQ ID NO: 65866 - protein, 749 aa, Burkholderia pseudomallei MSHR4304
MKIKTIKIKNFRLLHNISLQLEDETTVVVGRNNCGKTSLTDIIRKFLSERSTFEIADFSSACYDKFCAAHRAHLKGAGDEEVRALVPSIELRLHVSFDPTVPEFGPLREFVIDTDDNCTEAVIVCSRSLADGRIADLFEGHEEAVLHGADESHSAGDRLALFRSLADRVPTLFTTRIWAEDPQDPTNTRDVTPKAVTNLLSLGFVNAQRALDSTGGRDTDVLAKVLEGLFQSASVSTADGSQKNIADGLKKAVEEIQSGMDTDFKNELAKLMPAIEQFGYPGLDNVPLQPETKLEVGKLLSNFTKVQYAGYSGVQLPESYNGLGYRNLLYILLKIVGFFREYRAHVNAPGLQLIVIEEPEAHLHPQMQEVFIRQLPEIVKKLCALEGENVSWPVQFVVSTHSPHVANEARFDTIRYFAVTSTDLPVGVRCTQVKDLSSDLAGLKGPTSDFLHQYLTLTRCDLFFADKAILIEGTTERLMLPQVIRALDDADPSLKLRSQYITIMEVGGAYAQLFIPLLKFLGLRSLIITDLDAVKRNAKKKLEACLVHEGETTSNSCIKHWFSSAEAAAPEPNAPADKPATMPVTTPQAASPVPVPATAGVTDDDDEEEVEDGATLFPLSTALAADNAAKTRGSLRLAYQVPEAADGPCGRTFEDAFILANQTFFGITGATNDALAKAAQNKAAKQKKSKFALTYAIEKTDWVTPRYIEESVRWLAASNTAVADPGVALAAEAQAANALVDKPTSGDAT

SEQ ID NO: 65867 - protein, 501 aa, Burkholderia pseudomallei MSHR4304
MIIAQTDGNPAIYCDTTHAFAWMLVSPFQKRLRELVRTLPGWADRVEELDAANITAVGYALGRRSIEDGTANLHHDDIFPVFIELMRSAKFRNAAASRFPIILVDEYQDTNAKLVECLKDQFIGKPYAPQFGFFGDHWQKIYGDGCGSITHDALKRIYKKANFRSAKPIVDSLNLIRPDLAQAVKDPAAPGEVHVFHTNGWGGKRLTANHWQGDLPATEAAQALRNVRAELESVGWDFAGDTKVLMLTHRALATEMGYGSMRTVFAFNDSFTRKANEVIAYFHEHLEPAARAYLSKRFGKMFEAFDAERPVMNSPADKGRWTNAMRRLCELRDTGTVGDVIAHLSSTGLPILSDAVVRQERALADALAGGEPLTGRVKELHALHAVSYQEIIALCKYLDGHSPFETKHGVKGDQFENVLVVFGRGWNEYDFNLYLKMAGNPDLIGTQTADYERYRNLFYVAVSRPKRRLALLFTHRLEPSAMATLSKWFTGYPIRDIGPAL

SEQ ID NO: 65868 - protein, 648 aa, Burkholderia pseudomallei MSHR4300
MKLVRLRLFNFRSFGSDLAEIELDDMTFLLGPNGTGKTAVLQALARMFSLDPSQRKVSRSDFHIPVDEAPEDAPDERKLWIEADFEFPELNEDDAGEEELPAVPGNFAHMQLLAEDGPVQVRFRLKATIDQDGDIEESFTYVTKVGDDGSPLEESRVSKQDRNAIQVHYLPARRDPADHISYSANALLGRALRSADWSTEREQISVLTGQISESLTGNAAIEGIAEALTGQWSDLHKGAYYSSPSVSFARNEIENLLRHLSVGFSPGHGESVVDFSRLSDGQQSLLYVSLVLAMHSIGSKVLSGELGTAFDIDKLRPAVFTLIAIEEPENSLSPHYLGRVVRALTAFAGDQDAQALVATHSPALLRRVSPDSVRYLRLNENRKTIVKRIELPEDESAQKFVREGVQAFPELYFSRLVVLGEGDSEEIVLPRLLAARGILADDASVSVVPLGGRHVNHFWRLLHGLGIPHVTLLDLDLARYQGGWGRIRYAANQLLKYADVSDNDLTQEEIDGIPKWNDEQGILIDDDGWIERLENFGVFFSAPLDLDFLMMTTYPDAYLIEAGDLQKPDEETIKSVLGKKHDVLGGQYSEEEQSYFDAYHAKFKLGSKPTWHIRAMSSMDDQELVDEMPEVLERMFDRVESALEDLPE

SEQ ID NO: 65869 - protein, 553 aa, Burkholderia pseudomallei MSHR4300
MIRVDRWSPSDGLSLEPNALTAAKETGRSLALTAGPGAGKTEMLAQRADFLLRTATCRYPKRILAISFKVDASQNLKARVRKRCGPELAARLDSHTFHAFAKRIIDRFRPVLTGRDALDSDYSIGPVRVQRRVITFGDMVPLAVTIVESSQLARNAIRQTYSHVFLDEFQDCTDVQYRLIKACFHGTQAKLTAVGDTKQRIMGWAGALEGIFQTYAHDFAALPLNLYQNFRSKPRLRRMQNAMVRVMDPPAALNDEDIAGEEGEIEILRFDDDDREAIYLADACRDWIDEEGIDPSEIAVLVSKQQNLYCQKLRTALEARGVPFREEDSTQDLASDPVACLIVDFLLVASGSRQPAPYGRLLDLVVFSHGFDEEREYQARSRWDRFVADVGQRIADGRTNLAEEDELAGIVDELIRIVGRDAVVALSPDYAHGDRLQQQIEATINRAHHLLRGGDNVATALASFSGDRAVRIMSIHKSKGLEFDTVVVLGVERETFWGNEVAERSAYFVGISRAKRRLFLTVCERRERPDGASNWRTGRTEHNEFVGYAEPYL

SEQ ID NO: 65870 - protein, 602 aa, Burkholderia pseudomallei MSHR4300
MFSLDPSQRKVSRSDFHIPVDEAPEDAPDERKLWIEADFEFPELNEDDAGEEELPAVPGNFAHMQLLAEDGPVQVRFRLKATIDQDGDIEESFTYVTKVGDDGSPLEESRVSKQDRNAIQVHYLPARRDPADHISYSANALLGRALRSADWSTEREQISVLTGQISESLTGNAAIEGIAEALTGQWSDLHKGAYYSSPSVSFARNEIENLLRHLSVGFSPGHGESVVDFSRLSDGQQSLLYVSLVLAMHSIGSKVLSGELGTAFDIDKLRPAVFTLIAIEEPENSLSPHYLGRVVRALTAFAGDQDAQALVATHSPALLRRVSPDSVRYLRLNENRKTIVKRIELPEDESAQKFVREGVQAFPELYFSRLVVLGEGDSEEIVLPRLLAARGILADDASVSVVPLGGRHVNHFWRLLHGLGIPHVTLLDLDLARYQGGWGRIRYAANQLLKYADVSDNDLTQEEIDGIPKWNDEQGILIDDDGWIERLENFGVFFSAPLDLDFLMMTTYPDAYLIEAGDLQKPDEETIKSVLGKKHDVLGGQYSEEEQSYFDAYHAKFKLGSKPTWHIRAMSSMDDQELVDEMPEVLERMFDRVESALEDLPE

SEQ ID NO: 65871 - protein, 553 aa, Burkholderia pseudomallei MSHR4300
MIRVDRWSPSDGLSLEPNALTAAKETGRSLALTAGPGAGKTEMLAQRADFLLRTATCRYPKRILAISFKVDASQNLKARVRKRCGPELAARLDSHTFHAFAKRIIDRFRPVLTGRDALDSDYSIGPVRVQRRVITFGDMVPLAVTIVESSQLARNAIRQTYSHVFLDEFQDCTDVQYRLIKACFHGTQAKLTAVGDTKQRIMGWAGALEGIFQTYAHDFAALPLNLYQNFRSKPRLRRMQNAMVRVMDPPAALNDEDIAGEEGEIEILRFDDDDREAIYLADACRDWIDEEGIDPSEIAVLVSKQQNLYCQKLRTALEARGVPFRVEDSTQDLASDPVACLIVDFLLVASGSRQPAPYGRLLDLVVFSHGFDEEREYQARSRWDRFVADVGQRIADGRTNLAEEDELAGIVDELIRIVGRDAVVALSPDYAHGDRLQQQIEATINRAHHLLRGGDNVATALASFSGDRAVRIMSIHKSKGLEFDTVVVLGVERETFWGNEVAERSAYFVGISRAKRRLFLTVCERRERPDGASNWRTGRTEHNEFVGYAEPYL

SEQ ID NO: 65872 - protein, 749 aa, Burkholderia pseudomallei MSHR4308; identical to SEQ ID NO: 65866

SEQ ID NO: 65873 - protein, 579 aa, Burkholderia pseudomallei MSHR4308; identical to SEQ ID NO: 65853

SEQ ID NO: 65874 - protein, 634 aa, Burkholderia pseudomallei MSHR1357; identical to SEQ ID NO: 65854

SEQ ID NO: 65875 - protein, 555 aa, Burkholderia pseudomallei MSHR1357
MIAADTWRPADGLTLEPNALRAAKEAKRCLALTAGPGAGKTEMLAQRADFLLRTGTCPYPKRILAISFKVDASKNLKERVKRRCGPDMAARFDSYTFHAFAKRIIDRFRPVLTGQDALDADYRIGDRRVARRQIEFTDLVPLATQILRISAVARRAVRLTYSDVFLDEFQDCTNHQYELVKIAFRGTAIRLTAVGDTKQKIMGWAGALDGIFQTFATDFDAVPLNMYRNFRSEPRLLRMQNEIIRVMDPSSVMPNEQLGGEEGLIFAWRFPDSQQEAEFVTNAIDGWINHDKLAPSEIAILVARQPDLYADHLMAAMERRNIPFRNEQQIQDISVEPAARLIVDYLSCLYGQRAPKAWIRLMDQLVPFGDEDVQANMRRNTQRFIAEQRKKAVLVELLGEPATDWWESVREFLRHVGIETLSALSPDYESAARLKEVIADTKARIEELLNIEPDLPKALERFSDDQAVRILTIHKSKGLEFDSVVILGVENQTFWGNPDAERCAFFVAVSRAKRRLILTVCDCRQTPPSNPYRWQENRTTHNEFMAYATPFLSPQ

SEQ ID NO: 65876 - protein, 749 aa, Burkholderia pseudomallei MSHR3016; identical to SEQ ID NO: 65852

SEQ ID NO: 65877 - protein, 579 aa, Burkholderia pseudomallei MSHR3016
MNENTRSNPAEAAAATAWEALKDCLDGGSSFVFEAGAGAGKTYSLIAALRYLLQGRTRELQRRHQQVACVTYTNVARDMIIAQTDGDPAIYCDTTHAFAWMLVSPFQKRLRELVRTLPGWADRVEELDAANITAVGYALGRRSIEDGTANLHHDDIFPVFIELMRSAKFRNAAASRFPIILVDEYQDTNAKLVECLKDQFIGKPYAPQFGFFGDHWQKIYGDGCGSITHDALKRIYKKANFRSAKPIVDSLNLIRPDLAQAVKDPAAPGEVHVFHTNGWGGKRLTANHWQGDLPATEAAQALRNVRAELESVGWDFAGDTKVLMLTHRALATEMGYGSMRTVFAFNDSFTRKANEVIAYFHEHLEPAARAYLSKRFGKMFEAFDAERPVMNSPADKGRWTNAMRRLCELRDTGTVGDVIAHLSSTGLPILSDAVVRQERALADALAGGEPLTGRVKELHALHAVSYQEIIALCKYLDGHSPFETKHGVKGDQFENVLVVFGRGWNEYDFNLYLKMAGNPDLIGTQTADYERYRNLFYVAVSRPKRRLALLFTHRLEPSAMATLSKWFTGYPIRDIGPAL

SEQ ID NO: 65878 - protein, 623 aa, Burkholderia pseudomallei TSV32
MSSYAPESGVAITDVRVSNFRSLANIEVELNDLTVLIGANNAGKTSFLDAMFAAIGSGRKLLGQDDIRLMHGEAMPPKDRRVVVDIRIRPIDENGKVVDKFPEGSFWTALWGPGIVLDDHDFDEFMAFRTTLAWRVEKADYVVERLFLKEWKSFEDWIDTPTQDKPITAAQLEPVALHYIDAKRDLEDDLRRQGSFWRRMTEDLGLSGDEVAELEAALTGINQQIVDKSSMLQRLKTNLSDLQAVVSADSAGIDIAPVARKLRDLSKGVDVSFSTAGAQSFPLARHGMGTRSLASLLVFRAFTAWRGDVAAKNNDKLHSVLALEEPESHLHPQAQRSLFAHIKKIKGQRVVSTHSPYFAGQAQLEDLRLFIKKGGDTGARKLDLSKLEKADDIRKLQETVIESRGDILFARAVVLFEGQTEEQALPIWAEAYWGASIHELGFSFVRANGTDYFPFIWLAKSLEIPWYVMGDGEQKPINDLEAALKKAGQPDIASSPNVVVVSSGKNFETQLLEDGYLAEIETALNEAHGRESFLDEFIDKHHGLELAKGKGVRDYKSEGGRTRAAADAMKASKTRLAKPLARTISGLKDPERRFPKHIERLFSVIGENHGIQKLAVEAEVEEQ

SEQ ID NO: 65879 - protein, 617 aa, Burkholderia pseudomallei TSV32
MNSPTKLRLSTLQAQVVEHVDGALLVVAGPGSGKTRVLTERVRSLLTSVPGHFRVLALTFTNKAADEMRDRLSDLGENRQRAFIGTLHSFCLEMLVERGKLVGVEGEPHIFEQHKDRKEILLEAIRQDPVLDEEVNQIVDRKERNRRVDNWLQMISRVKAHPITCAVLSDELDKRVLDAYDAGLRACGAYDFDDLLLLGYRLLTNNPKLADFYRRLYRFVCVDEAQDLNEAQYALLCALCGDSYKNVMMVGDPKQSIYGFNTSSPEYMEKFRFEFAAKLIELTENFRSSQAVVNVARSIDPNYLVDAQLPIKGDARVFVGDDEEHEARLIVDELELLFAQGHPDVEGGVEPSKCAILGRTRFALLAIENELRRRNVPFYKRLTANHENESDLVDEFHLSLRILANPRDRLHLAALATKWVTQPPETATDAMVALSQMAESAAEQRAKAVAEAVASIVQNTARLDLMPAFKLLRGYADSLDENSRRAIYEDVAVFQQEWDQYLRSDGTSRTLSGFMSSKALGATQKAHRDGVALLTVHSSKGLEFDAVFIAGMAEGTFPDYRAVGKVREMAEESRNAFVAVTRSKRLLYLTYPRVKLMPWGDYKAQQASRFVSMSGIS

SEQ ID NO: 65880 - protein, 512 aa, Burkholderia pseudomallei MSHR1029
MGVDGDIEETLVYVLDLNSDGSPMTTAQVPRVERNHVQVHYLPARRDPAEHIAYGTNALLGRMLRAVNWEDEREEVKGFTDQISGSLAANRSVAALSESLKATWSTLHKGSFFADPHITFVASEIEALLRHLSVSFSPGHDEELVDFSRLSDGQKSMLYLSLVLSAQSIGRAVLAGEDDSFDPDKLRPPVFTIVALEEPENSLSPHYLGRIVNALVAMTGNEDAQALIATHAPSMLRRVDPKHIRYLRLTDERTTKITRIRMPKKTDEAHKFVREAVQAYPEIYFSRLVVLGEGDSEEIVLPRILRAKGIPVDESAVTIAPLGGRHVNHFWRLLSALEIPHLTLLDLDVARYQGGWGRIKYVNDQLGEYAPSKTLPPDHSVPDWNSAEHKVRDYDNYLDKLESRDVFFSYPMDLDFAMLLSYPGKYGVESKPPSEITIKAVLGDSYHDAKQYTADELGLFGTYHKRFKLGSKPAAHIEALAQLTDKQLLEDMPESLSRLADAVIAKLEELPE

SEQ ID NO: 65881 - protein, 555 aa, Burkholderia pseudomallei MSHR1029; identical to SEQ ID NO: 65875

SEQ ID NO: 65882 - protein, 629 aa, Bacillus subtilis
MYISQVHIQNYRSFNDFKISLNEGLSIIIGENNVGKSNFLESLNLVFNRNYSLAKKTLQQEDFWSGLIIKDKWPEVKIEITLRGIKTEDELAVTSKWLTRNPEEAKLTYKFRPKSNISAKLPKKSKSISEIQLPLHEYEWVIYGGDIETTDAFDFNMLAKFGIEYVGALRDATSELKKSSGQLQQILKSLDIKENELDRISKKLEALNKEIIKGNGVQETQAHINRFLGKITGFSRQEVKIQMSENDYASLLRDLKVLIGSVGENAHPVNINGLGYNNLLYISMLLTKFTTLKELKQNSNYLFPILIVEEPEAHLHTHLQKYLAKYFFGQEVVGQVIMTTHSTHVSSHADLDSLIVFYKKSGRNYSRRIGTIFDSNNKEQREYKQHLKRWLDATKSDIFFGKKVLLLEGIAERLLMPKFFSILYNSKDNGSGWENTLESEGISLISVDGVAFRPFLQLFSDKGLDIKCAVLTDSDPEAIPVRNENGEEVRGTDGKILKEKVYPFKEGQYEICSRTANLKSDYCEQENVYISTNLKTFEYDLILENNQQFFLELIEKHKIGTAKDRTIIRGLEGHEFAKEAYELISKEKGQFSQYILDEINDGKTINIPSYIRKAFEFLKERDESDATNR

SEQ ID NO: 65883 - protein, 587 aa, Bacillus subtilis
MLLIDNEKYRREIIEQPIENSIVVHAGPGSGKTTLLIQRLKYIIENRKKSYSGIACITYTNAAKDEIISRLQKEQIVPPKEFFIGTIHSFLYENVIKPYSHLLNQNEQFKVTPIGFVRGLKREVGEMLNKSQYTITESELAAFESLGHDKDGRPYCFRGQIPSQVAREWKKMLKQKGYIDQQTAIYVSYEILKKYEHIKKAFSLRFPFILMDEYQDVTYYQDKVFSLLTHSSFFCVGDANQSIFSFTGAEPIIFTSKDKDEKFKRYNLINNFRSTSNIVQFTNRKTDIIQNDASEHTSLKEKVLFITNKKEMKEVIEIFQREQAKIKIDEGQIPFLILTRQNKLHKQINQIIKESNFEVNPFLDKLKNHHYRRYLILKNLLIAIAFKKSNQLDEAINYISESLSYLFFNAPPAYIKLTDIQYDAFMWKKLNVFTILYIDSLDLNQMTPDKLFVELKEFIGETSEKVFERKVNRKLRMLDYDWKGSKREVKTIKLSELVESLLYEHQYTQKLSNIKSIHSAKGMEAECVLVLAETQNELNEWLANNQKSEEARIGYVAFSRARKLLCIWAPLLKAEELEYLQDNVKFI

SEQ ID NO: 65884 - protein, 565 aa, Aeromonas caviae
MKISNVHLIGFRNFADSSINFKDNTLIIGSNDIGKSNLLHALRILLDKSLSEADLEPNELDFHIGLTDVSNEISITIKFTNVIEDAVISVLKGNVSDDNETFLRYVAQRNNLDYKLYIGPSLSELEEISGRFYLKYMHLKYIESQRDLEQFIRKEKRQLLRIAQESLSEKEKEEDDDLLREIGHDLELLNEKIAQLIYVDKATQDVNDELKKLAYHYSDYEVQLDTGAIKVNDFIEKLQLGANTNGSNVMLGGDGRNNQILLALWKAKSAREHDLENEVIFYVVEEPEAHLHPHQQRKLASYLIDELPGQTIISSHSPQITVNFSPDSIIRLLRQDTATIAASGGCSDCIESGWDNMSYRMSILPAEAFFSNGVFLVEGPSEILLYQSLSKSIGIDLDYENLSILSVDGISFKVYTSILNALAIPWTMRTDNDTSKVPGKNEWQYSGINRCLSISGQPQLKNSDIELTSQETLDNGMWEHVSGIINGQGIFLSKIDLETDLVNELTDEINDALGKTDIDSSIKYLQGKKALRMRGLLLSIEDKLYKLHDGELVRPLRKLIELRKS

SEQ ID NO: 65885 - protein, 536 aa, Aeromonas caviae
MAIFNPTPQQQAAIDCPDSIVVTACPGSGKTTVMSEKIRLVTASQPGHKGVIAITFTRKASEELKKRCKKNSHDTKLSFFGTIDSFCLKEIIVPFLGRIWGGKPSNCKIIKRLETHHRGYLSQNYTSPTERDLYSDDGFQRLYNDGILWMSSFSALSLFILNHSTSAQRYLKARYSHVFIDEYQDSSEAQHELFIKLHQLGLVATAVGDIDQSIYRFRGSQPELLLELTRDTVNFKHFKLSLNHRCHPSIINYSSRILDPSCDLITHKDDIRVYRRRLNGNLIEAANQITPWITGWLESGQIKRACDIAVLAKKEISLREFSSGLGVNYRLYKDTPLHEIGTEPSDIYLDFLLYKHTTILTAQDFIDKYSNRLVGERIAGLRKTLKTIRNEQDVNSFIEKCCSFMRLMGYMNFDEENDAVRSVWANESLIKLFMPVTDGEIQLMTLHKSKGLEFKIVLHLDMEEWSFPHRIPGVNRSDINYPSLEEDTNLHYVGITRAEEYCILVQTNMRRNANGGYAPSSPSYFLNLPQLTGLYQ

SEQ ID NO: 65886 - protein, 594 aa, Serratia marcescens
MYLSKLEIRNFRNFEAADIPLAGNVVLLGENRVGKSNLLFAIRLVIDPTLPDSARQLKLSDFWDGCDLESNPQIEVHLEFADFDSDTSLSALLTDFRIAEDPSVARLSYIFRKKEEVHGAPRSGEDCEFIVFGGGQESRTIPGRVRRRISIDMLDALRDAEAQLASWRNSPLRPLLEDAFSSLSRADLDRVATELQAATETMEKFPSIRDLEDSLRGGILDLAGTAHDLDARLRFAPADPLRLMRSISMFIDDGKRGIIEASLGSANVALISLKLAEFAWRREKNERNFSLLCIEEPEAHLHPQLQRAVFDKLFNNADKDQSLIVTSHSPTLATIAPLRSVVRICRDSEGRSRAFSLAELPVTSEELDDIERYLTATRSELLFANGVIFVEGDAEEVLLPGFAQAMGINLDQLGITVCNVAGVNFEPYVKLAASLGLPFSVVTDWDPLDGTKQPMGKTRSISIWQAYSDVSGKLKKLTPENIIWLNNSSYEACKAGFERIGIFLNDQTFEVAVANTAGLKEALLDILDEQGFGVLRSSRIASWRAGIVPDPTQLLAMISDIGKGRLAAKLKQKAPGLAPPEYIASAIQYVVSNV

SEQ ID NO: 65887 - protein, 597 aa, Serratia marcescens
MWCRMSNRRALSEALNELLPNREQYAAATYLGHCVVIAGPGSGKTKTLTTAMARALIDEVADPRGVACITYNNECASELEGRLACFDVTGGDRNFIGTVHSFALNQVLIPYSRCIPGLLPDDFRVATRDESRAAVEVAYQARFGAIGDPHARWKFAEEKRRRDVNRLLPAWRNNNPELADLIEGYEAELRRLGLIDFDDMPLIAFRIISEHEWIRNAIRSRYPVLFVDEYQDLGHALHELVLLLCFNGGIRLFAVGDADQSIYGFNGANPGLLDSLASRADIRPFRLRFNYRSGAKIIRASLGALGEDRDYVGPDGNPEGELGFHGVNGDYNAQAHFIAHDLIPSLIERGFQPERIGVLYRAAWLGDKVADELKARNIAIIRADSNALIKRNSRLARFIEACSQWVTGGWKEASPPFNLLLDQALFLVYGRRASRAEEQLLTVQLITFLRNGIDKAESAHEWLRRLNDEVITGWMGISQNTQQEWDVIAELLKRTDPVRGLDVALDVFAGKVEGTGRISLSTLHSAKGREFDVAIMFGVNKYDFPSKRDLASDNALREARRLFYVGVTRPRKELHMVYEKGKHSPWIVELYHRSQQI

SEQ ID NO: 65888 - protein, 712 aa, Pantoea sp. PSNIH2; identical to SEQ ID NO: 63712

SEQ ID NO: 65889 - protein, 599 aa, Pantoea sp. PSNIH2
MFMWNKDDLNPEQEAAILKPGSVFLIACPGSGKTRTLTYKIAYVLSRLKSNKQFVVAITYTHRAADEIHERIESLGVDTSRLWIGTIHSFCLEWILKPYGIYHEALDRGFRVIDQHEREKILEALCKPYQKPKITFWDCEFYYTETGYVLSCPQDWKHSGLHVILGKYFEILHESRQLDFELILYYAYQLIARHPAISTLLAQLFSFVLIDEYQDTKRIQYSIITAILKAGQGATKAFIVGDPNQAIYQSLGGYPIAFEDFKAMANIDLDELELSRNYRSSERIIEYFGNYNVHNTRIEAASEDKAYPSLISFDDTVSKNDLDAELIRLIRFNIETMGISPHEVCILAPQWTHLASMTRRLVASMPEYSFDGPGMVPFARDTENFWYRLSKIALTQASPGMYVRRLRWAGEILNDLEAAGASVSKLTRRSLLRECNAIKIDETDGLTYLSAFFERLFANLAIDFRLFTLLQEHHVAFFDSSQARVNRLKSEGSEFIGDIETFRKVFQHRTGITISTIHGVKGAEFDAVIAYALLEDMVPHFNDPNGQESAMKLLYVIGSRARKNLHLVSERGRVRQYSGEEYQVTRKLASCSFGYDQIP

SEQ ID NO: 65890 - protein, 572 aa, Candidatus Thiomargarita nelsonii
MFLRKFQIENFRGIKHLSLELDELTVLIGENNTGKTSILEALQTCLSRSLTRKASPFSDFDYHLQDANAQPTQANPIILTLTFSEQKADEWPDEIVQTFKNVYQTDVDTGIQSITVKITSTYNQDVEDFVTSWDFLDLQGNALLGEAKAPRNIFNLQQHLPLFYLAALRDAAQEFQPRSAFWGPFIKQFKINEAQRQEIETELSRLNQQILDSHKGFEAIKERLKETNKIVPLAEDEPVSIEALPGRVFDMLSRTQVMLTSKTGARLPIGRHGEGTQSLAVMFLFDAFLRNRLQSTYDEQASPILALEEPEAHLHPSAIRSIASLLKEMKGQKIVATHSGDLVSGVDLFSLRRLCRKNGEIKAFQLSKGILTDNELDKLNYQVRATRGELLFARCWLMVEGQTEFIVFNECARILGVDLYSEGVYCVEYSQYTPEGLLKFANALGIDWFFQADGDSAGQKYITKAQKYLNGKSEQHHILKLSKDTIEELFCTQGFECMFRKYIADEKQDIVTATADEPQYCKQLIKASKAEFKKAKAAIKILSEIEKEGEYAIPEEIKQIINQTVQIARQAS

SEQ ID NO: 65891 - protein, 184 aa, Candidatus Thiomargarita nelsonii
MSIDLSSLNENQRQAVEWDEGPLLLLAGPGSGKTRVLTYRIARLLEMSPNKHFNILGLTFTNKAAGEMRSRIEGLVSNARERTLLTTFHSFCAKILRQHGNHIGLHPDFTILSQDHDREAILHEAIKQTGEIETTAQRLLPFINGLLNNCVAIEEVESLLVKNNVDNTHKLAAIYRNYRQLLKK

SEQ ID NO: 65892 - protein, 583 aa, Candidatus Thiomargarita nelsonii
MSILIKTVRIAGFRCLKNIEVELEQTTILTGMNNSGKTSFLKALQLALGNRQFLSQDDFFIQGSQVSDQIIIDLLIIPVDDDGKRCENFSEDWEDQFTVDRTRIDDMGNNAFVPLRTIITFDAVKNNYKTQQFILESWPLLKPDNIEWFDVDNGEPIGFDFDEIQFFYMNAQRDILDDIKLRSSYLGKMLSKIEYSADTIETIEAQIKSLNETVVSSSKILSNIKTGLKELDTAMDTHSEGIEITPFTKKIRDLNKGLSIYYTDSQDSFSMEYHGMGTRSWSSLLTLKSFISLLSINAQKDQSVFFPILAIEEPEAHLHPNAQKKLYGQMDAIAGQKIISTHSPYIAATAKLGQIRNFYKDDIVTCGSIEVDRLTDEEIRKINRQVINTRGEIFFSKVIVFFEGETEEQALPILAQKYFNQTPVEMGLDFVGVGGYGNYLPFLHFAEALKIPWLIFSDAENDVKARVQSQFANCGSIKRDSECMVFLDANNDFEQQLISDGFTDEIKQAIIDQGVYHNEQHKQAKVQELRNYDDNQLYKTLTGSKTQYGPAIAEQIIRSDKDLPSKVIELFRKITTILTGEKT

SEQ ID NO: 65893 - protein, 606 aa, Candidatus Thiomargarita nelsonii
MTTQIKLSEIQEKIVFAENCAIYVKASAGSGKTRVLTERIRYLLSKTKKRILALTFTNQAGKEIKERLSDIPEIDQRVLVETFQSFCRSMLKNHGHLIGITKITPIFKDETDRLELIEPAIKQTLYAAEYKKLDKKEQRELCDKVSTFISLVKRKLIPDSELEKHLDEDVILMYHNYQDILHAQNAIDFDDLLYFAYKLLVNYPNLAALYRRSFFAICIDEAQDLNNAQYQFLVALANGEFTNIMMVGDPNQSVFHFNGSSPDYLDQHFVRDFNPVIVELKENYRFSKAILSAVKTVFPDAENIAGTVKEGIFEQPGLTDENDEAQWVVDKIKELIALKHHSDIEGDITYEKIAVLARNKYVFNALEAQLIENQLPFYYKIMPGAIQFESDLMKIFDLALRVKLNPQDSLHKNRLLQRLKIEATDNKIKLNKKLITLVAGLNDDGSNIKPELESFRDSLTIEDENEKQIIFNDINELLKHWHNYAKKTDKKSLHHFKNSMARGQTHPLASPSGITLSTVHTMKAQEFDIVFIIGMDDETFPDYRAVRNGGIEMTQEKNNLYVAFTRAKRFLYITWPQKRMMPWGDYKIRKISQFLKVFKQYGKKKQ

SEQ ID NO: 65894 - protein, 572 aa, Candidatus Thiomargarita nelsonii; identical to SEQ ID NO: 65890

SEQ ID NO: 65895 - protein, 637 aa, Candidatus Thiomargarita nelsonii
MSIDLSSLNENQRQAVEWDEGPLLLLAGPGSGKTRVLTYRIARLLEMSPNKHFNILGLTFTNKAAGEMRSRIEGLVSNARERTLLTTFHSFCAKILRQHGNHIGLHPDFTILSQDHDREAILHEAIKQTGEIETTAQRLLPFINGLLNNCVAIEEVESLLVKNNVDNTHKLAAIYRNYRQLLKKTNSLDFASIILEALELLTNKPAIRKQIPRIYTHICVDEFQDTNMAQYKVLKQLVHPDSPNLFIVADDDQIIYQWNGASPERLNELRQDFEIKEIQLPENYRCPAEVIEIANRLIVNNLSRSQNKQKLRSAKVARNTSLRIKHFATFDEERDWVAKDISSRPESERIETVVLARTRKLLDGVVQALQNNGLNGYVPIRKDDFQSAPMQWLHAILRLANSRQDREQLRRICQAFYRLEGINLNVDEIISNAAISEGDYLRSWRDMVLKRHSELSAPCLKIVTEDVSKLLDYMNFLNLLKNAFDWFNKFNAEEPFNDYQQEKSVWENIYTNIKSNYGEEQLSLHLLLQELDLNSKTPEPPKNAIRCYTIHAAKGLEFKHVYLIGLVEEQLPSWGAVKKGNNSPEIEEERRNCFVAITRAEISLTLSYADNYFRWTKKPSRFLQEMGLILCQKSSTT

SEQ ID NO: 65896 - protein, 615 aa, Paenibacillus polymyxa
MFLLEVRITNFRKFGQGTNGEPGLVLVLNKGLNVLIGENDAGKSAVIDAIKFVLLTQSREYSRLEKDDFHADSNELKIECIFKGFSVNQAKDFLEWITIDSDKQYSLRVFLTAKKDVKGKILIDDVHAGSDSEGQILHSKARDLLRTIYLKPLRDAENELAAKRNSRLSQILYSHPEFSTGEDHRLVEIIKEANQKIKRYFDYDELTSEEKKILKSINFYLSKFSDNKNLLSSNIEIAAVNLKMILEKIDLLLVTTKSGLGSLNQLYIAAELLLLQIEKTEGINLALIEEIEAHLHPQAQIRVIDYLQELSESSTSPMQILLTTHSVTLASVIKLNNLILFAEGKSFSLAEGNTKLHNGDYRFLERFLDSTKANFFFAKGVMIVEGDAENLLLPTLADKLGKSFAKNGVSIVNVGSTALFRYSKIFIRELGPIMQLPVAIVTDCDEPVSKIDKESGGIVMLPARKPKKIKSEKKVKYSDQNVKAYISHEWTLEFDLACSCLKKELFASILMARDYANQDKELTEGRAAKTYKEIGDYLKEAETQISGWSTYEPFMLASNIVRDVVLKKNISKAVVAQCFSEILNERSFTLEELEDIRSDSYLKYLVDAIDYVTGA

SEQ ID NO: 65897 - protein, 656 aa, Paenibacillus polymyxa; identical to SEQ ID NO: 65143

SEQ ID NO: 65898 - protein, 634 aa, Pseudomonas aeruginosa WS394; identical to SEQ ID NO: 63582

SEQ ID NO: 65899 - protein, 516 aa, Pseudomonas aeruginosa WS394; identical to SEQ ID NO: 64587

SEQ ID NO: 65900 - protein, 761 aa, Halobacillus sp. BBL2006
MQIKYVDIQNFRKLKSCRIEFADEKTVLVGANNSGKTTAMDALKKFLIKGLQRSFSTTDFTLSNWIEINKIGDRWEEGVEDKSGPTLSIDDWEEFLPSLDLWLKVEENELHHVTHLIPSLNWDSGYVGVRIRLEPKDLKSLFKGYTSARMAAKEAIQNRENKGPDSDLFELSPQNMRSFLEENLLKYFVIRSYTLDSNKLSTEHTTPQILGPEIEPTDGNPLTGLIRIDYISAQRGFTDPDNKSPYLDDDNNYASGGKSLSSQLRTYYNTHLNPEKLPDASDIGALEAIHNAQRVFDLKLKEDFKDAIQELETLGYPGFSNPKITISTQVKPMNNLDHKSAVQYDLLSSSNADSNIPMRLPESHNGLGYQNLISMVFKLMSFRDDWMQVGKVAKEQSSSKEDYITPPLHLVFIEEPEAHLHAQVQQVFIRKAYEVLRSHKDLGTSRNFTTQMVVSTHSSHIAHETEFSSLRYFKKQVSHKSSIPISTVENLSEVFGRNEATNRFVTRYIKSVHCDLFFADAVILVEGPAERMLVPQFIENDSNQLYESYISILEIGGSHAHRLQSLIEKLGIHCLIITDLDCISPISKKAIYPERNKGYLTDNYTLKNWLPKLTKIDDLLNLDSDKKVLENNGQFIRVAYQTPMECSGQEALATTFEDALAFENIDFFQNNEGIGLLRKFKESIDSLNGKTDNKLLSEKFFNSLRETPKKAEFALDIIYSDDFERIKTPGYITEGLKWLEEKVSFRNEHLSISEKEYEVIK

SEQ ID NO: 65901 - protein, 616 aa, Halobacillus sp. BBL2006
MNIQEYEASVNNQIMNCLDPDNLKSFFLFAGAGSGKTRSLVQVLDQFKFHYGNSFRIQGRKVAVITYTNAARDEIERRLQYDPLFYVSTIHSFIWGIIKPFQIDIKKWLINSLSNNLQELSDKLQKGRIRNPEKLKAEISSKERRLEHVTNTNQFIYSPDGDNQRFNSINHSEVIKIGQQFLMENALMQKILKNKYPVLLIDESQDTSKYLIEALFEMQEKHKGSFSLGLFGDTMQRIYSDGKHDLGSNLPDDWITPVKEINHRCPTRIIKLINKIREPVDNQDQVPGENNNKGIVRMFLCPSDSSKELMEEEVARIMSELTKDGSWSCDAFDYKTLILEHHMAANRLGFSDLFQTLYSVKGLQNGVLDGNLPELSLFTKRILPIIRSNILQDDYTVTKIVNKYSPLLDRKHFNNKENQVENLKLAKQGVEDLLSLWTNDKEPIIEEVIQSIYNSGLFTIPEKFKLLIEEEISQPDGKDKFSDELDAWKDFIKIPFSQIEAYDTYIKGDAKFETHQGVKGLEYPRIMVVIDDEESRGFMFSYEKLFGAKKKTATDLRNEAEGKDSSVERTRRLFYVTCSRAQESLAIVAYSDKSELIKTHLLEENWLDEDEIIIMS

SEQ ID NO: 65902 - protein, 768 aa, Vibrio parahaemolyticus
MPDIPTGTEVSKGIKLRFVELSNFRRLGKVQLNIDEKTTILVGANNSGKTSILAALRHFLADGSPFSAFDISISKWSKLRALGKVWEELIEDPLTVTEPEEKWKDQLQILLETMPVLDLWFDADVGMYHYVAPFLSKFSWKGGAVGIRLRLEPVTNIEELKQLAWTYCSARSPVKDMGQDSLAWPIDLLDFFLREPLKLGRVRAYKLDTDNNPITELVSYETQALDVQTSPIDRKHLSRLIRVDFIAAQRGFGSEETESRPSSALQRVGMFSNQLIKFAQQHLNVASSGHSQRVDLIKAVALAQKELDSKIQEAIADSVQEVQELGYPGLHDPQEIRFRTRIQTADLLDHSTAVQYSMQKDSIEELLPEYSIGLGYQNLQSLSYQLVSFRSARLKPEKGSPVPVHIVMIEEPEAHLHVQVQRIFPSKAHKLISPTEKEASSLNSQLIISTHSSHLAHSENFDRLRYVRRVAKSDTIPMPTTEVVNLAEVFGDDTKTRQFAERYFRVQHTDLLFANAAIFVEGVAERMLVPLFIERYFNELNSRYVSFVDIGGSHAHRLKPLIEKLRIPTVIITDIDPCEEKEGKPKKNGDPTKKLVAVANTGQPELQCGNPTLRGWHPKLQQLDDFKTPTEGQLVWNEIEDCHVYFAWQLPIAKANNCWPSTFEDSLVLTNVSWFKGLMDEKFDEDGVEIEVPKGALGSVAKKAVEAEDFQQLLSELHSLMHSSFNKGDFSASIFELVSSGEDIECPGYIANALTWLQKQLEPSGVME

SEQ ID NO: 65903 - protein, 651 aa, Vibrio parahaemolyticus
MSKQSIITDNDRDAGVVEEICGYLTEVPPRSYFLFAGAGSGKTRTLVEVLRRITGVVKHEKGELLARNLRLYGRSIRVITYTKNAVGVINGRLGENGLVKVSTIHAFCWELISGFNDDIKTALIAIKEAQLEKETEEALAKPKGITPAKQRDLDEIREDIEGFRNTDLFIYHPDRMTYGLGALTHNHVLDVTAWLLKNRPTLTRILKDQHPIVLIDESQDTMKGMLDALLTIAEPRGSGLTIGLLGDHRQRIYMDGHADLPSLVPDSWAMPELKMNHRSQRRIVDLINTIWEAKLEGRTQPANGIRQHSRTEKAGGFVRIYIGDTKISPEDKAIGERWCAAQMCSASGVEAWSKGEFQLLALEHKLVATRGSFLDIFSAMVLLDPNAAAPSGSGENKGPAIVQALLNEITDLEGCINPNGTIDEFKVTEVFRRYDCLDGIPEDTVERAKRVEEILRAIETFAAACARPLATVGEVIEPILSAKLFNVDTRLAVGYADKSPSPSVPARGEEESKQDRLRRGLCALFSAPWNQLKKYCNYLSGNSVLATHQVVKGSEFPHVMVVMDDKLAGGHLFCYDKIFGGVNLSKSDSENINKGKETTIDRTLRLLYVTCSRAEDSLALVLWSSDPTAALERVKNSGWFNGNEVEAIPSP

SEQ ID NO: 65904 - protein, 595 aa, Xanthomonas axonopodis pv. phaseoli
MRISRIRLINFANFSDIDIETGESIVIVGENKVGKSNFIRGLQLILDPGLSERDRQLGLEHFWDGLGEDKVGETVEVSVDLTDFTDDPRLMAHLNDCVIDPGPPMVARLTYRFQPKTGLGHAPESLKDYEYVIFGGDDPDMRIGGALRRMLPIDVQVALRDAEKDLASWRNSPLRPLIEDLAASLNDDTREEIQNQVDQAQRELAGHEEVVATAERISERLIAIAGEQHAVPMSLGLAPTRVDALLRSLRLLIDNGVRGVGDASLGTANLIFLALKSLELDRLVSDGERDHTFFVVEEPEAHLHPHVQRLIYRYFLGTGAEDGDEQPPLTTILTTHSPHIASVAPIRSIVLLRHDAAEGKTVAVSTANAPFTQRDEEDLQRYIDVTRGEIFFSRGVILVEGDAERFIVPAFAEVLNIPLDMLGITVCSVGGTNFTPYVKLLGPEGLNIPHVILTDRDPTNGNHPLVRRRLINVLDVIEGGVDHEELDADEVIELAEQYGYFVNENTLEPELFAGGLAEDMQEVIREELPRLRRETLNALQQWVDDPAQIDEDWLLRLIERIGKGRFAQALAPSVSEDVCPAYIRSALEHIRDAIA

SEQ ID NO: 65905 - protein, 445 aa, Xanthomonas axonopodis pv. phaseoli
MLNRNSVAWRSEEELAAWAEAYEAGLRDEGLIDYDDMVVFGQRLIADNDWVLPLVQAKFPVLVVDEYQDLGVALHRIVKRLAFDGGVRLFAVGDADQSIYGFTGADGALLMELAARSDIEPVQLQLNYRSGAGIVTASEMALGEARGYQASDPARQTTIEFLLRPRGMADQAAHAVAQIIPAALASKPGRTLGDIAILYKDYRAGDIVAEAVATGGLDYIRVDTAAPYRKVALTSWVEDCAAWCGGGWRVGRPQLRGLLDRYRAFHRASLDDAQARREEQALTALLWELRADQQPAREFVASLRDGVVDHLLAVELALADQEEQLDRMTAALAEGGALASLDITSLGGRDGSPDHLNLLTLHSAKGCEYDVVIMVGLDLGNLPWRNESPEKLRESRRLFYVGLTRARDEVHMLYSGFVDGRYGPMRLGRSPFLDELEARMRAAGI

SEQ ID NO: 65906 - protein, 595 aa, Xanthomonas fuscans subsp. fuscans; identical to SEQ ID NO: 65904

SEQ ID NO: 65907 - protein, 604 aa, Xanthomonas fuscans subsp. fuscans
MPSRSVSTAYLAQAVELAGNPGQLAAYNSQGHCVVLAGPGSGKTKTLVLKLARILAEDVESPRGAACITYSQECARELTRRIEALGLRQAPNLFIGTVHGFCLRHLLIPYGRLAGLPIPFPLSVATQRVSDRLLKQTGDALFGQNHPYKVIDLGRHRRSVLNRNSVAWRSEEELAAWAEAYEAGLRDEGLIDYDDMVVFGQRLIADNDWVLPLVQAKFPVLVVDEYQDLGVALHRIVKRLAFDGGVRLFAVGDADQSIYGFTGADGALLMELAARSDIEPVQLQLNYRSGAGIVTASEMALGEARGYQASDPARQTTIEFLLRPRGMADQAAHAVAQIIPAALASKPGRTLGDIAILYKDYRAGDIVAEAVATGGLDYIRVDTAAPYRKVALTSWVEDCAAWCGGGWRVGRPQLRGLLDRYRAFHRASLDDAQARREEQALTALLWELRADQQPAREFVASLRDGVVDHLLAVELALADQEEQLDRMTAALAEGGALASLDITSLGGRDGSPDHLNLLTLHSAKGCEYDVVIMVGLDLGNLPWRNESPEKLRESRRLFYVGLTRARDEVHMLYSGFVDGRYGPMRLGRSPFLDELEARMRAAGI

SEQ ID NO: 65908 - protein, 682 aa, Bacillus okhensis
MYISRVEIKNYKNFKANIIEFNEGLNVIIGHNNAGKSNLLRAMALIYNPSVKKNLSIDDFNKQLTLEELKKQPPRINVSITLSQEKEENLMGDDLVVVSQWLTKLEEPYEAKIHYEFCLPLKHQDEYEQKLSTATSVNDAWEIIDRNFLRFYTYKIYGGNLENQITVDSEYMKKFDFQFLDAIRDVERDMFSGRNTLLKNVLDFFMDYSIKSNQGLDDDEKEQQIKEEKKKFEDQAKVLMDSLNQRMLEGKKQILSYSKEIGASFDNAEPNFAGGITDVELYSALKLIVEHHDGIQLPITHNGLGYNNLIFMSLLLAKMQVNASETYLGSNAKVFPMLVIEEPEAHLHPSMQKQLLKFLKKNLAEKKVRQIFVTTHSTHITGALELDELICLYKGENETKVSYPGKVFGTNVESKKYVQRFLDATKSNMLFAEKLILVEGLAEQLLMSIFAEYLGKFLEDEHVAVINVGGKYFDHFLKLFNSNNSAAINRKVVCITDRDPVRKERLIEGESYTKCYPFEMNIEADKYEYKISKQDVDYSTNIKFYFQDELKGKTLEYDLVRFNPMLKMLVTDSMSNKEEIKALMKLFQEGKDIDKLYSRLSKSKENTRIIDGLKHEELSWSEDDKKIALIAARYLNSVGKGVNALELAYALQENLAKRGSEDFVEFVVPDYIQEAIDWVCEN

SEQ ID NO: 65909 - protein, 579 aa, Bacillus okhensis
MITITSSDLIDIEQHFKITAGPGAGKTHWLVNHIINTVKNSARLEKTRKIACITYTNIAVETILKRLGAGVTDRVEVSTIHSFLYKHVVKPYLHYLSDEFEINVSKVNGHDTYGPRYSIVKNWLENHKRVDELTHPNSYKQLLFGQKLDSLFIWLNNLQYMYDSDGNLKLVGNQEKVGGVRKVTDILADDLISYKKIFWSSGKVDHDDVLFFSYLLITRHPFILNVLRAKFPYFFLDEVQDTNPIQAKIIKLIAKEETIVGIIGDPAQSIFAFQGASIDEFINFKLENMVEYQILENRRSSNQIIDLLNEVRKDIAQSKYKNVDGELPILFIGDTVDAYKKVKELCGEGSSIHTLSRDNPTANAMKSLVALNGIDTKLLKKFKEADSNKDRPRIILNSIEAVEFARIGDYKNALEKMKVLFTDCPEKDRVNNSIKLLQELLTKYDSYNETSLIAFYTVIKSHIPMSTFKAGAAKDFYDGITYTQLAICINYKEDTSQHRTIHKAKGDEFENVLLIPSSLDFLLNPDLENEEDRVYYVGLSRAINRLYIVFSKLTKKNQKFIEEQYNIKVEDLTKVHHLI

SEQ ID NO: 65910 - protein, 771 aa, Klebsiella pneumoniae; identical to SEQ ID NO: 64244

SEQ ID NO: 65911 - protein, 625 aa, Klebsiella pneumoniae; identical to SEQ ID NO: 64245

SEQ ID NO: 65912 - protein, 594 aa, Klebsiella pneumoniae; identical to SEQ ID NO: 63538

SEQ ID NO: 65913 - protein, 605 aa, Klebsiella pneumoniae; identical to SEQ ID NO: 63965

SEQ ID NO: 65914 - protein, 738 aa, Vibrio vulnificus
MHISSLNLINYRNFKNVKLNFNKGINTVIGENASGKTNLFRALRLLLDNSMPRSSTKLSESDFCRALGSWKGHWIIISCEFDDISSDEASQSLFLHGNGNIEGEEEIVTKATYNLIFRPKAHIRQAISTIPVGDTTALEEYLNDISIDDYETVLTGKSTANFADPEVYKAIVGDFDAVAFPNELNNPEIGIRLPYILNMPNEVSFTFIKALRDVVSDFHNNRTNPLLTLLKNKSGEISQEDFQPIAELIGTLNENIEGLNDVCDVRDDIASTVGDTVGDTYSPSSISIRSSLTDDSDQLFQSLKLFVAESNDGYEGAIHEMSLGGANLLYLTLKILEFKYQKSNQSIANFLLIEEPEAHIHTHIQKSLFDNIKYENTQIIYSTHSSHISEVSNIRNMNIIGLVDGNCEVFQPAKGLTNEQSGFVQRYLDAIRSNLLFARSVILVEGDAEEILIPVLFKKSTGISLDEMGISLVNIRSTGFENIAMLFNDERIRKRCSIITDLDSAFFDTEIQEHDSEALKKKKRKAKGSEESGANRKLILDEFCDNNPWLSPFYAEHTFEVDFIKSSNSVYLKNVVEDVYVDPATRVTAKEDLSNADIATSGMRALTMANHQGKGWFAITLGKAINFKVVIPEYILEAIKFAHGEFDPVLTFKILSYRFNSIKEHVAEGKKHMEKADADGDMDLKARCEAYLLPLETGIEVFAPKWDVFDSANDDINDIKASFIADFPTENHHLLERI

SEQ ID NO: 65915 - protein, 598 aa, Vibrio vulnificus
MFVWDKDDLNDEQVDAIRQAGNVFLEACPGSGKTRTLTYKIALELSKLTDEKKWIVAITYTNRAADEIRERIELLGVETSQLWIGTIHSFCLEWIIKPYGIYHDKLKNGFKVINSYDSEDIITNICLGLRPQQYITYYQCSHFYTPTGLNITGSGGSLATSVLEAYHQHLDNNHQIDFEQILYFSYELLRNKVAISKILSNLFSYFFIDEYQDTKEIQYSIVASIMRANPSKVTTFIVGDPNQAIYTSLGGYAISHTELESLTAASFTPMSLDKNYRSSRKIIEYYRNYNVSPSTTSAEGRERDYQSTITYDQLTHKDDLVEQVSRYIEHNIENCNIPERDICVIAPWWTHLAALTRNLVNRLPQYSFDGPGLVPFSRDLENFWYKLTRIILTEPSPSMYVKRLRWASEILYDLEIAMVDIAPFTSKELLKSINSISIDEEDGITYLCSFFDELFKRLGVDYSLYPMLQEHYESFLSSTEDRIDRLRRDSEEFATDIEAFRRAFKPRSGIKVSTIHGVKGGEYDAVISFGLLEGLVPNFNDSSEESAKKLLYVIGSRARKNLHLISERGRMQGYSPNQTERTSTEVLQRVQFPYDRFV

SEQ ID NO: 65916 - protein, 738 aa, Vibrio vulnificus; identical to SEQ ID NO: 65914

SEQ ID NO: 65917 - protein, 598 aa, Vibrio vulnificus; identical to SEQ ID NO: 65915

SEQ ID NO: 65918 - protein, 733 aa, Clostridium botulinum 202F
MKIAFVDIQNFRKLKKCHIDFSKETTLFVGANNSGKTSAMDALGKFLAKRSFVFNDITLSNHEAINNIGVEWEKEEALLPDTIVLWEDIVPILDIWLSVANNELQYVSHIIPTLDWKGGILGIRFILKPKDISKLFEEYREVYFAARTTESKNTTKVLSLWPKNLCDFIEKRFASIFVLKAYILDPSKVNNKIPQNTDFQMECFEQNPLNGLIRIDMVGAQRGFADPGSEENGEKSIHSGGLSAQLRDYYDKHLDPEKPPTPEDFEVLQAIDSAKTIFNQNLKSKFNTAIEELEALGYPGVNDPQITIETKVNASETLNHDSAVQYSLGSDHNNDLKLPEKYNGLGYQNLVSMVFLLMRFRDDWMQVGKAKKTKEFQGKKMPPLHLVLLEEPEAHLHVQVQQVFIKKAYGVLRNNSFLKKHQDFSTQLVISSHSSNITHEMNFSDLRYFKRLQATEDCKVPTSEVVNLTDVFGKDDETNRFVTRYLKSTHCDLFFADALILVEGSAESMLIPHFIKKKYHELNQRYISILEINGRHSHRLKPLIEKLCLLTLAITDIDPADEEGYHKAQCPERNKGFISSNYAVTSWLLNEKSLDVLLDLPTNKKVVNFNCPYDYSIAIAYQTPQKILFDSKEVEALSSTFEDSLIYANLELFKNHNGDGIFQIANSVINNSKTFEELHLALYSKLREGSAGKAGFALDLIYSIEPEELIVPPYIDEGLNWLQEQLKQEVSNC

SEQ ID NO: 65919 - protein, 617 aa, Clostridium botulinum 202F
MDKKEYIGDDHIDDHVDEEIKKCFEKKNKKSFFTFAGAGSGKTKSLVNILTYIEEMYGYELLTYSRQVAVITYTNAACEEILNRIDFKSVFAVSTIHSFLWELIKNQQRDIKKWVKKNTETEILDLESQQLRGRASATSDNRAKKIKSKKERLLKIDMVKNFSYNPNGNNFRYDYLSHAEVIKMGSEFIAKSDTMQNILINKYPILLIDESQDTKKELIDALLSLYERHKSEIVIGMFGDTMQKVYTDGKDDLALCIPDDWVKPVKVMNHRSSKRIIKLANEIRKSFDDKMQSSRSDAIEGNAYLFIADSKSDKSKIESLVADSMYELTNDDKWLEPTECKTLILEHHMAGSRLGFYELFKTLYSVNSLKTGILDGTLPEIQLFINKVLPLISAYKRGEKFQVAKIIKQYSPLVNKKAFGESTKEPLLCLNNAYQSVNKLCELWDDGKIPTCLEVIANIESSGLFEIPNRLQGIADIKSNENIDEITNSLITSFSSSFSQIEAYAAYVNDETAFATHQGVKGLEFPRVVVVMDDEEAQGFLFSYEKLFGAKEKTNTDMKNEREGKDTSIARTKRLFYVACTRAKQSLAIIAYTHDCNAVKQTAIENSWFLEKEITIL

SEQ ID NO: 65920 - protein, 738 aa, Escherichia coli
MFIKKLTLVNYRNFKKANFYFDKGINTIIGENASGKTNLFRAIRLLLDSSMPRYSLKLNEGDFNRSIGNWRGHWIIISVEFDDIAADETSQSLFLHGIGNAEDEIVSRATYSLIFRPKSFIRQDLSKINPGDINALNEVLNNITIDDYETILVGKGALDLSDSSNYKKIVGDFDGVSFPKILNHPELGVKLPNILNIPNEVSLTFIKALRDVVSDFHNNKTNPLLTLLKRKSGEISSTDFKPIADLVRSLNSEIEQFPDICTVSSDIATTIKDAVGDTYSPKGMSIKSSLSDESDELFQSLKLFVAESVDGYEGAIHEMSLGGANLLYLTLKLLEFKYQHANQSIANFLLIEEPEAHIHTHIQKSLFENIKYDNTQIIYSTHSSNISEISNIKNMNIIGFVNGNCEVFQPSTGLADEQCEFIQRYLDAIRSNLLFARSVVLVEGDAEELLIPTLIKKVTGLSLDEIGISLINIRSTGFENVALLFSDERIKKKCSIITDLDEAFFDITIPEDADNNDVEIKTKKKAAASQKSGAERKKRLQDFCNNNDWVEVFFADHTFEVDFIKSGNSNYLANIVRDIYKQEAIITNSINELNSGDIKISGVRALAMANYQGKGWFALTLGKVIDFKTAIPDYILNAIQFAHGDFNRQLKYKVLEHRYNSVIKHVAYAQLQISKLNEAKDLVLKNSWIKYIKAYEDGLSVFSPKWDLFDISKDDIDILKAEMMKDLPIENNDILGRL

SEQ ID NO: 65921 - protein, 595 aa, Escherichia coli
MFVWEKEEINKDQEDAINAQGSVLLIACPGSGKTRTLTYKIALELSKLNDDKKFVLAITYTHKAADEIKERIELLGVDTSRLWIGTIHSFCYEWLLKPYSIYHENLRDGFKILNTYDSEALITTICSNYKTEKVNYYDCNHYYTSKGLKLSGYIKKHGAIKNILDEYHIQLRKNNQIDFEQMLYFSYQLISKDAISKILSGVFSYIFIDEFQDTKEIQYAIVAKIIQSSEGTINAFVVGDPNQAIYGSLGGYAISQAELEKITNSRFSYMTLDKNYRSSKRIIDFYINFNVLASKTTSESKFQNYQSVVTYNQQVYKDNLVEHISKYIEYNVNQLGIEQKEICILAPWWMHLAALTRTLVTRLPNFSFDGPGLVPFSRDIDNFWYKITQVILTEPSPNMYVKRMRWVSDILSEMHFCHVDIQRLNPRLFLNIINDIKVDEVDGLIYLRKFFDELFRRINVDISSYPQLQEHYDSFFKSSQDRIHRLKKDNEHFATDINAFRNAFKPRTGIKVSTIHGVKGGEYDTVISFGLLQDMVPNFNDSSDESAKKLLYVIGSRARKNLHLISERGRRSKYKDYESTKVLSGTKFNYDADPF

SEQ ID NO: 65922 - protein, 712 aa, Escherichia coli; identical to SEQ ID NO: 63944

SEQ ID NO: 65923 - protein, 593 aa, Escherichia coli; identical to SEQ ID NO: 63945

SEQ ID NO: 65924 - protein, 573 aa, Aureimonas altamirensis
MIAFPELDADGASGAAIPEFFHQMAAEEAGKLKCRLRLEATWTDDGSLDGAIEQKYWAVRTFGAFTDADCTELKAADRARIQMIYVPATRDGASQVTAFLRGRLWRAINWSQGVRDTFTNTGAALNGAFAGEPAVDVIAAAVTRRWQEVYTAGTDTTPVFRPLDLRFEHFIRKVEVVFRPDEVGRERALDDLSDGQRSLFHLAMTAATLDVEAGIVADPAGAGFQAGGVPLPALTLIAIEEPENNLAPFYLSRIVRQIQDLTKSPQAQAVVSSHSPSILARVDPTQVRHFRLDPHDRTTRIRPINLPVGEEEASKFIREAVRTYPELYFARFVVLGEGASEEVVLPRLAEAMGLDIDRSFVAVVPLGGRHVNHLWRLLTDLDIPFATLLDLDWGRSGGGWGRIKTACAQLLANNVTPQAIFGQHLNPQGPAANLAAFDALPIEDTANITNWMNWLRQFNVFFCTPLDLDYSMLKALPLAYQIVEPGRQGPSPAGEPRTAVLGEDGLPHLYAADQDVLMRWYRYLFLGRGKPSTHVRVLSAQDPAALAAAAPEELRALLTSIVARLTPPPPASA

SEQ ID NO: 65925 - protein, 627 aa, Aureimonas altamirensis
MRLIRPEDWRPSGIDDLEPAAWNALRHAGSASVVAGPGAGKTEFLAQRADYLLETGLCRAPHRVLAISFKTDAANNLASRVRQRCPPEFAHRFVSVTFDAFTKSLVDRFLNAIPADWRPTRPYEIAFPKRKAVEDFLTLARLSAPPQWQAEIASYSASDFEAKIVGSYRLPVGPIAPQSAAEFAIARWWATQLPPGQPSLLTFVGINRLAELLLRANPHIRRALIATYPFVFVDEFQDTTYAQYDFLHSAFSGGQTIITGVGDDKQRIMVFAGARKDAFQRLQADFGGTRFPLLFNFRSSPDLVAIQHVVARALDPNTVPTVAQTARQVDGDVAQVWSSQTKVAEATHLAQWIANDMATRSRAPRDYALLVKQKSDDYEHELAGAFTAHGLRIRNESHTLGKTSLQDLLSDDLSRLAIAIFRLGATRRAPAVWQVVSSSVLALRATGQDDDARAAKVEAELSAFLTALRTDMAATAPSRQSAVDFVRRVFGYLDLGAIARTYAEYGVGDLLEIILEAFCIHFFASADGAPNWTACLDAFEGVNQIPMMTVHKSKGLEYDTIIFVGLDDRAWWAHTPGDPEGVAAFFVALSRAKQRAIFAFCQQRGQRNNVAELYQLLTEAGVPEIAI

SEQ ID NO: 65926 - protein, 749 aa, Burkholderia glumae
MKIKTIKIKNFRLLHNISLQLEDETTVVVGRNNCGKTSLTDIIRKFLSERSTFEIADFSSACYDKFCAAHRAHLKGAGDEEVRVIVPSIELRLHVSFDPTVPEFGPLREFVIDTDDNCTEAVIVCSRSLADGRIADLFEGHEETVLHGTDESHSAGDRLALFRSLADRVPTLFTTRIWAEDPQDPTNTRDVTPKAVTNLLSLGFVNAQRALDSTGGRDTDVLAKVLEGLFQSASVSTADGSQKNIADGLKKAVEEIQSGMDTDFKNELAKLMPAIEQFGYPGLDNVPLQPETKLEVGKLLSNFTKVQYAGYSGVQLPESYNGLGYRNLLYILLKIVGFFREYRAHVNAPGLQLIVIEEPEAHLHPQMQEVFIRQLPEIVKKLCALEGENVSWPVQFVVSTHSPHVANEARFDTIRYFAVTSTDLPVGVRCTQVKDLSSDLAGLKGPTSDFLHQYLTLTRCDLFFADKAILIEGTTERLMLPQVIRALDAADPSLKLRSQYITIMEVGGAYAQLFIPLLKFLGLRSLIITDLDAVKRNAKKKLEACLVHEGETTSNSCIKHWFSSAEAAAPEPNAPADKPATMPVTTPQAASTGPVPATAGVTDDDDEEEVADGATLFPLSTALAADNAAKTRGSLRLAYQVPEAADGPCGRTFEDAFILANQTFFGITGATNDALAKAAQNKAAKQKKSKFALTYAIEKTDWVTPRYIEESVRWLAASNTAVADPGVALAAEAQAANALVDKPTSGDAT

SEQ ID NO: 65927 - protein, 579 aa, Burkholderia glumae
MNENTRPNPAEAAAATAWEALKDCLDGGSSFVFEAGAGAGKTYSLIAALRYLLQGRTRELQRRHQQVACVTYTNVARDMIIAQTDGNPAIYCDTTHAFAWMLVSPFQKRLRELVRTLPGWADRVEELDAANITAVGYALGRRSIEDGTANLHHDDIFPVFIELMRSAKFRNAAASRFPIILVDEYQDTNAKLVECLKDQFIGKPYAPQFGFFGDHWQKIYGDGCGSITHDALKRIDKKANFRSAKPIVDSLNLIRPELAQAVKDPAAPGEVHVFHTNGWGGKRLTANHWQGDLPATEAAQALRNVRAELESVGWDFAGDTKVLMLTHRALATEMGYGSMRTVFAFNDSFTRKANEVIAYFHEHLEPAARAYLSKRFGKMFEAFDAERPVMNSPADKVRWTNAMRRLCELRDTGTVGDVIAHLSSTGLPILSDAVVRQERALADALAGGEPLTGRVKELHALHAVSYQEIIALCKYLDGHSPFETKHGVKGDQFENVLVVFGRGWNEYDFNLYLKMAGNPSLIGTRTADYERYRNLFYVAVSRPKRRLALVFTHRLEPSAMATLSKWFTGYPIRDIGPAL

SEQ ID NO: 65928 - protein, 630 aa, Pseudomonas sp. SHC52
MYLAELTIKNFRKLRDAKLKFQPGLNVLVGPNNVGKSAVVDALRTLLAGHDEPYPRLDIADRHRPLEGEPAGDISFHFVFRDLSHDDEADFIAALKPAADKTMEAHIHVRYTDADQTGRFRVKRWCGDHLDVTLTSDMMENLRGVYLQPLRDAAQGLRPSRNSQLAHLLHMLTDEPGRDAINQALKELDDKLQQTEAIQNTHSAISSRHGLMMGDQLAQTLAVGLSATDFQRLSARLSLTAQAMEIEQNGLGFNNLIFMAVVLSELAKNPDAAYRSLIVEEPEAHLHPQLQRVLLRYLAGLPTSEGEKAVQLFVTSHSPNFASNSKLESLVCLVENDAGVETFFPRDIKFGKGKREKLERYLDVTRAELFFARRVIFVEGAAELMLVDALATLMGLDLREFGVSLISVEGLNFDSFLPLFGENGLRIPVAVVTDADPFDEEEAHELAEVALDAGNIEDILAEAAYLEETDVPVGDDDADDPLAEPAKKKKKLKRKEVYPSLGDEVRLSSNTVKMKESEDAFVKVFHGLKTLEYDLALLEANRDPMLKALADPHPIISAALRKIVDAQPDNTAKAKALFCGMFERKASSGNLQKGRFAQALAEQISSTATCEVPDYLRKAIEHVCQGAIKP

SEQ ID NO: 65929 - protein, 571 aa, Pseudomonas sp. SHC52
MKLSDEQKEIINAPLGPIAVTACAGSGKTATAIRRLIAVRQKMENSRGRVVLLSFSNVAVNTFNKGYAQLASNLPDDANRKRVEVDTLDGFFTQHVLRPHAHRTMSSDQAAYLLSGTEPFLASFRYWPEEGRPTPIKDVKVGLEHGSFYFFTGTHDDLVKLDTVIASDTIKRLGRIGAYTHELGRYWVYRTLVGQPAVLRALAARYPQILVDESQDLGTLHQAILELLIKAGVHVSLIGDVNQGIYGFAGADGSFLSNYYNRAGVKDFKLTRNYRSLPPIINIANLLCGREDEADREPENGGAYFVGYKDSELPKLFESFKAQIDDLGVRHEDAVILSRGADRAAVLSGKAAPPGQGTVALFTEAALIRDQQGRYQECFKLVCRAVVGLMDKPPLGLSTHLQGAPQDAWMLGLRRLLWSFIRDAESGLPSSTLLAKTEWHPKLVTNLKKLLSTTEGQFGLGAADRLGNKLAKTGLLDLPLTGAVDEKDREPGIRVETIHQVKGESIGAVLYVAKKPNIDALLAGTLTEEGRIGYVAVTRARNLFWLAVPLTCLKALRPNLIAAGFEEVPSH

SEQ ID NO: 65930 - protein, 527 aa, Listeria monocytogenes SHL010; identical to SEQ ID NO: 64370

SEQ ID NO: 65931 - protein, 791 aa, Listeria monocytogenes SHL010; identical to SEQ ID NO: 64371

SEQ ID NO: 65932 - protein, 784 aa, Pseudomonas sp. BICA1-14; identical to SEQ ID NO: 65258

SEQ ID NO: 65933 - protein, 650 aa, Pseudomonas sp. BICA1-14; identical to SEQ ID NO: 65259

SEQ ID NO: 65934 - protein, 688 aa, Pseudomonas sp. BICA1-14
MKLRHAKIKNFRLLTDVQLALEDLTTVVVGRNNSGKTSLSEIIRRLLAEGTAAFQLEDFSSACYDRFCAALEAHTNGQDDDVVRALVPFIELRLTFEYDPAQPQLGPLSPFVIDLNPDCNEAVVVVRYELKDGQLAQLFLGQPDTPLTDETRIAFFRSLRECIPINFAVRIWAEDPNDAENKRQLQPGALKALIKTGFINAQRGLDDITSRESDILAKTVELLFATASSSSADEADKHIAQALKEAVQDIQTQIDSSFGSQLNSLIPALKNFGYPGLGNQELHTETLLDVRKLLSNFTKVRYIGYSGVTLPESYNGLGARNLIFILLQLAGFYKSFLAEPSSPGVHLVFIEEPEAHLHPQMQEVFIRQLAKTAQLLVEATEGKTVWPVQFVVSTHSSHIANEAGFESIRYFLSGEVPGAAAGVRQTRIKDLRKGLDGVSEPDKKFLHQYLTLTRCDLFFADKAILVEGLSERLLLPAIIEKLEIAEPTRPKLSSQYVTTMEVGGAYAHLFFELLRFLELPTLILTDLDSVEEPGGSACEVHKGTYSSNACLKAWFSDDDPFTLNGLVTKDASEKAKHGNRIAYQCAEEEGGPCGRTFEDAFILTNRTLFDLKGATREELETEARSKASKIKKSEFALKYAIEEKSWTTPKYILEGVRWLSADIEPAVPDPALALVVEATIADEGGADD

SEQ ID NO: 65935 - protein, 579 aa, Pseudomonas sp. BICA1-14
MTNPQSPAEIASQRALDAMFSSLVAGEHFRLEAGAGAGKTYSLIKALHYLIERHKNMFPRRNQQIACITFTNVARDEIAARTDRSPMVYCDTNHAFCWSLISGFQKQLRGLVEAMPAWQERIAEAGGSLGSRVVEYSFGHRSIREDRVSLHHDDVLPLTVSLMESAKFRNIVTDRFPIILVDEYQDTDKDWIVAIQRLFLENPPSPLFGFFGDHWQKIYGNGCGRLEHQRVKEIGKEANFRSVKTIVDCLNRMRPELQQFVEDPTAVGQVSVFHTNAWTGERQTGAHWGGDLPSEVGHETLEQVKALLAQGGWDFSPESTKVLMLTHRLLASEQGYASLPAVFRYNESFAKKEHPHIAFFVDQLEPACDAFSASRFGAMFDALGGNTPLLRSRADKTAWHDAMSQLMVIRENGTVGEVVDHLLNLRKPRLPEAIERRERELREFDRTSGEEMPAALAEIEKLRAVRYAEIKALRGYLDGHSPFETKHGVKGAEFENVLVVIGRGWNQYNFGEMLELAGKSAIPPGKQATFERNRNLFYVACSRPKRRLALLFTQQLSSDALATLDRWFLPESIHAIAFS

SEQ ID NO: 65936 - protein, 601 aa, Novosphingobium malaysiense
MRLARIVIRNFRTFASLDVNVADDLCCVIGENNTGKTAILRAIQICLDNMLPSSFRSLQREDIHSAIDIAEPSQVLIGIELTGFEGRVNEEALVSTWKVAADRARIFYRFRPRPAVREQLASGDIAPGTLTLEDYYWEIRGGGDPAIDLTDITWNDEGIGESVRFADLQSYLLVHLPALRDVENDLRNPRQSPLIRLIEAFEIDAAEQDALIAILDHANQAITNSATIAEIAGAIDARFKEVSGPAFEMDATLGLSAATFRAIIRNLKVILSDLSLTSFEPGRNGLGMNNILYIAILMEYLQRRIALNRSAGQLILIEEPEAHLHPQLQFSLIAALRAIGVQAILTSHSTQVTSQVPLSSIVSLTKREDATIAAGNLALNAALTTPDIADLERYLDATKSALLYARKVMLVEGPAEMFLIPALIEQVYGVKLERLGISVIAIHGVHFDVYAKLFRAGSLEKKCAIVADADMKPSDAEDFDPETDAPDLVALESDFVSTFAGATTFERELVSVGRLPMLIETVRALGAPQILAQMENGHATLTLGGLGLAEETALRVELGRITLNTAKRFGKARFAQIAARYANLASDLPPYIEQAYEWLTE

SEQ ID NO: 65937 - protein, 587 aa, Novosphingobium malaysiense
MIRLTPEQREAVEHDGNLLLTACPGSGKTRVILAKLLTLADQVVGTPQFIGCITYTNAAVDEIEARLRTYGNNAIADHCEITTIHAFCLQFILRPYSWLIPEVPASFQVLSRENSLFEQIVTAVEDAFGRMPAGQVFENYEALRIDVNGEPCGQGIETGIVTDESAALYWERVRAHGYLDFAMILYFSWKILQQHPFVGRGIASRFAWLLIDEFQDTTDIQIAIFGALRHFLHTRFFLVGDQNQSIMRFAGARPELAEQFGDQIDAHRDTALTGNFRCGPAIVSTASTLIPTLPGMQSAGDAAQLAAQVNYVHVGRPIDAITDHFLPALQDAGIPLGKAAILAPWWTHLIPVARALREFDVPVFGPGARPYKRRRLLAGLAEQLGACAEAGNYLGLPGVERALFRLISDLTGNSRYDMFSYQGRRAALGLIYLARELAGRHPGGVAWLRAIAREAGDYLEHEEWLPNSAKQPLIDSAEEMLSDMQASKVDLANLLISEMGLFANPQHALKLITLHNSKGREFEGVAMICMNNGNIPHFSTSTQEAYDESRRLFYVGLTRAKRVLVVASDQSHWKNTPTPFIAEAGLG

SEQ ID NO: 65938 - protein, 613 aa, Xanthomonas campestris pv. cannabis
MRLSRIVVKNFRNFKFLDVRLGEHAVVLGENKVGKTNLLFALRLILDPSLPDSSRRLRLEDFWDGLPRPLKTEDVIEVSVEFRGFEDDENLLAVLADHLVRPDPMVARITYRYQPVPGLAGAPRSEADYEFIVFGGGRPDNAVGYDLRRWMPLDLFPALRDAESDLARWTRSPLRPLLDRAAKTVDAKALSAIAGEVHKTTSKIAALPELAGVVGQVNDQLTAMVGNKHAVETALGFAPTEPDRLIRALQMMIDGGKRGVAEASLGSANVLYLALKHLEHQYLVDEGERQHTFLAIEEPEAHLHPHLQRLIYRNYLQARDDAQAGPGPRSILLTTHSPNVASVAPLANVVVLRHIASEGHTVGRSLKGIKLDVSDREDLERYIDVTRGELFFSKGVILVEGDAEKFLLPTLAKLYDESLDFDALGITVCSIAGTNFAPYVQLLGPKGLDIPFVVLTDFDPKKEEASQEDADPDDAGVTDSYGKNRVVNQIMQHLLDSDVWDEANYAEVLKLAPQYGVFLNEFTFEIDVFKAGAEDHFLAAVKELTTNKKMHARFASLATDPDSLAPTQFLKDIDSIGKGRMAQRLAAVLMKEDVDVCPEYIESALSYLKAKLA

SEQ ID NO: 65939 - protein, 587 aa, Xanthomonas campestris pv. cannabis
MTSTAPPYLRAAEDLRGNEDQWRAYQSTGNCVILAGPGSGKTKTITVKLARMLTEDVHSPRRLACITYSNACVGELRSRLNKLGADDGDRLLLSTVHSFCLTELVSPYAALAGIDVPDPLIVASPAQARKYFADAYREQLGGNVPNWFRMACDKLRRTIPDKGSDEWRAWSARETAVVEAYEALLLQNGLIDFDGLVLAGLQLVEKHEWVRRAIQAKYPVVVIDEYQDLGLPLHRIVLALLRMGTRIVAVGDPDQSIYGFTGAKPSLLRALARLPRIESIRLKMNYRCADRIIAASMALLPEPAEFRSHDGRAGEILIHRLERNIREQADYALGTLVPALLASNPSWTPGDIALLYRSLNEGTLIAQAADALDLRYFRLDNGSPIKRTRLTEWLTDASRWCAGGWQTGTVPLSLLLKAWRRLRRSIPRDSELLSARKRLIAALFSLRDGALPLHRWLSALRREVLDELLQQEPSLADEKDNLDELMRAAAEGGPLQTFTVEIFGNQGKSPDQVNLMTLHSSKGLEFQAVIMVGLENGVFPSSYDKTDEQLAEAARLFYVGVTRAKTQIHLTYDDDESPLITSIREAG

SEQ ID NO: 65940 - protein, 613 aa, Xanthomonas campestris pv. cannabis; identical to SEQ ID NO: 65938

SEQ ID NO: 65941 - protein, 587 aa, Xanthomonas campestris pv. cannabis; identical to SEQ ID NO: 65939

SEQ ID NO: 65942 - protein, 762 aa, Xanthomonas vesicatoria
MKIRHIEIANFRKLQAVRVDLTDDTTLLVGANNSGKSSAMLALRRFLVSHKSTFRLLDFTLCHFPTIDAIGKEWEAALAGSQPPVVDPWMAMVPMLDLWLSAENGELHFVKDLIPSFSWRSGLVGVRFRLEPKDIVALYNDFRSERERVHALEAEAAKDVDKAALTLWPKNLTDFLTRRLGVHFEMRWYRLDPARLVEPDTVTREALPQHLGASTIPMQTNPLAGLIRVHEINAQRGFGELDESEDSASAGRSGRRLSEQLRAYYKRHLDPEQSPGPSDIDALRAMDAARDAFDVRLAASFKPAFQEVESLGYPGANDPTIHVTTQLSAADGINHESAVLFELDSIGGATGTPPLRLPETSNGLGYQNLISMIFRLMSFRDAWLRKSKAALASGDLIVEPIHLVMIEEPEAHLHAQVQQVFVRHAYHVLINDPLLRKFPGLSTQMVVSSHSSHIAHELPYASLRYFRRLPAGMHGKQVPISTVSNLEAVFGDDTSTKRFVTRYLRSQHADVFFADALILVEGAAERILLPHFIRNRFPQLHQAYVTLLEVGGSHAHRLRPLLNALGIPGLVITDIDALGDKASVPIKRNAGQVTGNPTLRSWLKSNNNKREIDFLLDLATTDKVIVSDDLYSIRMAYQTPAYVAVPVGASPEEVLPGTFEDALVFANFAHFAAARGNGMIGAVAREIAKATSGEALASGLFKVIGDGDKAGFALGVLYDTDFKDLIPPHYIEEGLSWLQERIVKKKHEMLLVSVSVEEGVHE

SEQ ID NO: 65943 - protein, 621 aa, Xanthomonas vesicatoria
MNELTDSLVDNGVDEVIDQCLHLDTLQSFFMYAGAGSGKTRSLVGALGKLRLRERERLVYKGQRIAVITYTNAARDEILRRIEFDALIDVSTIHSFAWRLIKGFDDEIRTWLKVSLDESMAKLTDAMGRARGANKTYLKNKADLERKRKRLESLDSMLSFHYSPSGTERLRGSLTHQEVIGMAGEFLQKEPLREVLVDLYPVVLIDESQDTHEEVMKALLSIQAYASDRFALGLLGDTMQRIYTHGMRRLECAIPGDWARPAKVMNHRSAERIVRLVNTIRSEVDGQQQRARKDKPGGFARIFITGIGAAKSLELEEAVACKMAEITGVAEWGLGPEQRKTLVLEHRMASRRLGFDEVFGPLYETDTLKTPLLDGVLGPVNFLVDDVLPIVEAGLSGDEFTLVDSIRTRSPLFDSKVLAGRADQLEAIRAAGDGARRLTEQLRDRDPPLREVISGLHESGLLTVPNALRHALNAQEPDDEVALEGERPAQELHAWRRVLQAPFSQVRAMALYARGLSAFDTHQGVKGLEFPRVLVVISDDEANGFTFSYDKILGVKVADKDAEKEVGGGDSQRAQTRRLLYVTCSRAEHSLALMVYAQNPGAVRDEVIRKGWFGADEVVLV

SEQ ID NO: 65944 - protein, 600 aa, Xanthomonas vesicatoria
MRVARVQIENFRGIRSATLHIAGTTVLLGDNNTGKSTVFEAIELAIGADRLARHQVIDEHDFFGGAYQAAADQPAPKIMIEVVIADLDAEHCQRFRANLEFWREADKRLLEPGEARQVAQEGVVPAVRVRFEGKYDPEGDEFEAKTWFAVPRAEDGTSTSECRSGDKREFGFLHLRALRTGSRALSMERGSLLDIILRTYEVRTKMWEGLLDKLRPLDVVGAQDEEFGRILKAIQEAMRDIVPGEWADAPHLRVSELTREDLRRVLKSFLATGVAGYAAPFQHQGSGTINALVLSMLGLIAERRRGRVIFAMEEPELSLPPHVQQRVVDKVRGIASQALFTSHSPYVIEQFEPEQMTVMRRDPTGVMSATPVLLPTNLKLKLFRDGFRTRFCEALLARRVVVVEGKTEFVAYSAVSRRLAFLAPGEFKRLDSLGWVPFDAGGETNVASFAAFFRQLGKTVATIFDQQLAGARAAIALSCDRAFEQPYAGFEHLLRAEVRTDMQSWFVRWLVANQEWPHALAGIVPPEGSLDEAYIEPFMTLMRHKKGDDYLTLFFEQCQVGHMPASMVQTLRSLREMVELPAAHPVLPLPFIVQPMAQGT

SEQ ID NO: 65945 - protein, 547 aa, Xanthomonas vesicatoria
MRGGAGSGKTTIALAKACEDLTAGRLGRTGKALFVSFARATVSRVAEQATASLPRDQLARIEINTYHGFAWSILRSHAYLLGTRPGVSLLLPAQERSRLAGVLEDNRARELRRLFEEEGLVAFDLFPILLAELLDLLPVVARAIGDAYPVIFLDEFQDTNAEEWAMIARLGRHSTLIALGDPKQRIYDFKGADPRRFDDFIEAFEPTTFDFQSENNRSAGTDITLFADALVSGNYRAEPYVGVSVVRYGGQSLHPLKQRVLRSAGRYRRRPEWSIAVLVPTNKLAVSVFDYMRREANGLPSYPVDIAVSMEGPMLAGMIIALLLEPKVSNQSLGADVLDAMALLETGRKERASATAIETARKLRGRAARVRQRGEASYGQAVGAGVRQLVADVEALELSGDPFSDWLSIRNLMTSNARPEIQAVATEARHMRLLRRGTQIETRLAEAWRVHGSYLNARELLRAALVEDQFAASSRTQQGVIVMTIHKAKGKEFDEVVVFEDLYNRYLRNHGADSERSARFNLHVAATRARSAVAIMTPSRDPCRLLP

SEQ ID NO: 65946 - protein, 762 aa, Xanthomonas vesicatoria; identical to SEQ ID NO: 65942

SEQ ID NO: 65947 - protein, 621 aa, Xanthomonas vesicatoria; identical to SEQ ID NO: 65943

SEQ ID NO: 65948 - protein, 600 aa, Xanthomonas vesicatoria; identical to SEQ ID NO: 65944

SEQ ID NO: 65949 - protein, 547 aa, Xanthomonas vesicatoria; identical to SEQ ID NO: 65945

SEQ ID NO: 65950 - protein, 651 aa, Clostridium pasteurianum DSM 525 = ATCC 6013; identical to SEQ ID NO: 63854

SEQ ID NO: 65951 - protein, 670 aa, Clostridium pasteurianum DSM 525 = ATCC 6013; identical to SEQ ID NO: 63855

SEQ ID NO: 65952 - protein, 714 aa, Myroides sp. A21
MYISKVTLVNYRNFANANFHFKKGINTIIGENGSGKTNLFKAIRLLLEDTSLPYAYKLSEGDFNRSLGKNNWKGHWIIISIEFDELNDDETIQSLFIHQAGIAEENFVEKATYNLFFRPKADIRHKMSELHPGDVHGLQSLLEHITIQDHYETFFSGKSSVDFSDPEVYKELVGDFENVIFPSSIDSSRFGAKIPHQMSVAKEISFTFIQALRDVVSDFHNNRTNPLLTLLKNKSGEIKEGDYQPISDLVNSLNQNIETLPDIQNIRNDIKSTIQDAVGLTYSPSSLSIKSSVPSEAEKLLQSLKLFIGEPEEEYEGGINELSLGGANLIFLTLKLLEFKYRKSKDSFANFLIIEEPEAHIHNHIQKTLFDKLNYSDTQIIYSTHSTQISEVSNVEKINILAKKQNFAEVYQPSKGLEKENINQIQRYLDAVRTNLLFAKGVILVEGDAEEILIPIMIKKTLGLSLDELGISLINIRSTGFENVAQLFHDERIRRKCAILTDLDSAICDTTIHDDDSSTIKKYKNKVANSEKKGAERKLKLTDFTKDNQWIEVFYSDHTFEVDFIKAGNSWEVIQTLEQVYKDKDTAEISKKELESEEVSSYGKRILTMAKQEGKGWFAIMLGDHIFYRTILPEYIVHAVFFAKEKFTSHTILDIVQYRMKEYLKEYPKYDFKTCKEILEKYKEKKATLIELKSQLELITKEEDQILAILDKLK

SEQ ID NO: 65953 - protein, 600 aa, Myroides sp. A21
MFFWRENSINKEQENAILEKDSVMLIACPGSGKTRTLTYKIAYELSRLTSKKQFVIAITYTNRASDEIKERVELLGVDVTQLWIGTIHSFCLEWILKPYHLYHEKLKNGFKIINSDDSEDILSELCIPYKEEKITYFDCGILAKTNGFHLTCLNKVKHDSLNRIIKKYHTILEENNQIDFEQILFYAYEILISKPIVAKILSNLFPFILIDEYQDTKEIQYHIISEILSKNNGKSKTLIVGDPNQSIYESLGGYPMPKQDLEKLLGFNLKSLSLDKNYRSSSAIIDYFNHYKTFNTKIIPYGSEKDYPSIITYNSSISVDDLIDEITKLILYNVNEKGISPNEICIAAPQWVHIASITRKLIIKLPDFNFDGPGMAPFSRDIDNFWFKVSRIALTDPSPYMYIKRLRWSTEVLNELDTVGVNITNTNSKDFLRICNSFKITENNGLEYLKKIFNLICEKLNISLQSFPQLNEHFNSFFKSSEKRIHKLIAEGNPSIDSIESFKKVFRQRDGITVSTIHGTKGEEYDTVIGFGLLHDYVPHFSDPNGEENSKKILYVLASRARKNLHIISENKRGVNFYKPNGKSPTTHLLSYKYHYSTIN

SEQ ID NO: 65954 - protein, 582 aa, Myroides sp. A21
MGKPTGITESHFHKSLDKPAREAGSDSIEVNGSFSGLNGDEQIAYLPWLDATDNSKAYLNKRIDNKPNPRGRYDYTTWGGESLSSIFEWELINAISCIYLPPLRDAESKLEAFRGSRLSRLFRKEKPKKGEPKHSIEEKFETLNSEILKDQSIKKVNESIRKYLKESLGTILGQDASIQFAEVNFDRIIERLRLLFYPNISSFTKPEFFREISENSLGYNNILYLATVLAELDGLETDVTKHKILLIEEPEAHLHPQLQIKLLQYLQKQAEENNIQIIVTTHSSTITASCGLESLNVLTIIENNNPTSTLIADVNLEKENLYFLERWLDITKSTLFFAKGILFVEGIAEALVIKELAKKVIKRHVEKEKGFPENLDDFGVSIINLNGIYFRHFMQLFQGYKFDKNGDLIDGIVSIPIRCAGITDCDPKTISKPTNSKKCDCNNPQYYLKEEFEMNSKNCRLYSNLKTFEYDLGLLDNNLKVLIQIFDEWLDTDGETKIQLTEWKSLKWDKQTEIEKAEIAYKLLNYIENTKNKNKQVLGKGQFAQKLAYKLSSETNIEFSVPKYIEDAILWVINNEKKAVDV

SEQ ID NO: 65955 - protein, 637 aa, Myroides sp. A21
MYNLSIDEKLDKVKKRLNTLDRNLSEEQLDFILHPINKACYLKACPGSGKTEVVGIKAAYEISDWKDKFTGLAVLSFTKNAAKEITDRINKYNGNNATKHPHFIGTIDSWLHGYILHPYVHKISGFKGREGNKSYSLLENSTDLGFLANNKYHIKYEYEIRDGNGKPKTKLVPFYATEFHLRHNGIPIPNTENKSFHKNIDLTDLIRIKNNLNKDGFCTYQDAEHLCYLTLKNNQNILESLAKRFPYIIIDECQDLSQNQLRTFHLLIEKGVSILLIGDMNQSIYEFRRVDIQKINGFIKYHKFKEKSLSKNFRSNQKIVNVSLGLEKYNTGITPNQIIGSEIERVSKSCIVWEYTDEDLCKLPQKFIDYINLINSTSQHPDLHILINKSGILARGHNTLSNFRSHLSSNLNKIELIANALNCWSNNPRTSKDIQNALQQIGKAISILAYNGKGNHQHQYCPDVYNQIEWRNQLSDLINQMTNNSTSIYPFTNVTWKEWIKKLKQFLENYWNQLRFPINDWDSVKGKIKSASGMTDKLVSETLKALENTYSEKIRMTTFHDVKGETLDAVLVVSSKDKKSKGGHYEHWLSEDPNEKEFVRFAYVASSRPKHLLIWAIPKKTNNKYLAKIKDLGFETE

SEQ ID NO: 65956 - protein, 651 aa, Clostridium pasteurianum DSM 525 = ATCC 6013; identical to SEQ ID NO: 63854

SEQ ID NO: 65957 - protein, 670 aa, Clostridium pasteurianum DSM 525 = ATCC 6013; identical to SEQ ID NO: 63855

SEQ ID NO: 65958 - protein, 649 aa, Hafnia paralvei
MHLSKLKINGFRCFNDYFNIHLSRGLNVIVGENGAGKTAIISAIRQLFIDSESGRYSVSNDDFSFPFKINGEAANSFSIQAEFDELSVSDKVTLLPWIGSNKTAVLNLEAENKEIRGRFRKILWGGKSKSSLFEPELLDLIQCIYLPPLRDAESKLSNGRQSRLSKLLRALNRRELKRSRKDGKPHPLEEKIKEFNTTLAADENLGIKDANELITKNLIKAIGYNFGQKTSIQFAESDFTKIVESLKLLFFPDLSNEDQSLFRSLSQNSLGYNNLLYIASILAELTLDDDDDDEQPLLKLLLIEEPEAHLHPQLQIRLLNHIKSVADENKNVQIIVTTHSTVLASSVELESIIHLSKSHNPVATPLRNCGLKENSSQFINRWLDVTKSNLLFASGVILVEGIAEQMLIPALAKRVLSNQNDGKRSLEDIGVSTINLNGIYFKHFMQLYCNVKSVDDVDEEINGENIPIRCAGLTDLDPPKTIKKKVAGLDNTDEIKEIIEDFIPYDGNIKDGNNHAIKLVESINNSSNARLFVSKYKTLEYDLAMEGNNAALMSKIIASLWPKPQKGESEIINDFNIMSNIDWTKKTNKEVAEAAYKILNRIDDDNIGKGMFAQVMTEKLKDPTLDFIVPAYIRDAILWATSLEVGGEK

SEQ ID NO: 65959 - protein, 591 aa, Hafnia paralvei
MDNQFTDEQINYINSSIDKHIFLEACPGSGKTEVVAAKLAKEIYIWNKRPGGIAVLSFANSATEELIKRVSKYCNAGQSIYPHFIGTFDSFIYKNIVSPLATELTNYTGTGNDATIRIVEPSAQMGYRTKYSYAKRGNIHAHHYSHNLRSGGIIFETGDAVFDRALNTLKLENWQIQDFSETKRRMLDGGFATYRDIEYLALRALNEERFKHFVSLLAKRYPLIIIDECQDLSEEQLTILQILLNQGTKLQFVGDLHQAIYGFREVEPARVKKFIIDNNFNILELTRNFRSCQNIVNLCAKLTGRNNINGNVTWLDPRCLVVQYQNSPTELTDTFDSICKNYNKNVIVSRGHSNLLKFQTSENELNNIQKLALAISIYNSDDMSMLTNSLQLFSEFIRHHLKESCKTKDFNCPYSVNSSISWRKFLCASLSYMNSIGLQNMNISWSNWVKQAKSSIRILSSKEFCPTNISAALAPLASVNLTSPSGLANKEVNSTLGTISESTSLYGRSTIHGAKGETHDVTIVVSSTRSGKDSHWLDWLSDPKSEAARFAYVASSRPQHYLIWAVKTLKNEEKKKLEAIGFTVLPLDTNT

SEQ ID NO: 65960 - protein, 616 aa, Novosphingobium subterraneum
MRVHSLSVTNFRGIKSATICLPAHAVLIGDNNTGKSSVLEAIDLVLGPDRLSRRPPVDEHDFFEGRYLAPATAVAEADHDGQPPVEAAGNPLADSVPPRIEIEVTITDLSEEQLARFGGRIEWLNTADGTLFVEANPAGIDAAAVVAALRVTFIGQYDPDDDDFTGATYFTRSLTEDDTPTPFRKTDKQHCGFLFLRSLRTGSRALSLEHGSLLDIILRLKEIRPRLWEGTLDALSTLDVAGDPQMGISGVLESVNASLKKYVPREWGAKPHLRVSSLTREHLRKVITAFIATGSGDHAAPFYRQGTGTINMLVLALLSQIAEDKQNVIFAMEEVETAIPPYAQKRIVHELRKLSAQSIITSHSPYVLEEFGLDETVILSRSSQGILSQASIALPESVKHKRYRQDFRTKFCEGLLARRVLIAEGDTEAAALPVVARRLSDLNPATYSSIEGLGITVINAKTETQIADLGRLYAGLGKRVFALCDLQTAEAQQAIEAEVEQLFMHPEKGIEDLVLKNTTLEAMNRFSQSLAWPPHLAAKHAGADVNMIDALMDYFQWSKGNWGIADFLAQCSEAEIPLWFRQTCARLRQLCDPPPPPPVADPAPGGGGDDFDALFR

SEQ ID NO: 65961 - protein, 606 aa, Novosphingobium subterraneum
MVDLTPKQQIVLATAGHQLVTGGPGSGKTTVSILKAAKIAREMLKPGQRVLFLSFARATVSRVLEAIDEEKDVSSDERSRIEVDTYHSFFWRLLKTHGYLVGLPRRISILTPPGEAIALAAIRREYGPDKKLDEAQLAEKRAREKAERDRLAFAEGKVCFDLFADLVARLLEGSAKLRAMTAIAWPCIIFDEFQDTSADQWRVVKALGDRCTLIALADPEQRIFEFIGADPARLDHFKAAFAPTFTELGSDNHRSKGTDILLFGNELLTAKFSKAEYSGISFCLFPSNRNQAYAALVTQVLQARARLIATGRRDWSLAILVPTKRKMRLVSDILRDPFGNVPTISHAASIDMEGPILGAEVIAQLMQQERASDDLDQLVHLICQYLRGRGGSDPGKGDLGDAVKLESALAKWNERIAGGQAPHANSVIHPIAAVLSATRQVVMVGDPDKDWIAIRATLADGACTRLRAIANDARNVRLLERGNLMRNTLEQNWRERGRYSDALDITRLAFVQDHFATAQRPETGVIVMNMHKAKGKQFDEVIVFEGWPLRVGKEIKANPDRIVRENKLEGDLSQARQNFRVSVTRAKSRTTVMTPKDDVCVLLKSD

SEQ ID NO: 65962 - protein, 616 aa, Novosphingobium subterraneum; identical to SEQ ID NO: 65960

SEQ ID NO: 65963 - protein, 606 aa, Novosphingobium subterraneum; identical to SEQ ID NO: 65961

SEQ ID NO: 65964 - protein, 596 aa, Pectobacterium carotovorum subsp. brasiliense
MRISRVRLINFANFSNVDVETGESIVIVGENKVGKSNFIRGLQLILDPGLSERDRQLGFEHFWDGLGEEKLGETIEISVDLTDFTDDPRLMAHLNDCVVNPGPPMVARLTYRFQPKTELNRAPESLKDYEYVIFGGTDPDMHIGGALRRMLPIDVQGALRDAEKDLSSWRNSPLRPLIEELTASLDDDAREEIQTQIDEAQRELAGHDDVVATAERISERLVAIAGDQHAVPVSLGLAPARVDALLRSLRLLLDNGIRGIGDASLGTANLIFLALKSLELDRLVDDGERDHTFFVVEEPEAHLHPHVQRLVYRYFLGTDGDNRDESTPLTTILTTHSPHIASVTPIRSIVLLRHDPEEEETIALSTVNAPFTQRDEDDLQRYIDVTRGEIFFSRGVVLVEGDAERFLVPAFADALGIPLDMLGITVCSVGGTNFTPYVKLLGPQGLDIPHVILTDRDPVNGRHPRVRRRFISLLELVEYEHYRDYENMDAEDVIGLANDYGYFVNENTLETELFESGLAEEMIDVIRQELPQLKQETLNTLQQWLDDGEVDQGRLLKLIERIGKGRFAHALSSSVSEDVCPDYIREALEHIRDAVA

SEQ ID NO: 65965 - protein, 606 aa, Pectobacterium carotovorum subsp. brasiliense; identical to SEQ ID NO: 63639

SEQ ID NO: 65966 - protein, 596 aa, Pectobacterium carotovorum subsp. brasiliense; identical to SEQ ID NO: 65964

SEQ ID NO: 65967 - protein, 606 aa, Pectobacterium carotovorum subsp. brasiliense; identical to SEQ ID NO: 63639

SEQ ID NO: 65968 - protein, 596 aa, Pectobacterium carotovorum subsp. brasiliense; identical to SEQ ID NO: 65964

SEQ ID NO: 65969 - protein, 606 aa, Pectobacterium carotovorum subsp. brasiliense; identical to SEQ ID NO: 63639

SEQ ID NO: 65970 - protein, 596 aa, Pectobacterium carotovorum subsp. brasiliense; identical to SEQ ID NO: 65964

SEQ ID NO: 65971 - protein, 606 aa, Pectobacterium carotovorum subsp. brasiliense; identical to SEQ ID NO: 63639

SEQ ID NO: 65972 - protein, 693 aa, Pectobacterium carotovorum subsp. carotovorum
MHIEKVKIEGFRLLQDVEIMLENNSTVVVGRNNSGKTSFTEIFDRFTGRTGAKFRLEDFSAISREQFFNAKMLREQTVNPEEILAALPTISLTLTFRYDSTSSNLGPLAPFIIDLDIDSTSAIVHVEYKPTLATLHTLLDIPSTPEGIQPRAHFFRSLRNTLPKAYSIHICAIDPTDSTNKRSFENTSALSALLQCDFVRAQRTLDHANQGDADIIGKLLSTLFKTATAPSAAAADQELAAKLKASVEDIERNVQGDFDEMLKNLLPAMEVLGFPSLNDAELRPETSLNVEALLSDHTKVVYASTDGVHLPEGYNGLGTRNLIYMLLQLESYHKSYRAKETRPATHLIFIEEPEAHLHPQMQEVFISQLNAAIGKLSACYPEEPAWKVQFIISTHSPHVANAASFEAVRYFLNDSQIQTTTRRTKIKDFKKGMSTISPDDRHFLHQYMTLTKCDLYFADKAIMVEGTTERLLIPRLCELVDRSLNDKYKLSRQYITCVEVGGAHAHIFYPLLDFLELKTLIITDLDSTKSVEKRNKKGKTITSWEKCPVAEGERTSNTAIREWFRPEKLEEQSCQQITPREIINKTVEDKQKGYRRIAYQIPEKLGTDICARSYEDALVLANPERFEWPKEQDEATEAWEIAKGLAKTDTALRFAIREKEWVVPRYIHEGLVWLSEPLPITSSTEESVKEATV

SEQ ID NO: 65973 - protein, 577 aa, Pectobacterium carotovorum subsp. carotovorum
MTESVKNPALIAAHETQRKIEEALDADRSFRLEAGAGAGKTYSLVAALKRLIAERGSRLVQSGQKVACITYTEVARDEIAREIEEHPAILVDTIHGFSWTFLRQFQKALRDLIREMESRKEKIEQGGGIGSKTVDYDLGFFNVNENGITLSHDDIPEMMSNLLKKEKFRRLLSQQFPVIFIDEYQDTHRQFMDAITEHFLKPKIGPLIGLFGDHWQTIYRSEYELAEYPIEEITKGSNFRSVPAIVDVLNKLRPELCQATHDPSANGEARFFHTNTYQGQRTNQMHSKEDLPPDLARRVREDLMLRLQIEGWDLNKTKVLMLTHNVLAAEQGYPSIAEIFKSRTEQFVKKEDPAIKFFAEIVEPMYAAYKASQYGDMFRAYGSRPAITRQEDKIKWRQDMDSLQKLREEGTIGQVIDHLKTTRRPSPPDRLLRRDEEFNALDGDNILEAGSALQRYSKLRPVPYKEIVEVVKFIEKQTSFATQHSVKGAEFENVLVVLGGGWNHYNWPQLFELIQTKSLNSKNTKGFYRARNLFYVSISRPMTRLAVLSTQTLPAPALEAINNLFGVDNVMALNIAT

SEQ ID NO: 65974 - protein, 766 aa, Pectobacterium carotovorum subsp. carotovorum
MPTTDASVEVAPNMSSPIRLACVEVCNFRRLACTRLDLDEGTTILVGANNSGKTSLLTVLRNFLGDSPGFRPYDLSLSQWAKLRELSKAWEGLTEDPTTDTKDTKTWEVQLRTLLDCMPFADLWFNAKEGAYSYVAPYITSLKWEGGPVGVRVRLEPVSNTDDLRKMAWSYREARFPVKDLPQEGHAWPVDIIDYWLRNPSDLRRIASYRLDPKKGPLAPTAAALPQSLPLSSSPVELSHLRKLVRVDFVSAQRGLGSEEDEARTESPSSRPGMFSSQLLKFARQHLNVSTSAPVQDEALVTAIAKAQADLDELIYEALKPAMEDVEILGYPGLHDPQQFHFRTRIQTADLLAHSTAVQYRIDKTAVDESLPEHSIGLGYQNLQSLSFMLVSFRAARLNPPQGAPAAVHLVLVEEPEAHLHVQVQRNFSSNALGLIRPKEAIHSKLRSQLLISTHSSHLAHGDSFTRLRYVKRLAGKSEGGKPSTEVVNLGDAFGNDLETRTFAERYFQVQHTDLLFADAAIFVEGTAERMLIPLFIERDFPKLAKKYVSFVDIGGSHAHRLRPLIERLGIPTAVITDLDPVIPIKSASGRIVRSAVHIAGQADLECGNDTLTSWHPKLAKFDRYGTPTTAELEWISPTGVKVRFAWQLPISAASAQWPSSFEDALVLSNIAWFKKLDEEVDERGKKRKHRGALGKAIDLVMDHPDHVKLVEALHKLMHGSFSKGDFAATIFERLNAGAELDCPEYIKDALAWLSTELKVTAGETP

SEQ ID NO: 65975 - protein, 651 aa, Pectobacterium carotovorum subsp. carotovorum
MNVQVQSTGNDRDAHVVEEICGFVTAPVPRSFFLFAGAGSGKTRTLVEVLRRITGVVKHEAGGKYAKRLHSQGQAIRVITYTKNATDVITGRLGRNDLAAVSTIHAFCWELIQGFDVDIREALLALKDEELAIAKQAAAEKKNGETDTDRRKYAEIADEAEKIRFVEKFIYHPDRNTYGIGALAHATVLAVAAWLVNHRPTLQRILEEHHPLVLIDESQDTMRGILDALLNVEATRPGKFTLGLLGDHRQRIYPDGHRDLPAHVPTNWAFPALKMNHRSQKRIVDLINAIWHADIAGRTQPKSGFAQYPREEKSAGTVRIFIGDAALATAEKVERERQCAASMAKATGVEAWVDETRKFKTLALEHKLAAKRGSFFDAYLAMDLLDEDAAAPKSNGERTGPAMVRPLLGSILDLAACFEPTGDLDEFAAMEVLRAGKALAHLQEDVEERRTQLAKIHNAVTAFGAAIRNPSATVREVLNPLLSKQIFDADDRLVAAFADDSPPPAPPKVLSKEERNNRLKRGWSHLFNTPWSQIARYRDYLHGEAELATHQVVKGSEFKHVMVVMDDYEARGFLFSYDKVFGAEPLSKGDNENVAAGKETTVDRTLRLLYVTCSRAEESLALILWVGNRAAAAEAIKAMGWFQEEEISLLD

SEQ ID NO: 65976 - protein, 596 aa, Pectobacterium carotovorum subsp. brasiliense; identical to SEQ ID NO: 65964

SEQ ID NO: 65977 - protein, 606 aa, Pectobacterium carotovorum subsp. brasiliense; identical to SEQ ID NO: 63639

SEQ ID NO: 65978 - protein, 764 aa, Pectobacterium carotovorum subsp. carotovorum
MNIQHIEISNFRKLLSVRIDFSSETTLLVGANNSGKSSAMLALRRFLVSKASAFRLQDLTLCHLAKLDDIGKEWENPPEDFEIPTTKDWANWLPSLDIWVSADQGEFHYIRDLIPSFAWRGGLVGMRFLLEPDDMNALYTDYRKERTRVAELEDALDKEDPPGSQLKLWPQNLHDYLSRRLGAQFKVRWYRLDPQQLNKPDKSTRMAQMQQLGPTTLPLDSNPLSGLILVHEINAQRGFGDHSDDNQGDNTRPSSARKLSEQLRSYYSRHLDPGDSPDISDLEALRAIDAAQSAFDTRLSSSFETAIREVEGLGYPGRNDPRIKVASRLATTDGMNHEAAVLFELDSIQGTPEAPPLHLPETANGLGYQNLISMIFRLMGFRDEWLRKTRAASAEVIDHIEPIHLVLIEEPEAHLHVQVQQVFVRHAYKVLCGDDLLKRYSNLKTQLLVSTHSSHVTHEVEYQNLRYFRRLPAGMNGINIPVSTVSNLSNVFGEGTKTTEFVTRYLRAQHADIFFADAVILVEGSAERMMLPHFLRNKFPFLDRCYITTLDIGGSHAHRLRPLIDALGILTLVITDLDAGLNKAAKPVQRNASQITNNPTLRSWMKLMHLGSTVDELLELPENQKEHQIDDLYSVRIAYQTPISTHLPSTGEAIQALPNTFEDSYVLSNVGYFAEKTGGTGLMKAFVKVLNEVRTSEALGEGLFNELREGKKAEFTLLVLGDKNFPSLEIPEYISEGLNWLESKLRSKQKELLVIPPESTEVAP

SEQ ID NO: 65979 - protein, 615 aa, Pectobacterium carotovorum subsp. carotovorum
MSEATVADADTTIKACLNLTDPKSFFLYAGAGSGKTHSLVEAIRELIKRERERLTFEGRRIAVITYTNAACDEIIQRLEFDPLVEVSTIHAFAWCLIQGFDNEIREWLRIKLSQDIEKIEGELARSRGENKTSRGNRRKLQSKIRRLETLDEITKFIYSPTGDNRELQALNHDEVIKLTAAFAPQRPLLDVLVDRYPIVLIDESQDTHAPVMEAFLKVQQLAQTRFCLGLLGDTMQQIYGHGVTRLDKAIPGDWLKPEKLVNHRCPRRVVDLINVIRSTVDAHQQIPKPDAIEGVVRMYCISQSQNQAANIEENIAHSMAVITSDSEWTTGPEGRKTLILEHKMAGRRMGFEKLFTPLYAVEHLQTGLLDGTLPALRVFSEGVLPILTAKDDHFLLLETVRSRSPLLSKDAMQSTGDQSAHMQRVEDATHALLALFERNDPTLLEVATLLRQTQLLNVNEHLVEAMALGAPGEAPDPEDTNAMTNYAYQLFLERPFSELVAFANYADGLSPYGTHQGVKGLEFPRVMVVINDEEAGGFLFSYDKLLGVKEPTKTDRDNERDGKDNALARTRRLLYVTCSRAENSLAIVVYTPQPSLVKRNVIDAGWLQESEVEIL

SEQ ID NO: 65980 - protein, 596 aa, Pectobacterium carotovorum subsp. carotovorum; identical to SEQ ID NO: 65964

SEQ ID NO: 65981 - protein, 606 aa, Pectobacterium carotovorum subsp. carotovorum; identical to SEQ ID NO: 63639

SEQ ID NO: 65982 - protein, 596 aa, Pectobacterium carotovorum subsp. carotovorum
MRISRVRLINFANFSNVDVETGESIVIVGENKVGKSNFIRGLQLILDPGLSERDRQLGFEHFWDGLGEEKLGETIEISVDLTDFTDDPRLMAHLNDCVVNPGPPMVARLTYRFQTKTELNRAPESLKDYEYVIFGGTDPDMHIGGALRRMLPIDVQGALRDAEKDLSSWRNSPLRPLIEELTASLDDDAREEIQTQIDEAQRELAGHDDVVATAERISERLVAIAGDQHAVPVSLGLAPARVDALLRSLRLLLDNGIRGIGDASLGTANLIFLALKSLELDRLVDDGERDHTFFVVEEPEAHLHPHVQRLVYRYFLGTDGDNRDESTPLTTILTTHSPHIASVTPIRSIVLLRHDPEEEETIALSTVNAPFTQRDEDDLQRYIDVTRGEIFFSRGVVLVEGDAERFLVPAFADALGIPLDMLGITVCSVGGTNFTPYVKLLGPQGLDIPHVILTDRDPVNGRHPRVRRRFISLLELVEYEHYRDYENMDAEDVIGLANDYGYFVNENTLETELFESGLAEEMIDVIRQELPQLKQETLNTLQQWLDDGEVDQGRLLKLIERIGKGRFAHALSSSVSEDVCPDYIREALEHIRDAVA

SEQ ID NO: 65983 - protein, 606 aa, Pectobacterium carotovorum subsp. carotovorum; identical to SEQ ID NO: 63639

SEQ ID NO: 65984 - protein, 566 aa, Pectobacterium carotovorum subsp. carotovorum
MEISSLKLKGFRNFKDAHINFNSNTLVIGANDVGKSNMLHSLRMLLDKSISDSEIEPNELDFHLENGKSCEEFEIIIHFKDINEDAVLSILKGNVSDSGESFIKYIAQKSDLSYKLFIGESLDSLQEINSRYYLKFVNLKYIQSQRDLERFIRKEKRQLLKIAQQSLNSEEREEDDDLLGEISIDLQSINDKISQLIYVERATKDVNDELKKLAHHYSEYSVQLDTGAIGINDFIDNLQLGANTNGSNVMLGGDGRNNQILLALWKAKSIKEHDIENEVIFYVIEEPEAHLHPHQQRKLADYLISELPGQTIISSHSPQIAVNFEPGSVIRLLDRAGHTVAASKGCSKDISDGWEGMSYRMSILPAESFFSNGVFLIEGPSEVLFYHSLAENLNIDLDYLNISLVSVDGISFKIYVAILDALEIPWVMRTDNDISKLKDQEKWQYSGINRCLDIVGLEKFEHSDIQIVPIDTLTSGDWQTVSEEINKRGVYLSKVDLETDLVGELSAPILNALGKKNDQGAIEYLQKKKALRMRELLKDIKTDLHKLNAGELVKPLNHLVKIIRGE

SEQ ID NO: 65985 - protein, 541 aa, Pectobacterium carotovorum subsp. carotovorum
MSTFSPTPQQKLAIDYTGSMVITACPGSGKTTVIKEKIRNITDCLPEHKGIIAITFTKKASSELERRCKAEGHNVKHSFFGTIDSFCLKEIIIPFLSRVWGGTPTECKVLKKLESPYNHFIESNFAGTPSVININEDPGYKKLYDEGILWMGSFSALALKIINESSAAKRYIKARYSHIFIDEYQDSSLSQHELFLKINELGLCSIAVGDVWQSIYEFRGGNSELLLELVSNTECFKHFEINFNHRCHPSISNYASRLLEPSYVLLPADEIRVFRRRLNGNLKDAAVTISSWISGWLSSGEWKLEKANQIAILARKEKSLTLFCSGLNLNFRLYVDTPLDKIGTDCSDLYKDLLAYKYGSISTAQEFINKVFDGVIVDDNTLLLLRKKIKTIRNELKNEDLIHNFHDIACILGINSTEHTDGAVIRTISDDILVKQFKPLDDNEIQVMTLHKSKGLEFKLVFHLDLDEWSFPFREYNSEDRYTPRYPTLQQELNLHYVGITRAENCCILINSSLRENASGDFKNTDESYFFKLPQLNNLYS

SEQ ID NO: 65986 - protein, 764 aa, Pectobacterium carotovorum subsp. carotovorum
MNIQHVEISNFRKLFSVRIDFSNETTLLVGANNSGKSSAMLALRKFLVSKASAFRLQDLTLCHLAKLDEIGKEWETPSKNFEIPTTKDWADWLPSLDIWVSADKGEFHYIRDLIPNFAWRGGLVGMRFLLEPDDMNALYTDYRKERTRVAELEDAINKEGQPSSPLKLWPQSLHDYLNRRLGDKFKVRWYRLNPQQLKKPDKSTRMAQMQQLSPTTLPLDSNPLSGLIRVHEINAQRGFGDHSDDSQGDNTKPSGARKLSEQLRSYYSRHLDPGDSPDVSDLEALRAIEAAQSAFDTRLSSSFEPAIREVEGLGYPGRNDPRIKVASRLAATDGMNHEAAVLFELDSIQGAPGAPPLHLPETANGLGYQNLISMIFRLMGFRDEWLRKTRAASAEVIDRIEPIHLVLIEEPEAHLHVQVQQVFVRHAYQVLCRDALLKRYPNLKTQLLVSTHSSHVTHEVEYQNLRYFRRLPAGMYGIGIPVSTVSNLSNVFGEGTKTKDFVTRYLRAQHADIFFADAVILVEGTAERMMLPHFLRNKFPFLDRCYITILDIGGSHAHRLRPLIDALGILTLVITDLDAGLNKAAKPVQRNADQITNNPTLRSWMKLMHLGSTVDELLELPANQKEHQIDDLYSIRIAYQTPIPTHLPVTGEAIQALPNTFEDSYVLSNVGHFAERIGGTGLMKAFVKILNEAQTSETLGERFFNELREGKKAEFVLLVLGDKNFPNLEIPAYISEGLNWLDSKLRSKQKELLVIPPEGAEVTP

SEQ ID NO: 65987 - protein, 615 aa, Pectobacterium carotovorum subsp. carotovorum
MSEAAVADADNIIQACLNLTDPKSFFLYAGAGSGKTHSLVEAIRELIKRERERLTFEGRRIAVITYTNAACDEIIQRLEFDPLVEVSTIHAFAWRLIQGFDNEIREWLRIKLGQDIEKIEGELARSRGENKTSRGNRRKLQSKIRRLETLDEITKFIYSPTGDNRELQALNHDEVIKLTAAFAPQRPLLDVLVDRYPIVLIDESQDTHAPVMEAFLKVQQLAQTRFCLGLLGDTMQQIYGHGVTRLDKAIPSDWLKPEKLVNHRCPRRVVDLINVIRSTTDTHQQTPKPDAIEGVVRMYCVSQNQNQAPNIEENIAHSMAAITNDSEWTTGPEGRKTLILEHKMAGRRMGFEKLFTPLYAVEHLQTGLLDGTLPALRVFSEGVLPILTAKDDHFLLLETVRSRSPLLSKDAMQSTGDQSAHMQRVEDATHALLALFERNDPTLLEVATLLLQTQLLNVNENLVEAMALGVPGEAPDSEDTNAVTNYAYQLFLERPFSELTAFASYADGLSPYGTHQGVKGLEFPRVMVVINDEEAGGFLFSYDKLLGVKEPTKTDRDNERDGKDNALARTRRLLYVTCSRAENSLAIVVYTPQPSLVKRNVVDAGWLQESEVEIL

SEQ ID NO: 65988 - protein, 596 aa, Pectobacterium carotovorum subsp. carotovorum; identical to SEQ ID NO: 65964

SEQ ID NO: 65989 - protein, 606 aa, Pectobacterium carotovorum subsp. carotovorum; identical to SEQ ID NO: 63639

SEQ ID NO: 65990 - protein, 623 aa, Pectobacterium carotovorum subsp. carotovorum; identical to SEQ ID NO: 65708

SEQ ID NO: 65991 - protein, 622 aa, Pectobacterium carotovorum subsp. carotovorum; identical to SEQ ID NO: 65709

SEQ ID NO: 65992 - protein, 626 aa, Xanthomonas axonopodis pv. phaseoli; identical to SEQ ID NO: 65862

SEQ ID NO: 65993 - protein, 551 aa, Xanthomonas axonopodis pv. phaseoli; identical to SEQ ID NO: 65863

SEQ ID NO: 65994 - protein, 594 aa, Cupriavidus sp. SHE; identical to SEQ ID NO: 62698

SEQ ID NO: 65995 - protein, 445 aa, Cupriavidus sp. SHE; identical to SEQ ID NO: 64703

SEQ ID NO: 65996 - protein, 578 aa, Flavobacterium sp. JRM
MSIRLKTVRIKGFRGFKNIEVDFQNTTVIVGTNNAGKTTILKALQLALTNSHFISNDDFFYYEDHIDDTIIIDLLFVPIDEQNQVVNEFNEKWSDIFKVDRIGISSVGDQIMAFRTSIKEYNKSFKKQQFYIDQWEEFKDDNDKYWFDVEYDNEQSFYFDEIPFFYLEANRDILEDIKSKSSYLGRILSSLEFSAADQQMIETLISQLNSTTIASSDTLTELQTTLEELDTAMDNPNNSVQLTPFTKKVRDLNKGIKINYSEFSMDYHGMGTRSWSSLLVLKSFLNLNCKIYHDNDRPYFPVLAIEEPESHLHPNAQKKLYSQINEIVGQKIISTHSNYIASNAQLEEIISICKNRNDIQIGKLSAGFDSEEIRQIRRQVINARGEIYFSKLVVLFEGETEEQVLPILVKKHFSIDFVNLGVNFIGVGGFTKYLPFIRFCESFNIEYLIFSDNEPDVNTDVLRQISKSEKKDSSKVVFVSPNNDFERELCEEGYIDEVKSAYHKIELEKCTNERHKQAKQVQLNAIPDADYYEIITKMKTQFAPLIAQELLISEKPLPAKILELFGKINDILNPATNE

SEQ ID NO: 65997 - protein, 607 aa, Flavobacterium sp. JRM
MNKINLSKKQSQIVDLGTGSFLIEASAGSGKTRVLTERIKKLLEDNSPKILAITFTNKASEELKERIDLDKHKNKNIFVGTFHSFCQSILEARFKLLGFPKMPHIFEDENDRIEIVEEAIKSIPYFTELYNNLESKEKPIYKSKVLSFISSVKRELLEPEDLITEEGEEHFLFLYNEYQDILKSNNAVDFDDLILLAYNLFSNNEAVQNLYSKSYNNIFIDEGQDLNKAQYYLLKSLCGNHIKNIMIVGDPNQSIYGFNGSTPKYMDTFFIEDFHATKITLEENYRCSKEVIDAANKLMNLNVGAVNYVIKGKFEIYKASNEKDEASYIAEKIKNLINLQIHSDIEGIIDYNSIAVLGRNKFAFKYIEDELLRNKIPYYFKSGNIGIKFQTTFMKLFDNYFRIKINPSDKLHLKRLKNLLKIEDFENEDKILKSKFSYFSVIKDIINNLTEDNFKKSLNKISENIKDFTFFNDDEKLEIYNELEELKNLWTEYSYNNLKPNLTGFKNTISLGILKKDSKQEGVCLSTVHTMKGQESEIVFLIGLDDGTFPYYLAIQNGGEELIQEKNNLYVAFTRAKRFLFVSYPSVRIMPWGDSKSRIISRFLKNF

SEQ ID NO: 65998 - protein, 727 aa, Flavobacterium sp. KMS
MNIDCVDIQNFRKLKKCRIDFSKEETILVGPNNSGKTTAMDALIRFLKKKKFSSRDFTLTNWLEINAIGNLWISEPELSKLDFTIEKWIDNLPSLDIWFHVEQNEIHHVINLIPTLDWDGGFLGVRLRFEPNYIEQVYEEFMFSYSNSKSITGDEENDFKLWPNDLWDFLDKKGNLNKLFSIKTYLLNSELKDSTQELLKDNIPTETDIVSGLIKVDIINAQRGFSDINVDADDTSSIKNLSSQLREYYDRHLNPSENPTTDDLKALNAIQQAKQLFEDNLQESFKPSLDELQMLNYPGFGNPTINLSSKFNTVDTLNHDSAVQYNLCTENPNLTLPEKYNGLGYQNLISMIFKLIRFRDEWMQVGKNHNTGTVVNSGEFEPLHLVLIEEPEAHLHAQVQQVFIKEAYKVLRNHKDLKIGNFKTQLLISTHSNHIAHEINFTSLRYFKRIKGNSGSINLSEVVNLSETFGTTDDSTKFAIRYLKANHSDLFFADAVILVEGPVERMLVPHFINKNHKNLTSCYISILEIGGSHAHTLKPLIENLGILTLIITDLDSVDPSRNNAKTLPEKAKKYKTGNDTLKKWFPIKTELDDLFKLSSTEKEHTIYPIKVAYQIPLQINNGKMDVEVYPYTFEDSLVMENKLIFEKISKATGLLAKMIDASKIEDINVSAKKMYEVITEKGAKKAEFALELLYFQEPNDLITPEYIKQGLDWLETKLVGKKDGLTV

SEQ ID NO: 65999 - protein, 634 aa, Flavobacterium sp. KMS
MSAEKSNHDTDDHVDTEIYNCLKLENPKSFFLFAGAGSGKTRSLVKVLTDFKTEYGKQLRLNRKKVAIITYTNAACDEIIHRLKYDPIFAVTTIHSYAWELIKNFNHDIKLWLKNNLANEIYKLEEEQSKSKNLLNKTSIDRTRKIESKNKRLDNLNNIQQFTYNPNGDNISKDSLNHSEVISIAANFIQNKPLMQDLLVCKFPIVLVDESQDTKKDLINAFFELQKNKKESFSLGLFGDTMQRIYVDGKENLELELPKDWIKPVKKMNHRSNKRIISLINSIRQSVDKQKQEPRNEKEEGFVRLFICKRGLDKQKTEVNVSQRMSEITGDFLWNNDINNANIKTLILEHHMAARRMGFLEFFEPLYKEDRLSTGVLDGTLAGANFFTKIILPIVNANEVGDKFAIARIVKKYSAYLNKNEILKNAQQIENIRKANMALLDLLVLWDDNADPLLIDVIKNVYKTELFPLPDSLLTIAKRTKSDLFEANKLENIEVEDEVSDDVIDAWDLALANSFSQIKHYNDYISEDSKFGTHQGVKGLEYERVMVILDDEESKGFLFSYDKLFGSKDLSPTDRKNIEEGKETANDRTRRLFYVACSRAKESLAIVAYTDNPEIVSKSAIEFGWFKKEEIVII

SEQ ID NO: 66000 - protein, 566 aa, Lactobacillus ruminis DPC 6832
MDGERTYMKFEKVVIKNFRNFDNVELDLSNKNIFFGLNDVGKTNFLYDLRYVFDKDIRKQNLLDSDFHNKQLDKPIEIVVTIDISDVADSDCQKLRAQLKGALLSEHNKVHIKLFAEYSKTEMLALPILSWGGDINHLYEMKQRGYLYEIDYVFNVIYIDSYVDLYSLFKKNVSQLVRNEKDEDKDILAKIQNTVDDLNDHIASLSGIKEFEDKLTPEYQKFHDEGISVSIKSEIAVKGLYSNIIPYIKQDNDNNLYPTAGEGRKKLLAYSIYDILSDENAEKKINLFLIEEPENHLHKSMQIALSQILFTDSKYTYLFVTTHSPFVLYEMDNVNLVRIYSERKINSISTFYKVPDAYEKNRKMLNRCLSEAIFANKVLLVEGPSEYMLFSKVLSVVHPFYEADGIYILPVDGVGFKTYFPILDKLEIFRVVKTDNDFRAVTGKGTYSALGFSRCNNYIGEKRLPTEPIQENSVSAKRNLYNLNINDLDKIRSDFHIFLSKVDLENDLDEFLHDRLSALLDNDNPVKYLQDAKHYHMVEMIEKLSDTDCRTIYNHYNFACLKEVAE

SEQ ID NO: 66001 - protein, 506 aa, Lactobacillus ruminis DPC 6832
MFEGGCRMKLSPIQEKIVETPGNLIVRASAGTGKTHTMVNKIAKEIDGNHTHKVIAAITFTIKAAQEIKDRLSVDVVQHFIGTNNSFVIEEVIKPFMKDVYGADFDLDMSTDYSAKVGTFQEAIKKIKKEGILCSYRDNKRNFIFDLAQEIVENSSACRLYLQAKYFKIYIDEYQDCDKSMHKFFMYLCDELNIETFVVGDEKQSIYIWRGAYPEAFKSIWNKPNFKKIFMGDNFRSCQQIQNYSNLLCDETRSLYNPTENIDNIVWLSPTKENWATEVLSNIVPEKKSALLRFSNDNARIGASELTTNGLEYVYIPQTPIADITTDTAWLYTAIAKYLIIGKYSAYDVISEIPVEGNESRKTVSTVKRLLKRIEETIDDEQSFGSCVTALAEYLGYDTRPDHINKLFKTISDTSFHVAFEADKYKHIAITFHSSKGLEFEQVIVFAEDYRLSDISSIYNHYVAVTRAKSKLIIVKLNNNNANCFHNNLQKIFSESGHNIEDVVLF

SEQ ID NO: 66002 - protein, 747 aa, Leisingera sp. ANG-S; identical to SEQ ID NO: 63158

SEQ ID NO: 66003 - protein, 649 aa, Leisingera sp. ANG-S; identical to SEQ ID NO: 63159

SEQ ID NO: 66004 - protein, 747 aa, Leisingera sp. ANG-S3
MKLTRIEIFNFRKLRNARLDMSDKQTLFVGANNSGKTSAMKALRKFLKDRGGIDTRDVTASNWAAIEQTASAWTQEAEADLSSLLAQLPFLDVWLHADTSELHHVAHLIPTLTWTGGLLGVRLRMEPKKGADIKAQYLAAREAAQALQPDGATADGFALWPRDFREFLDKRLKDLFELNAHLLDPASFTTTEPVEPHPLPPLSEGIGANPFAGLIHIREINAQRGFEDAGDSKGGDDEPTNRTSRKIASQIQPYFRKHIDPETDPTPNDIKALKAIHDAETTFNARLKDGFADAIKELENLGYPGGLNNPKLFIATQIKPVDGLDHPAAVQYDISGDASGVKLPESYNGLGFQNLISMVFQLMRFRDDWMQVGKFKSQVVSADDRGIEPLQLVLIEEPEAHLHVQVQQVFMARAYKVLRDHDDLREKGSAFTTQLVVSTHSGHIAHAASFEELRYFKRELPSPGVVPTATVANMTGLFGEDTETRRFVTRYLLSTHFDLFFADAIIVIEGAAERILLPHLIQHHYPNLAAAYLSFLELGGSHAHRMKPLIEALELPTLIITDLDAVVEVNKGGKVVKQSAQPCYGAAQTTSNHVLKTWLPGLAEIDTLLAPPLKALCHTASDRPIAVSYQTLQSVTLGSVSKNITPSTFEDALALTNPKLVKDAAKAELSCRMTRDFAKFIAAESTPEDLATALFDRLAKKPEKAAFALDLLYIEDIKALRAPPYIDTGLTWLARQLKDGGGAIWWA

SEQ ID NO: 66005 - protein, 649 aa, Leisingera sp. ANG-S3; identical to SEQ ID NO: 63159

SEQ ID NO: 66006 - protein, 634 aa, Pantoea agglomerans
MKLATIRLSGFQSFGQEATELSLEDITYIIGPNGSGKTAALQALCRLFAFDPSLRRVQRSDFHIPFDEEEAPAERQLWIEADFLFPELEKDQDNSTVAPHFSHMRLDEPEGVARIRFRLTATMGLDGDIEEALVYVLDIDADGSPLNVAQVPRAERNHIQVHYLPARRDPADHITYGANALLGRLLRAVRWDAERDTIKGLTDQISESLAANPSVNAFSESLKTTWATLHKGKFFADPKITFVASEIESLLRHLSVSFTPGHDGSFVDFSRLSDGQKSMLYLSLVLSSQAIGRAVLAEKDVSFDPDKLRPPVFTLVALEEPENSLSPHYLGRIVSSLNAMTKHPDAQALIATHAPTMLRRVDPERIRYLRLDESRETRVTCIKLPETTDEAHKFVREAVQAFPEIYFSRLVVLGEGDSEEIVLPRLLQAKGAPVDESAITIAPLGGRHVNHFWRLLAALKIPYLTLLDFDLARYAAGWGRIKYVNDQFSLHHPGKKLPENYGIPHWNDGKQKFRNFENYLDLLEERGVFFSYPMDLDFSMLLAYPDAYGVDKEEPDEATIKAVLGKSHYDPTQYRDDELALFNTYHQRFKLGSKPAAHIEALTQLTDAELLKGMPVSLDNLAEAVIARLAELPE

SEQ ID NO: 66007 - protein, 554 aa, Pantoea agglomerans
MITVEDWQPADGLTLEPNAERAAKARKRCLALTAGPGAGKTEMLAQRADFLLRTGTCRYPKRILAISFKVDASRNLKERVERRCGLELASRFDSYTFHAFAKRIIDRFRPILSGEYALDAGYTIVEKKNGPSRTEIEFGDLVPLAIQILKNSKIARNAIRQTYSDIFLDEFQDCTNLQYDLVKLAFQGTKIRLTAVGDTKQKIMAWAGALDGIFQSFVKDFNAVPLNMYRNFRSKPQLLRVQNEIIRKLDPASVMPDEQLKGDEGEVYAWRFDDSLIEARYLADLIGGWINNEGVPPAEIAILVSKQLDLYADHLMSELHERGIPYRNEQQLQDITVEPVACLVVDYLSCLYGHREPKAWIRLMNQLVPFADEEVQASARKDLDQLIRKHRKKVSDARKTDSPFSGMWSFVGAFLKHVGLQTLVALSPEYESHERLKQVVRDTRARIENIMGADSDLSGALKRFANDQSVRILTIHKSKGLEFDSVVMMAIENEIFFGDEAENRCAFFVGVSRAKRRLVLTHADKRDQPANAKRWKTIRTPQSEYFGYVVPFVR

SEQ ID NO: 66008 - protein, 566 aa, Enterobacter cloacae
MEISYLKLKGFRNFKDAHINFNSNTLIIGANDVGKSNMLHSLRMLLDKSVSDSGIEPNELDFHLENGNSCEEFEIILHFKDINEDAVLSILKGNVSDSGESFIKYVAQKSDLSYKLFIGDSLESLQEINSRYYLKFVNLKYIQSQRDLERFIRKEKRQLLKIAQQSLNSDERKEDEDLLGEISTDLQLINDKISQLVYVERATKEINDELKKLAHHYSEYSVQLDTGAIGINDFIDNLQLGANTNGSNVMLGGDGRNNQILLALWKAKSIKEHDIDNEVIFYVIEEPEAHLHPHQQRKLADYLIAEIPGQTIISSHSPQIAVNFEPDSIIRLLDRGGHTVAASEGCSKGISDGWEDMSYRMSILPAESFFSNGVFLIEGPSEILFYHSLAKSLNIDLDYLNISLISVDGISFKIYAAILDALEIPWVMRTDNDVSKLKDKEKWHYAGINRCLDIAGIEKFEHSDKKISSQDTLANGDWQRVSDEVNRSGIYLSKIDLETDLVEELGASILDALDKKNNQSAIEYLQKKKAIRMRILLKKIKNDLDKLSMGDLVKPLHHLVKIVKGE

SEQ ID NO: 66009 - protein, 541 aa, Enterobacter cloacae
MSVFSPTTQQALAIDYPKSMVITACPGSGKTTVIKEKIRNITGCLPEHKGVIAITFTRKASAELERRCKADGHDIKHSFFGTIDSFCLNEIIIPFLPKIWGGKLTECKVLKKLDSPYKYYLKEDFFGTPSIVNVNEDAGYKRLYDEGMLWMSSFAALSLKILNESPAAQRYIKARYSHIFIDEYQDSSLSQHQLFLKINEIGLCSIAVGDVWQSIYEFRGGNAELLLDLVRDKSIFEHFEINLNHRCHSSIINYASRLLDSNFVLLPSESINVYRKRLPGNLKDVSMTLSSWISKWLNVGQWGVDQASQIAIFARKEQSLLLLCSGLTSNFRVYIDTPLDKLGTECSDLYKDLLAYRYKAIGTAQELINKVFDGLIMNDNHQFSLRKKIKILRSNLTDEELINYFHEIAGMLNIQFTESNDNAVLEIISDSMYLKQFMPLDKNEVQVMTLHKSKGLEFKIVLHLDMDEWSFPYRLVNEVDRNIALYPSLPQEINLHYVGITRAEKCCVLINAELRQNSTGAFKKSEASYFFKLPQLEGLYR

SEQ ID NO: 66010 - protein, 566 aa, Enterobacter cloacae
MEISYLKLKGFRNFKDAHINFNSNTLIIGANDVGKSNMLHSLRMLLDKSVSDSEIEPNELDFHLENGNSCEEFEIILHFKDINEDAVLSILKGNVSDSGESFIKYVAQKSDLSYKLFIGDSLESLQEINSRYYLKFVNLKYIQSQRDLERFIRKEKRQLLKIAQQSLNSDERKEDEDLLGEISTDLQLINDKISQLVYVERATKEVNDELKKLAHHYSEYSVQLDTGAIGINDFIDNLQLGANTNGSNVMLGGDGRNNQILLALWKAKSIKEHDIDNEVIFYVIEEPEAHLHPHQQRKLADYLIAELPGQTIISSHSPQIAVNFEPDSIIRLLDRGGHTVAASEGCSKGISDGWEDMSYRMSILPAESFFSNGVFLIEGPSEILFYHSLAKSLEIDLDYLNISLISVDGISFKIYAAILDALEIPWVMRTDNDVSKLKDKEKWHYAGINRCLDIAGIEKFEHSDKKISSQDTLANGDWQRVSNEVNRSGIYLSKIDLETDLVEELGASILDALDKKNNQSAIEYLQKKKAIRMRILLKKIKNDLDKLSMGDLVKPLHHLVKIVKGE

SEQ ID NO: 66011 - protein, 541 aa, Enterobacter cloacae
MSVFSPTTQQASAIDYPKSMVITACPGSGKTTVIKEKIRNITGCLPEHKGVIAITFTRKASAELERRCKADGHDIKHSFFGTIDSFCLNEIIIPFLPKIWGGKPTECKVLKKLDSPYKYYLKDDFFGTPSIVNVNEDAGYKRLYDEGMLWMSSFAALSLKILNESPAAQRYIKARYSHIFIDEYQDSSLSQHQLFLKINEIGLCSIAVGDVWQSIYEFRGGNAELLLDLVRDKSIFEHFEINLNHRCHSSIINYASRLLDSNFVLLPSESINIYRKRLPGNLKDVSMTLSSWISKWLNVGQWGVEQASQIAIFARKEQSLLLLCSGLTSNFRVYIDTPLDKLGTECSDLYKDLLAYRYKAIGTAQELINKVFDGLIMNDNHQFLLRKKIKILRSNLTDEELINYFHEIAGMLNIQFTESNDNAVLEIISDSMYLKQFMPLDKNEVQVMTLHKSKGLEFKIVLHLDMDEWSFPYRLVNEVDRNIALYPSLPQETNLHYVGITRAEKCCVLINAELRQNSTGAFKKSEASYFFKLPQLEGLYR

SEQ ID NO: 66012 - protein, 712 aa, Enterobacter cloacae; identical to SEQ ID NO: 63712

SEQ ID NO: 66013 - protein, 599 aa, Enterobacter cloacae; identical to SEQ ID NO: 63713

SEQ ID NO: 66014 - protein, 666 aa, Pseudoalteromonas elyakovii
MKIKSARIKNYRLLKDVSLTLDDRATLIVGRNNTGKTSLAEIFRSFLNPAGVKVRYEDFNQSCLAGFNEALNAYKANREDEEIRPLIPTIELELRIDYKDDEHDFGSLGDFIVDLDDTLFETCVLVSYQLKGGKIKEFFQDLDIANRKKYFSELRNLINQHFETAIYAIEPTNSGNKVRLEFSAFNRLILSGLINAQRGLDDETHSERDVLGKSLGNIFKSANSTGAPEAFKAKSEEINKVVEELQEKVDTDFQGKVKSLLPTLNIFGYPGLKDPNLSAATELNVKSLLESNTKVFYEGDDHFTLPETYNGLGIRNLIFILFRIYEYFREFQSQPTPPKGHLIFIEEPEAHLHPQMQEVFIRQLEEIVGEFQKQLNGGKLWPVQFVVSTHSSHIANEVDFSKVRYFLSKSGKETKVKDLGEAFGSEDVKEDKEFLHKYLTLTKCDLYFADRAILIEGATERILLPEMIKKVDDLKQCGLRRKYMSVVEVGGAYAHHFYKFIDFLELKTLFITDLDSVKKTEGEKRATYPASCVSEGTHSSNAGLSNWFGMKGYASLDDISAKEENSKVSGCRRLAFQIDEDEKALCGRSFEDAFILANVNLFGLHDLEGVELERRVFERAKDIGKDSKANFAIEYSIKTTDWVVPKYICEGLEWLDSDDAVKAEEA

SEQ ID NO: 66015 - protein, 588 aa, Pseudoalteromonas elyakovii
MTKISPAEQASIEALEKLRNCINKHQSFRLEAGAGAGKTYSLIESIKYLISNRADEFLGNRQQIACITYTNVAKDEIKDRTDHHPVIFADTIHAFCWNILQHYQVKLREYLPKLGEKWLQRIDEAGGVTDQVVKYDLGFPAINEYEINLHHDDVITLMAHILAYPKFQKLLKSKFPIVFIDEYQDTDIKLAESIVSNLINNDSGVVIGLFGDHWQKIYGSSACGLISSDKGKIVEIGKKANFRSDKNIVSCLNRMRPDLPQAESEPDSEGVIKVFHSNDWVGVRRDGSGGGHWKGDLPEDSVREHVEKTKKLMRRDGWDLSPDKTKILFLTNNLIASEQNFKNLSDCFRYTDDYLKKNDKYIQFFLDVIEPTALAYEQKLYGELLQIKKKNHPQLKCQADKTELINNLGKVMHARANSTIGDLLDLLVRTKMPRLSSKVEEAETRYKELTSKSNDELEERELRFVDKLSKLRAVKYLEVVNLSEYIDSKTPFSTKHGVKGAEFDNVLVVCGRGWNQYDWNQMLEWMDGNYPKDRQGTFERNRNLFYVSCSRSKHNLSLLFTQELSAKSIEVLERIFGKNNVLGDPIGA

SEQ ID NO: 66016 - protein, 684 aa, Lactobacillus brevis
MFISSVEITNFRTFKEKQIIRFTEGINILVGPNNIGKTTIISAIRLIFDKNKFGLDINDFSKIETKEELKNCSPKITVSVNLQKSNKEGSDSDDLLAIRNWLTDIDNPYKAKITMQFQLPTKYEKAYLDAVKDLDDIGSVWLELEDEFLPKYQRKYFVGESAQPLMDNSLSRFNCQYLPAIRDAEKRMNSGNKYLLNKLLNFFIDYDLKSNEELKKSDIEKKMQKRHKDFHDLAVNLLNNLSPRFKEGKKEMLKYSSRTGATFDGEEPEFNSTLNDHDILKEFSLVVKNGESNVPINLNGLGYNNLIYISLVLAELQQSRSNSYFGDNSSVFPFLLIEEPEAHLHPDMQYDFLKFLQNNIKDGTTSETAKQVIITTHSPNITAAASLDDLIVLSKYKSGVKIGYPGETFIDNPKDKKFVERFLDVTRSNLFFTNQLILIEGLAEQMLIPQFMKADTSNIQNRHISIINLSGRYFIPFLRMFDTNKNPNTAIYKQIACLTDLDPVQGKQNKSCPPIFQAEPDSKNPNIESIKALKSANIKVFSQDEDSGYKSNEGWTFEYQLYMDNPALMPLIFHDSMRYCDAWENLKKMSIENLSIEKISNTFQNERSKQMDGILKENHNTNDLSEITDPKLIKLYLGTMFLYSIKDKGLYAQELSEEISSGKSITVPKYIKECFKWMADKNGL

SEQ ID NO: 66017 - protein, 422 aa, Lactobacillus brevis
MDYKRVSSHENININQNFLVSAGPGSGKTEFLVNHIHHIIKESGKINTLRKVLAITYTNVAADNLSRRIGYTSGLTQVSTIHSFLSEFILLPYSWLLEGKYSLPKKLTITPHQLASFSDFKELCQKYKCQYMTYYDNIRDRISSSIYFKKLNDHYSLTIDQKDTRVPNKRYPIKNDPKFFMEYKQSCWKNGIINYDDVLLLSLIILENNPFVAKLISNSFPFIFIDEFQDTSIIQAEIISILADNGSKVGVIGDENQSIYGFAHSSQETFRKFSLPKLNKYCININHRSSDPIIKLLNGITENSGKDPQILQNIPGPKPTIVVGEPRLVVNWFLKNHPQNSACSKMIISYSNDYIEQINPNYSAPSKKIKDNINKMRTDDRGRFIYSIIKSLKLASEGQINASISSFFRSYEKTVASRILCK

SEQ ID NO: 66018 - protein, 665 aa, Rhizobium etli bv. phaseoli str. IE4803
MRLENVSIRNFRLLRRISIDLAKNKTTTIFVGPNNSGKTSVMEALRLFIGPGGETPKISFHDLSQLRHRDLKRIEVLLAGEGNPEKRIALLKRFAPRMRLDLTFAYGEDQADLVAATQLLMDLTPGTNKVRMRIDYALENAKKLLDDFEARPRKDQSLCDYLKETFRDHFKRVFFKVSPDGKEVEKLEDGGLLKSLLRVDLVPAQRHVDDDEGSRSAKLSKLLHDHYERFYQVDDAAGYQAVEDALTQSAGDLTGKYGKAFGRLTKRLQNFGYPPGQKAPDLRVRAELSAETIYRDNARIYYASEHAGKGGVMEEFELPEKYNGLGYKNLIYIVLQLESFRAAIDASKGDKPRVHVIGIEEPEAHLHPQMQTVFISEISKALETDGGTTAQVVLSTHSSHMIAHSEFEPVRYFRRAGRQVVMQDLSKLPLPDDDPHLLDFLRRYIRLTHCDLFFADKAIFVEGQVERLLLPMMIEEQAKVAGCETLGSQYISISEVGGAYAHKFKPIIEFLGIPSLIITDLDSVDDNNEKCPVAEGKGTSNVCLRTWLPAKIKFDELMACYDVDKTQGCIRVAYQVSQNGHCGRSFEEAFVYANIPWLTANHAKLTSTKAAIKKAVDAGLAAQAWTLSTKLAKVDFALDLIDAPGWGIPLYIQQGLKWLAEHPAK

SEQ ID NO: 66019 - protein, 556 aa, Rhizobium etli bv. phaseoli str. IE4803
MDADEKILECLKARKSFLIDAGAGSGKTSSLIRALDFIRGPDRLSVMGSGQRVACITFTNVAKNEIIERTEHDPLFAVSTIHDFLWASIKSFQKELKPALLAFNEGLPANSRRKQNQNELEAALKTVPAVIYSDRGANFLEGRIFHDDLLGVAYIMFRDHPLLSKVVAARFPFIFVDEYQDTDPVVVKTLLEQLLKTKQPPLIGFFGDKMQSIYPGGVGELSAEQQALLIQIKKEENYRCSKAVIKLLNKIRTDIQQQPAGANLPGAAGYVSLVGVDPDADLSALAVQKARDAFGWNIEGELKVLFLTHRLIARKAGYAGLWAAYNSRGGFIQDRFQSGEDPIASFFVNKVEPFILAWRKGKVGRAISFLKERPSPIAGAAEKARVKANLDELLSLIDTGGTIEAVLKHLHKAQLVTLLDDLEDAIRGSVAPADPDSHEAAHQAFMALLLAVPYIEVSRYRAVLENSMPFSTKHGVKGDEFQNVIVVLDDAGANWNQYSFGKMLAGTDTSQGREKRTRNLFYVCCSRAKDKLIVANIGAGAQAKIEELFGAGAVAM

SEQ ID NO: 66020 - protein, 520 aa, Xanthomonas citri subsp. citri A306
MSALKPAKDGQMEAHITISFSEADKTGRLRAKRWCGDHDDVGLTADMMENLRGVYLQPLRDASQALRPGRMSQLSRLFQLLVDDNGKIEINGALKLLDDELKKKAPIVSTHKAITTRHSEMLGPQLSQLLELGVSVSDFQRLASRLSLTVDLFELEQNGLGFNNLIFMAVVLSELTKNPQASYRGLIIEEPEAHLHPQLQAVLLGYFETIKAVDKEKPVQLFVTSHSPNFASIANLDSLTCLVDTGIKVETFFPRDIKFAVGKREKLERYLDVTRAELFFARRAILVEGAAELVLVSVLAEKCGHDLRKHGVSLISVEGLNFDSFIPLFGENALKIPVSVLTDADPTGPSEEDEEAGSDGSVVADDLASTDDASGGKKKAAPVYPSIGDKVQLSANTLSMIKFEDSYLKVFHGLKTLEYDLALYACNRKMMLAALSELHPKISASLAKKVDAATGETEKARVLFSGMFERKNGNVQKGRFAQALAHLIAKAKAEDFIVPGYIKSAVEHACQPGPKKGEDE

SEQ ID NO: 66021 - protein, 598 aa, Xanthomonas citri subsp. citri A306
MSTDTPSLEQGAIITAPLQPMSVIACAGSGKTFTAVRRLAHIRRCLGDHRGRVALLSFSNIAVETFRREYQALAVGSLKIPSHQRVEIDTLDGFITTNILRPHAHRTMGCTTTPFLLSGSESFLLGKDYRFWVESPRTGNYPVPQAHIHRVVIGPSGAGTDFFYQNSGMLTRINNGPKAAAALGKLGAYTHELARYWADLTLREQPEILRVLARRYPHILIDEAQDIGILHQLIIERLSQAGSQISLIGDPNQGIYEFMGATGSFLSSYHSKPGVAPAALTRNYRSVPAVLDLANAISARTDEPDRHAPLTLHGAYFVPYTTTSTQNVLAAFQATLMSAGLDPGRSAVLCRARKWANELAGSEGAPGVGTTKMLAQAAMVRDIHSDYSTAFRLVATAIIGLTDNAPKGIVARLTQPARYPEERALRRAVWAFTRDSVAGLPSASLPAVSDWQPTLLQRVRVLMTNLSTAHGLNHTSSKLGSRLSKKSLSSSPLMSPPDLGADQPLRIRISTVHQVKGESLDAVLYMATKAHVSALLDGGSTEDGRIGYVAVTRARDLLWLGVPATALKILRADLEAKGFKDATAKIAAPPAGHGIGTP

SEQ ID NO: 66022 - protein, 486 aa, Komagataeibacter intermedius AF2
MHALRENADGKIEAIIGVTYGDADKSGRLKPRRWCGDFDETSMTSSMLENLRSVYLQPLRDAEQGLRPSRNSQLSRLLHLLSDEPGRTEIATALKTLDDTLKTQKPIQDTYDAISGRHLTMLGKVLAQKIDVGLTGTDFGKLAARLSLVVNNFDLERNGLGYNNLIFMAVVLSELAKNPDAAFRSLIIEEPEAHLHPQLQAVLLRYLSSLDKDDAGENLVQVFVTSHSPNFASIADIESVVCLVDAGTNCAAVFHPRLVNFEKGKRDKLARYLDVTRAELFFARRALFVEGAAELLLVNVLAQCHKHDLRNHGVSLISVEGLNFDCFMPLFGENAIPIRVAVITDADPSTTVDEKTVALYPAAFDTVDPSDTTKCMLKLQDDLVRVFHGQKTFEYDLALIPKNRPIMLKALTDIHPQIGKTLKEKVDASVGDQAKAEALFRGMFERESTNVSKGKFAQALAAQIQENRLEFEAPSYILQAIEHVCR

SEQ ID NO: 66023 - protein, 581 aa, Komagataeibacter intermedius AF2
MTDALSSEQRKIVNLPLIPITVTACAGSGKTKTAVHRLAAMRQMYDGSGLVALLSFSNVAVDTFRKEYSALSRRLPTIGRSSSVEIDTIDGFITSNVLRPHGHRVMKCDRIPYLVEGHEGFLARFKVYDGKISRSTASIDITSDGKGFRYTIGRGAKVIPENRAEAALTKLAAVGAYTHSSGRYWVLRTLREKSFVLRALARRYPHILIDEAQDIGPEHQAFLQLLIDAGSQISLIGDPNQAIYEFAHANGTFLRDYGTRPGVSAYNLTVNYRSLPAIVDVANHLTQRNDTAARKAAKDQAATYYMPFKETERDHALTSFRSLMETATIRPAQGVVLCRSKSLADKWAGELDGQGIGVVRWFADAAISRDLKKNYYQSFVQVCQGIVGLLSDKHGSIVTYIVRPTDNHMRSVRKIIWLFMRDAATGLPPATLVANNEWHHLLSTRVQALIAILVTNFGFEAAQNLGRRLAKTKLEARPLIAMPSLTAAIDMIFRTSTVHKVKGESLEAVLYVAQKGHVRALLDGTSTEEGRIGYVALTRARNLFVLGVPDSCVAEFEAELHAAGLQRVGFREQPIEPLSES

SEQ ID NO: 66024 - protein, 662 aa, Komagataeibacter intermedius AF2
MKIETISIRNFRCFGPEWTEVSLQEQVTAFVGGNGAGKTTLFQALSRLFGVMRTDRTVTKKDFHIAQNEEELPDGRCLEIECMLGFPELDDEEDEDASSVPDFFNQMAASEPDGPLKVRIRLVARWMEDGTLDGTVEEDIRWITTLDDEFDWDACPKVSAVDRASIQVIYVPALRNATDRVTELLKGRLWRAALWSTDLGARATEGAELIQKQFEQEAPADFIIKRLTHRWQQVYEGDTDTTPNLRLIESRIEELVRRAEFVFHPDEAGRNRVLADLSDGQRSLFHIALTAATLETEQAALTLAATESPFDREKLRRTHLTLLAIEEPENSLSPFFLSRIMTQAREIGEMDTAQALISSHSASILSRIEADEVRYFRLDRQTRCASVKQLTLPEGDTEASTYVRLAVRSYPELYFARFVILAEGDSEQIVLPRLAEVRGVQLDPSFVPIVPLGGRYVSHFWRLFTDLGIPYATLLDFDLGRAHGGANMIRSAFAALKQIGRDFTANPLIVDGTIDLDDLDDLVDEDVLDVWEDNNWLQALRHEAVFFSDPIDLDFAMLEAFPAAYQHPNPGGRGPRTTEEAIAEKKTVVLKTNGKPGIYKGDQWDDSFAWYPYLFLSRSKPETHLAALSRITRQDLARGAPPELRALIDHVRDVLFPKPDEV

SEQ ID NO: 66025 - protein, 525 aa, Komagataeibacter intermedius AF2
MTFDAFTKHMLDHFRLAIPNAYRPPIDYSIAFPTRRDFDLFLKRHGRPDVSSDRFEQAIARTPLPFEKTVEKLCTRELLRAYWDDQYAMPDGALVSFAMINRLVDYMLRSNSRIKRALRLTYPFVFLDEFQDTTYAQYSLVNTAFRGSRSIFTAVGDDKQRIMGWAGAMNNAFDEFVDGFNAVRHALLRNWRSHEALVGIQQVIARQIDPDVEEVEARGQLEVDGATAAIWRFDNREQETQMIARWIRREVDEGRVAPHNVAILVRMRANSVEDELAPVLRDHGLTLRNLARNVGEIAIQDLLVEPLTEVILPLLRLGASARAPEAWSAAQDRLQALANVSSDDETVQERLQREIGEFSRNLRQIMRDEPLDTAVANRLFAQTLDFVGVERLRQAYPEYRRDADFQRVHNGFRILLRDCVENAVNWNDVLDRFEGKNQIPLMTIHKSKGLEFHTVIFFGLDAQTWWSLSPERNEELNSFFVAFTRAMQRAFFACCSERGKPIGWLEKLLLPAGVKQVDGVDIITP

SEQ ID NO: 66026 - protein, 494 aa, Vibrio owensii CAIM 1854 = LMG 25443
MSNGRHSRLSKLLKALNRKQLKQCKKDNELHPLESKLKEFNESLAGNEKLGIKDANKLITENLTNAIGHYFGQNTSIQFAESDFTKITESLTLLFFPDLSVEDQELFRELSQNSLGYNNLLYIASILAELTLDDEDEEQPLFKLLLIEEPEAHLHPQLQIRLLNHLKSVANENKSVQVIVTTHSTVLASSVELESIIHLSKSPEPIATPLRTCGLPTASSQFINRWLDVTKSNLLFASGVILVEGIAEQMIIPTLARIALKGQKEGRKSLEDLGISTINLNGIYFKHFMQLYCNIDNVDDAKGGLASNSIPIRCAGLTDLDPPKVTKKHVPDPENKGETKEIEENFIPYEGNMKAGTNHAIKLVDSINKSTNARLYVSKYKTLEYDLAMEGNNAALMSKIIASLWPKPKKGESSIIKDFTAMSKVDWTKKTPQEIAEAAHEILKRIDDDNIGKGMFAQVLTDEIQCDGSNFTVPEYIKNAIFWASSIDVAKEEL

SEQ ID NO: 66027 - protein, 585 aa, Vibrio owensii CAIM 1854 = LMG 25443
MKVEFTHEQLEYVNSSIEEHTFLEACPGSGKTEVVAAKVAKEIDSWKIKTGGLAVLSFANSATDELTIRVSKYLPHGQGMYPHFLGTFDSFIYKNIVSPLATELTGYLGEGGDASIRIIEPSANLGFRTKYGIASRGKINAHHYSFDLINETVAFETGKPELDKVLNSVTLKDWEFKHLLETKKRMLKGGFATYRDIECLAIDALFDDKYQHFVELFVKRFPLVIIDECQDLSDEQLTILQVLANKGTKLHFVGDLHQAIYGFRDVDPAKVQQFVKENHFTNLPLTRNFRSCQNIVELCAKLTGRNDIVGNVSWLEPRCLVVQYDNCPTELIDTFKEKCNGFNDSVLVSRGHSQIGKFQASVIQPNNIQKLALSMKLYNPKDMEALSHSLKYFSEFLRYHLSESCKPNSLNCPQSIDSNLSWRKFLFDSLNYLINNNLNSIEVNWSTWTKNAKTLIRDLPRQDFCSEAIANILAPLLELNLTSPSGSAKLEVASSLGSTTTSLIPYRKSTIHGAKGESHDVTIVISSARAGNESHWKNWIKNPDSEAARFAYVASSRPKEFLIWAVKTLKQPEKKQLEAVGFTIV

SEQ ID NO: 66028 - protein, 639 aa, Pseudomonas fluorescens
MKLCSLRISNFQSFGPQPVPITFEDITYLLGPNGAGKTAVLQALCRLFAFEPGLRRVRPSDFHVPVGLSDGEAGTTLWLEAEFSFPETADDEDNDTVAPHFDHMRLQATGDVPRVRYRLTATVDDEGDVEETLVYVTQADADGNPIVSSIVPKHQRNQIHLHYIPARRDPSDHIAYGATALLGRLLRATQWGGDRNTVKDLTDQITSCLAGNASVTALGQSLNASWKGLHKGAFFAEPKLTFVNSDIEVLLRHMSVSFTPGHGENEVDFSRLSDGQKSMLYLSLVLAAHSINRDVRLGKNTAIDPAKLKPPAFTILAMEEPENSLSPHYLGRIVNALKGSIGVDAQALIATHAPSMLRRVDPENIRYLRLGSNRCSVVSGIALPAKEDVAHKFVREAVQAFPEIYFSRLVVLGEGDSEEIVLPRILQAKGAPVDESAVTIAPLGGRHVNHFWRLLSQLGTPYITLLDLDLARYQGGWGRLKYVNDQLSLFEPSKVLPYTFPVWDDANTRIREKNVPITGSSETVFDHLEARGVFFSAPLDLDFAMLTAFPTAFNAIAMEATPESQKAVLGKSHEGAGQYTLQEQSWFDAYHHYFKLNSKPAAHLSALASLSDPQLLAGLPPVLDRLANAVIAALEESPE

SEQ ID NO: 66029 - protein, 559 aa, Pseudomonas fluorescens
MIHPDRWMHSPGLTLEANAWHAIKDTEHSLVLLAGPGAGKTEVLAQRADFLLRTGSCRYPKRILAISFKSDASRNLKERVSLRCGWEQATRFDSFTFHSFANRIVSRFRVLLTGPDTLKPDYSIGKEAIQGEQITFMQLLPMALKILRMSKIARNTIRQTYAHVFLDEFQDCTSDQYQLIKLLFEGTPALLTAVGDTKQTIMGWAGALDGIFKIYADDFVARPLRLYRNFRSKPRLLRMQNSVIRDIDPSALMPDEMIAGDDGVIRAGNFSSSAAEAVSLANLIQKWIEVENLRPAEIAVLFRGEIHLYGEELMEQLAARNIPFRNENTLQDLLKEPAARLMIDYLTCLYTRGANKAWSRLMDLFAPFDDEGNSDRTHKSFERCYKQHQKQVRAAAKTAAPFTDWWELAKAFFDTLGHAVMTTLSSDYETKRRLKEIIRDTRDHITSLLQVDPDLTRALARFSDDNAVRFLSMHKSKGLEFHSVIILGVEQQSFRGKIGEERQVFFVAVSRAKDRLIITTANQRRRPVGISAGKRWDIARQPHVAFVTYVTEHLSPKQP

SEQ ID NO: 66030 - protein, 701 aa, Enterobacter ludwigii
MKVSRVAIRNFRRLENVQIDIEEKESIFVGPNNSGKTSATAVFRCFLGGRDFKIYDFSVARIADLDTFGLTGDETLLPKISLDLWFAIDPESIGFGRVFTLLPNLSDFTNVGIRLSYEVSEVRKLYENYNAAYPPKEDGTSSKSLSQYLSIDGNLGRHFTVCYYSLDEKIQEGAPSEILSSYLDPDEGKRLLKQLIRVEFVDAQRNINDDNSSRSNRLSSAFATFYQKNLEQVDHAADAHSVIDANNKQLTDHYAKQFAPLINLIKRLGVPSINDRELQIISSLSPETALRGNTELLYIDPSRKHELPELYNGLGFKNLIYMAIQARHFHSQWVMTTENRPLCLMIFIEEPEVHLHAQVQQTFISNIWQVINQSAEVAGEPNLVPQLVITTHSSHIMEAVDFEKVRYFQRCHCEGETEAASIRNASMVRSLRAFQPNVETIDGKVIPPSESLAFLKRYLRLTHCDLFFADAGILVEGAVEKLLMPTMIERAAERLRTVYLTVLEVGGAYAHRFEGLLSFLHIPYLVITDIDSVSPTGYPKACRADVAGAKTSNASLKKLCGLTTIDQLIALTCAQKQHNDKDRCIAFQTDVLVEENDASEMLRPRTLEEAIVYENFGLLRSGALSIGITVRASLSDAYQDVYDMVRSDNFKKTDFAMDILACAEQWIVPGYIAEGLKWLESRLLPPLPVVVDTKASIAAGE

SEQ ID NO: 66031 - protein, 612 aa, Enterobacter ludwigii
MRTWIESEADIQVRACIDGHRSFAMIAGAGAGKTSSLVDALGRVRDNEGNILRKHGQRIACITFTKRAVEVIKKRLGFDELYLVSTLHGFLWGLISHFHENIRQALYESRIPNLIDKAMEDDNGGNSKKALKARAKIERLTEQLALLEAVNHFDYSDTSFSDYEKGQIGHDDVIEIATYLLGNNQTLRRIIGLRFPYIFVDEAQDTFEGIVSGLNLVCAGDELPMIGYFGDPWQQIYDRSAGDFAPPDKGKVIKKAENFRCSKSVIRLLNAYRGDVEQYAAGENAECEGSVEFLLIKAEEPTEPRRRYSEEQIERALARMDAAVENWGWAGRDDVMKLFLARQMIARRLGFADLNRLFTGDYASSRAQDAFEEGTHFLLKPFLSTICPLITAQSQGDDRKIINLLRRDSPAFASDGLNAEKSLKVMIDTSRSLVEQLHALWDTETIGTLLHFCVEMQIIQPSERLSEHLDRPPRTEPFNEELHSFDKGDWLADSFFKMATGGVSRYFEYLNNNTAYSTQHGVKGEEYPKVLVVYDDVEAAWNQYSFSKTLTPLTAGEPSDRQRSVTQKLVYVSFSRAEEDLRIVLFTANPEGAQAELIGSKLLSPDQIRIMA

SEQ ID NO: 66032 - protein, 732 aa, Enterobacter cloacae
MYISFLKINNFRKFGETENIIGFVKSHSESPKKDLVASSTTLVIGKNNSGKTTVTKALELLHSDSEKITGHDFNYNYSKKILEKHLNDDFSIAPKISFEIEVILDDEEHDLIGEFRPFIDAKKLLTDGVRKANVIIEYEVKVIADYQSKIEALKKDCLSCEGDFEVTFRKYLDILSKTQFRRRIKNYQNISIETLTPRNFIDLRVISAAKNIHDKRLLTKSFNKIIKYMYECDESEYKGIISLVDGNNESLTKNIKVKHQSGVERILKKIISDKDIGIELRSELTFDKLMSDLIIYEHKDGEFLVPESQFGLGYASLVSILGELIDYTNQSLKEIGQSRIRLLCIEEPEVFMHPQMQINFIRHIQEALNEILSSHVAELNSLKSQILITTHSSHILNSVIHSSNTFDDINYIYLKNGNAASVLLKDNDIANTQKKSLQFDFIKKHIKHQTPDLFFSDAIIFVEGITEERVLNSYIEDDPVLNRMHISVFRIDGAHAKVYEKLINKLQIPSLIITDIDFKKEAKKNDNNAAEITVTVDVAALVEERAEKVEQMDEEDEELEDMDEEVDAIIGQISVLTDDLITTNATLRHFFKNKKISAINDFYVKDNLMVVFQKDGVAIPRENPEVIYYATSFEEALILKNYDNELLLDILKKVIKKEVLNILGDANDACNIAHNSRDLQKLLTRKKSSFSNSLIFSLVTINQNKPELPDYILKGFEWLTLKLKREGVAYEL

SEQ ID NO: 66033 - protein, 681 aa, Enterobacter cloacae
MNFELDKQQAEIEKKVEAELFKLINDAESFYFISGAGSGKTHALISGVNRFIKDNYSQLILNGQKVLCITFTNNAADEIKHRLGDNDLVITSTIHSYIWDVVKYHRDLLLDEHVIYLSEEIARIHNDIFKFESSNKTVLKVRCLEESKLNAIIDCILEDKSKFYESLKSASKFWIYLESITEEDVYNYLKGNYQELSTVFKKLVRSQEFKRCICKIEEKDTQYSTIKYFNTKNIEVLYKNIIGHNTLLVYASRLLSKYTLLSKCIIDSHPLVFIDEYQDTDEGIINLFLGAYEISRKENKKLCLGFFGDPMQTIYKESVHKESESLKILVKNINRRSHQNIVSCINKIRGGGQYINQQPIKIYNDHSSPSLIIEKEENYTNDYLSSVIIEHKNEWGISDTSKLACLVLKNEMLSQLFGFEILFTKMLNIYQAEHVKGFEMIGAEFLFKETRYAGPLPALLHDLLMPLYLLKRKAEFSVSDFFNQKEIQCHTLSGILNTLKVIESLKIKNLTDLVCQMSNLYETQSSEVKIILGYNFEIVTHDVEHLKMEIIERCRLKDTLKLPSLLDELFEIDIEQFFLWLDFIYQDYTGELVSYLTCHASKGLEFDNVIIFLSDSFNRKEGYFSNLLNSDMNSHLEPLLESARRLLYVSSSRAIKNLKIYLFTDKKIDKSKVEYLFGHNA

SEQ ID NO: 66034 - protein, 744 aa, Hafnia alvei
MYISFLKINNFRKFGEHDNIIGFVKSHSESPQKDLVASSTTLVIGKNNSGKTTVTKALELLHSDSEKITGHDFNYSYSKMILEQNLADKSHITPKLSFEIEIILDDMAHDLIGDFQPFIDARKSLIDGVRKANIIIEYEVKIKADYISKIEELREFCSRNTHNPEAIFRKYLDILSKTQFRRRIKNYQNINIDTLTPKNIIDLRVISAAKNIHDKRLLTKSFNKIIKYMYECDEVEYKGILDLVDGNNQSLTQNIKIKHQSGVERILAKIISDKDIGIELRSELTFDKLMSDLITYEHKDGEFLVPESQFGLGYASLVSIIGEIIDYTNQSLKETSQSRIRLLCIEEPEVFMHPQMQINFIRHIQEALNEILSSHVESLTSLKSQILITTHSSHILNSVIHSSNTFDDINYIYLKDGNAANVLLKDKDIANTKEKSLQFEFIKKHIKHQTPDLFFSDAIIFVEGITEERVLNSYIEDHPVLNRMHISVFRIDGAHAKVYEKLINKIQIPSLIITDIDFKIDVKSSSTNIVEDSGGIDDANDIDDADDIDDADDADDADDADDADDADDADDADDADIKNKILGQVSILSEDLITTNATLHHFFGQRKITALKDYYVKDNLMIVFQKDGIGIPKACPKITYYATSFEEALILKNYDNNLLLDILLKVINKETLNTLGNPRDVCNIAHNSRLLQKLLSRKKSVFSNNLIFSLVTTEHNKPELPDYILKGFEWLTLKLKRDGVSYEI

SEQ ID NO: 66035 - protein, 682 aa, Hafnia alvei
MKFELDQQQVEVEKSVDIELFELIKNSESFYFISGAGSGKTHALITGVNKFIKDNYAQLLLNGQKILCITYTNNAADEIKHRLGDNDLVITSTIHSYIWDVVKFHTGLLLDEHVIFLSEQIKRIHSETYELPTSNKTLLKVRSLKELQLNAIIDCILEEKNSFYDSLKSASKFWEYLKSITDIEVFNHLKGNYQDLSSILKKLVRSQEFKICKCKIEEKEDKYTTIKYFNTKNIEVLHKNIIGHNTLLIYASRLLQKYALLSKCIIDAHPLIFIDEYQDTDENIINLFLDINDIAKEENKKICLGFFGDPMQTIYKDSIIRESNSLKKLVKNINRRSHQNIVACINKIRGSNQDVKQRPIKIYSEQCNPSLIIENENNYTNDYLSSIIQRHKSEWDINENSKLACLVLKNEMLSQLLGFEPLFTTMLEIYNAEHAKGFEMIGSEFLFREIRYAGSLPSLLHDLLMPLYLLKRKANFSVSDFFNKKPIPSYNLSDILNSIKLIESLNFKCLSDFIREISEIYITQDVEIQNLINYNFDLVIEGLASAKDKIIETCRFKDTVKLPLLLDKLFQLDMEQFFLWLDFVYQSYPETLVSYLTCHASKGLEFDNVIIFLSDSFNRKKGYFSNLLNSDINSNLEPQLESARRLLYVSSSRAINNLKIYLFTNKEIDKSKIEHLFTQCTN

SEQ ID NO: 66036 - protein, 583 aa, Xenorhabdus nematophila str. Anatoliense
MYLGKLKISRFRSCDDVTVSLRPDLTVLVGENNGGKSNVVDAIRLLTLPLSGRRERYPEDEDVRRYSTVPSFQIEGVFQGLSDTLKGLLISAVPDPTKSEATFGYRYESRSEHAPRGKTTVWAGRFDTNGPELGSSELIRHVYLPPLRDAHQVLGTSSGTRVMALLRNFLPKEREQDFLAGVRRADNRPEILTTINTDISAALGLLTNGVRPQIAALDFGSETLLDVARDLRFRMADTGLIPEDIRSSGLGYSNLLYMATVVVELNKAKEADLTIFLVEEPEAHLHPQLQVLVLEFLLDQARQSASRIIEPGKPEGRIQIVVTTHSPNLTAWVSPRHLVVMRSRHREQDGKAISESVSVPIAEIGLKPKTLDKISRYLDVTRSALLFGNRAILVEGIAEALLLPVLAQKLVLADDLDGWLRFKGAVIVPIEGVDFRPYVEVLLRPYGDARIADRLIVITDADPTVLGNRKVDLENLAATHGAPDALIVLTNQHTLEHEIFGAGNESFLKSVFLRLHRNSRRDWEAQIEGIPEQDRPNAFLKLIETKKTRKGDLAQAMASRIEAGEPFVVPPYLIDAIRGASRI

SEQ ID NO: 66037 - protein, 591 aa, Xenorhabdus nematophila str. Anatoliense; identical to SEQ ID NO: 64137

SEQ ID NO: 66038 - protein, 325 aa, Xenorhabdus nematophila str. Anatoliense
MGTRSWASMLTIKSFIEILSHRHIAESEPLFPILIVEEPEAHLHPNAQKTLYRQLSDTNGQLILSTHSPFLAAMADLYQIRSLVKTKNGIVAHKISHPMTDDEKKSISRSILAKNGELLFAKCMLLCEGVTEEQVLPAMFEIYASATPWSVGLSCVNVGGKDKYIHFALLPFSFGIPTCIISDNDINPNSGTKTQDDVTQQIEKLSKKMCLSLTKDFYDIYFLDDGNDFEKELIDHGLLDEIIDAFVLLATTGDKNNGKFREAKYNEFNKLTNEKLLEKMSKEKASYAGFLADVLLENKRKKTVNDLLPPNVRASFDCIKGWLAC

SEQ ID NO: 66039 - protein, 631 aa, Xenorhabdus nematophila str. Anatoliense
MLNLSKGQEAVVHAEIGLPMQVLAAAGSGKTRVLTERVRYLIENTRKDGIIALTFSNKAAEEMQIRLADLDVLSERCWIATIHAVAQRILDQYGHTIGLPSELHIYERDLDRKTVFLQSLRESGIGIDDFLNAGDEKTRKNRERIIHNYLEQFSVVKRELLTEEEIKEKYTSNESFLSVLQAYQGALVRSGGLDFDDILVYAHRILMEQPWCANIYRAKYKHICVDEAQDLNKAQYEFIKVLCGDQIKSVMMVGDPNQMIYGFNGSSSNYLCKLFLQDFSAQVFELKENYRSSKAVISLANKLKPGSQVEADFVLDGQYEIHKCQNEEDEATWICNKVSELLCQKTNIEIEGDISLTNMVVIARNRFVFLKLEKVLGEKGIPYSLKKSERQAEPSSLFGRVLDLAIRVRLNPKDWIDGKKLCTALKISVPSVWGNDNLLLDMAAAVRHSAISFPDIQADLLEEIQGLDIEKPNIPKLYDRFNTIIQGLNNVNLPKEDNELERSLQELDDFRNCWTTFKRKGLGESLMSFRNAIALGQVAENYDPTGLTLSTVHTMKGLEKDIVFLMGMCEGVFPDYRANTKKELEEELNSAFVAITRAKRWIFVSYPLQRVMPWGSLKSQTVSRFVTMLQK

SEQ ID NO: 66040 - protein, 764 aa, Bacillus sp. B-jedd
MNIKFVEIQNFRKLKCCRIEFTEDTTLFVGANNSGKTTAMEALIKFLQEKKFSVNDFTVTNWLEINSIGQQWKKSKESSLQLNEEELLALMPTLDVWIHVGDDEIHYVTHLIPSLDWKGGLIGVRLRLEPKDIQNLYKDFLNISQTAEDTVVASKIGDIDDQLVLWPRDLKDYISKTIQTQFSIQSYLLDPKNCVVPENGIAKPQNLPIYSERLDTDPFKNLFRVDYIRAQRGLTDNANDSSRGIRKGKLSAQLREYYDVHIDPEKSPTSSDIDALRAIEIAQNSFNEKLQNGFKDALSELETLGYPGFSNPKISLTTKLNPMDGLSHDSAVQFNVIEDDDQTGDSSIRLPEQYNGLGYQNLISIIFELMRFRDEWLRIGKGSKRNKTDNDAYFIPPLHLVLVEEPEAHLHIQVQQVFIRQAYGVLRNRSELLEPSINLTTQLVVSTHSSHIAYEKSFSSLRYFRRLPANSIYALPISVVINLSNVFGEGNETERFVTRYLQTTHSDLFFADAVILVEGPAERMLVPHFIRNQFKGLTEKYISLLEIGGSHAHRLRPLIEHLGITCLIVTDLDSVSPQNNNSAIVPKRNQGYTTNNDTLKTWLPQKMSIDELLNLNKEQKVKRHEDQHFAIRVAYQHPVNVRLVQDEVEVEALPYTFEDALVYENIGIFSTLDGIGLIKKFKNALNEISSITDLGEKLFNDLRTGKKAEFALDIIHLIDPKELTVPKYIRDGLSWLDVQLGGIEQNDAKEFVEEDVKEVVSMNG

SEQ ID NO: 66041 - protein, 632 aa, Bacillus sp. B-jedd
MARAEYNIDNHMDDHVDTEILNCLNLEKPKSFFLFAGAGSGKTRTLVKVLNEFGIKYETKMRLTGQRVAVITYTNAACEEVERRLEYNPLFSISTIHSFIWELIKGFNNDIKEWKINKLAAEIDELKGLIAKGKLGAKINYERQQKIEKNIKIIDELPKIKQFTYSPNGMNQDKQSLSHNDVISIGAYFLQNKPLMQKILVRKFPILFIDESQDTSKELINALFEVERIHYHSFTLGLFGDTMQRIYASGKEDLGRDLPARWVTPRKKMNHRCPPRIINLINRIRSDVDDKEQLSRTDKAEGIVRLFIAPIESDREKIEREVARQMTSITGDENWELSRYTTLILEHHMAAKRLGFMELFEPLYKSKKYNDSLLKGTSEELNFFINLILPLIDAHKIGDQFTIARILCKYSPLMTIINEEIKQLVRVKETDKAVKQFFNEIDKHIDPTCLEVLRLIKAQNLFNLPDTLAQLLLRSDLGITSKDENEAENIGIDDYLDELLASFHAPISQVRAYGAYLSGYASFMTHQGVKGLEFPRVMTIIDDSDARGFLFNYEKLFGAEDKSKTDIKNEKDGKETSIDRTRRLFYVACSRAEESLAIVAYSKNPEAVKTNVLLREWFEEEEVITYSGLGII

SEQ ID NO: 66042 - protein, 769 aa, Serratia symbiotica
MHLHSYRLRNFRRLKDAHIELANDISIFVGSNNSGKTSATQAIHAFITGGRDRFSLYDFSSSCWKNFDEGGNIDLAAPIPEDFSFPSIDLDLWLEVAAPDLYLVIPLLPSTEWEGTKVGIRVSLTAKSPTNLIKNFQEAKAKGTAQAAELPPDSQYIPWPRSMTDYLQRELQSEYELRYFILDSKQFDKTLREIGDYVPDELGGEPGGGTILKSLIHIDNLGAQRHLADPNPEAGGRSEDLSKRLSRFYKRNLNQRQDDHIALQALFNSEQALNIHLDGVFKPMLDRLAKLGYPGVNNPRLKIMSALDPAHVMSQDARVHYQIGDGEDTATLPDSYNGLGFKNLIYMVVEILDSQARWEAMHNRPPLHLLFVEEPEAHLHAQLQQVFIRNILELLKIESDDGSIFGSQMVITTHSPHILYERGFKPIRYFRRKKIGREQLTEVLNLSAFYQSQPDDRDFLERYLKLTHCDLFFSDAAILVEGNVERLLLPVMIRKSAKTLRSACLCILEVGGAFGHRFQSLIEFLGLTTLIITDIDSVALVAQAADDAVDDEEIEEFEVPADAEDYAAGQARDNGQDPVGEPMVPAPKKKYGKACLPSKPGAATSNQTLIKWLPGKLTIEDLRNASEADKTHVLEDDAKVRVAYQIERAITWNEVTETLCGRTLEEDFGLENPEWSQAITRKPLGLIVKARSASPAALAKGLHQKVSRKSFDKTKFALAVLTEDEEAWHVPAYIRDGLVWLKDEIRIELETVLPDLINEEDIVTGGEHE

SEQ ID NO: 66043 - protein, 651 aa, Serratia symbiotica
MSSRANKPDTQADMDLRNCLGNVPPRSFIMKAGAGSGKTTSLIKGLSSVIQIHGDKLKKTRQRIACITYTEIAAGEIWRDVGSDPLVHVSTIHSFMWLLAKPFQNDIRVWVSGRIVEKIEALEEKRATYGPRVQQRTKDKDVRDLERLSRQSERIATVKGFRYGTGSNYAKGILGHDDILKLVSYLISERPLFRTLLARQFPFVFVDESQDTTTAVVQALKVVEREPGVTLCLGFFGDPMQRIYVTGTGQIEAEPTWADIPKSENFRCSTKVLNLANAIRRDGDDLVQTPGQRLGPEGLVPTPEGSAHLFILPADETRDANLVRVREWMAARTGDDFWRSGDDDQERVKLLVIVHQMAARRLGFGDLYSALNSRAPSAFKDGFLDGSAWPISSCVKFLIPIAIAHTNGQQLEVMRLIREYSLLLDKESLVGASVAERLKVLGELVASITAGVAGHSGATIGDLLKQVNSSDLLVLDPRLVSYLDQNAVLPFQPEPEAGENNDDDVQEDDESDKEMAAMDAFLACPASQLLPYHTYISERSPFWTQQGIKGAEFDRVLVVLDDAESNHFQFSYEKYLGLEEPSDNDQKHIDAGEETTMDRTRRLFYVSCTRALKDLAVVLFTADPEQAVAHIRQLDLFEDEAIHTQGVFETA

SEQ ID NO: 66044 - protein, 800 aa, Mesorhizobium plurifarium
MGALAVHIELLEIANFRKLLSTRVDLSTTTTLLVGANNSGKTSAMLALRRFLSPRRCPFEMHDFTLCHWPTIIAVGEAWVAARNAEEIIDLIVDPWVSALPTLDLWLHVEAGEMHHVRDLIPTLDWEGGRLGVRLRYEPKDLALLYKEYMGAVSDAETMRAAAIAAAAAENPDADPPATPPKLTIWPESLIDFLSKRLSTHFAIRAYSLDPGQLASPAKSLARPQVLPGGSRPIDGDPLSGLIRVHDIPAQRGFGEEQQAAEEDDVPVSTSGSRLSDQLRSYYAKHLDPTKGPGPKDLGALQAIEAAQDAFDRRLTESFKAAFTEVEGMGYPGVSDPRPRVSTRLKAIDGLNHNAAISFEVDVISEDGATTPVLRLPEANNGLGYQNLISMIFRLMSFRDAWMRVGKASTGGTVTTTEPLHLVLVEEPEAHLHAQVQQVFIKKAYAVLRAHEDLGDSQKLRTQLVVSTHSSHVAHETSFSCLRYFRRLPAGMAAKVPVSTVVNLSEVFGPGSETERFVTRYLRAQHADLFFADAAILVEGPAERTLVPNFIRAHYDELNQCYITLLEIGGSHAHRLKPLIDHLGLLTLIITDLDTLDGTGGASVQPAKGAGQKTNNATLKTWVPKLNEVDELMRADVGTKTRHEDDDPLFAVRAAYQIPLGLTSPGIVGPEVAYPYTFEDALAFENLSFFSELDGTGLVRKFRDAIVNGGGAAAIGEKMYLALKNGKKAEFALDVMEAENFDRIVVPRYIAEGLEWLLAQLKRKQVEILPLVKEAPSPEEVEVNSSVEEHVVAEVEGADS

SEQ ID NO: 66045 - protein, 635 aa, Mesorhizobium plurifarium
MSAVDDKFDSEADETILACLNIEKPRSFFLYAGAGSGKTRSLVEAIRTVCKEQGRRLSLSGQKIGVITYTNAACDEIKQRLEFDPRVEVSTIHAFAWSLIAGYDGDIRRWLSTRLLADIAELEEAQAKGRANSKAASDRARSIESKRRRRENLAQITRFVYSPTGDNRTRDSLSHAEVIAMTADFLGAKLGLRRLLVTRFPILLIDESQDTSRRLMDALLDVEAGYREAFCLGLFGDTMQRIYADGKERLGEAIPKAWARPRKRMNHRCPTRVITLINKIRRDEDGEKQQPRSDAEQGVVRLFVISQAIADKSAAEATVAARMAEITGDPSWAEGAEAIKTLALEHLMSARRFGFEQFFEPLYAVERIRTSFLQGTGAGVGLFTREILPLVAALRAGDRFAVAAIVRRTSPLLERKALEAAGEKQVDILSKVRAACDGLLALVNRDEKPTARSVLRYVAEVNLFTIPEVLVPFSAADAVVAEDEIDAAGDAGDQEEEVDIKSELGGWRLALEAPFDQIERYDRYVRGVSQFDTHQGVKGLEFPRIMVVVSDDEARGFMFAYDKLFATKAKSKTDLENEAAGKETTIDRTRRLFYVTCSRAEQSLAVVYYTADPTLARDAMIRQEWFEPGEIELIA

SEQ ID NO: 66046 - protein, 564 aa, Mesorhizobium plurifarium
MKDVVIRFQSGLNVIVGPNNIGKTAVIDALRSLLPGADDPYPRFDEDDLHAPKEGKATGEIVFKYTFRDLTLDDEADFLPALKQDADGKTIAVIGIAYGSSDRTGRLRPRRWCGDHEDVGLTASILENLRSVYLPPLRDASQGLRPSRASQLSRLLQLLTDDAGRAEIADTLKKLDDELRKHKLIVDTQEAVSSRHKSMLGKTLAQELEVGLSASDFQRLAARLSLLVDAFEIERNGLGYNNLIFMAVVLSELAKNADAAFRSLIVEEPEAHLHPQLQAVLLKYLSKIECKPGEREVQVFVTSHSPNFASIAKLDSIACLVNVGSKVEAFHPRSVKFEKGKREKLERYLDVTRAEFFFARRVIFVEGAAELLLTNVLAMKLGVDLRDHGVSLISVEGLNFDSFLPLFGKNAIKVPVAVITDADPQKVEVPGGDPIALYPEAADVVEVSDNTKAMMKLEDDYLKVFHGVKTFEYDLALHQANRAVMISALKEIHPKIGAGLEVATAAAASDAAKAQALFRGMFERAQNNVQKGRFAQALVEKLLEPGREVVVPDYIRRAIDHACG

SEQ ID NO: 66047 - protein, 806 aa, Mesorhizobium plurifarium
MLAADRMGLSSQQKDIVGLPLGAVCVTACAGSGKTRTAVHRLHEMRTKLDDPHGIVALLSFSNVAVDTFHRDYSAVAQLNLTSLRSGVEVDTVDGFITSHILRPHAYRTMGANRSAYLVSGAEPFLKNFTVWDGTRAYPTASVGVRFENGTFVYSVMGGYAPVQIPAQAAETAIEKLGRVGAYTHSIGRYWAYRALKRQPFILKALARRYPHIVVDEAQDIGSEHQAIFELLIDAGVHISLIGDVNQGIYEFSGADGKFLSGYGKRAGVVSRELTTNYRSVPNIQDVANKLSGQRDKADRVAPAALSGAYYLTYKKDGKQALLSAFRSMLKGAELEESRAAVVCRSSKWAEEWGGGGEAPGQGVVKMFARSTIYRDSMQRYDDAFRGAFNAIVGLLADQHGDLPHKMAQPMQYPELRLLRQRIWRFVRDPHTGLPSGKMIANEGWHKALKERVKVLLVELAKEFGLQSGENLGNKLASKGLPSTPLISVPDLADEVGRPLRVCTVHQVKGESIDGVMYIADKSHVKALLAGTKEEIGRIGYVAVTRARNLFVLAIPENSATEFEAGLRDRGFKKAGLVRLPAIGKSSTTMQPVKRAVSPIGEPQVSSAGMPVTSGERETKDPSQNTEMPFYVFGYGSLMWDDWQAKHGGNVGVRASLSDYRRAFNKPSTVRWGTSQAPGPTLNIEQEQGAVCEGLIFELPGNKRKAVMMELEAREGKGFEFPELAVRAQDGHEIVAVVPIYNGSNKISVKNITEFASMVLSASGKEGGCVEYVKHVAAHLDQLGINDPAVNELSDAIGGKQTKNIE

SEQ ID NO: 66048 - protein, 594 aa, Klebsiella variicola; identical to SEQ ID NO: 64482

SEQ ID NO: 66049 - protein, 605 aa, Klebsiella variicola
MPSRSVSAAYLAQAAELAGNPGQLAAYHSQGHCVVLAGPGSGKTKTLVLKLARILAEDVQAPRGAACITYSQECARELTRRLEALGLREAPNLFIGTVHGFCLRHLLMPYGRLADLPIPFPLSVVSQRESERLLRQSGDRLFGANHPYKAIDLGRHRRSVLNRNSVAWSAEEELAAWAEAYEAALRQQGLIDYDDMVIFGQRLIIEHDWVLPLVQAKFPILAVDEYQDLGVALHRMVKRLAFEGGVRLFAVGDADQSIYGFTGADGALLLELADRRDVETVRLQLNYRSGAGIVNASEMVLGEVRGYRANDPNRQTTIAFQLCPDGLVDQAVHAVAQIIPAALAAKPGRTLGDIAILYKDYRAGDVVADAVTAGGFDYIRVDTAAPYRKVTLTSWVEDCAAWCAGGWRIGHPQLRGLIDRYIAFHRARLDDACARRKGQELTRLLWALRADRHPACDFVASLRNDLVDSLLATEPTLSDQAEQLDRMTAALAEGGTLAMLDITSLGGRDGSPEHLNLLTLHSAKGCEYDVVIMVGLDLGNLPWRNEAPEKLRESRRLFYVGLTRARDEVHMLYSGFVDGRYGPMRLGRSPFLDELEERMRGAGLR

SEQ ID NO: 66050 - protein, 659 aa, Streptomyces albus
MFIEKLTLENFKCFGPGRTSVGLDSGVTAFIGANGSGKTAACEALLRLFGVSAKERAVHVDDFAVPADETVAPASRELMVEVVLVFPELHSEAKDESEAEAVSETPGSQGEAPRAVPEFFRRMAANDEGDLKVRVVLRAEWVDDGTVEGAITETREVVQTLADDYSEDDCVPLTPAERSRIQMIYIPASRDGVRQVTTLLKSRLWRAAQWSTGLRDLVSENASEVARTFTNEPAVQAVEGALTARWQELHDAGVHSDPKLRLLDSDFNQLVRGSELVFEPDRNAQPRPASILSDGQRSLLHLALVAAALDVESEVYDGQHQDSFTLEAVHLPALTLIVVEEPENSLSPFYLSRIVTQLQALSSSTATQAVLSSHSASVLTRIRPEDVRHFRTEATTSTAAVRAITLPEDATEAGKYLREAVRAHPELYFAKFVVLGEGDTEELVIPRIAQARGVHLDPSFVAMVPLSGRHTNHMWKLLNDLAIPHATLLDFDYGKEGAGPARLRDAFSRLMDNGLDPLKELHGYDNVDDIHDGLSAEALQTVLAHLRTFGVFFATPLDLDYSMLMSFPSAYTHLEPGERGPGSTDPMPTVFGENGTEPAYWGTDVKIERLRWYRYLFLSRSKPSTHLRALGRLTDAELKSDAPKVLAALVRYIQQEAGL

SEQ ID NO: 66051 - protein, 641 aa, Streptomyces albus
MSGPGASRAKSPNATSLVPADAWRPIGIEDLEPVAWEALRDSGNVAVVAGPGAGKTEFLAQRAAYFLQTGICPWPQRILAISFKRDAAVNLGRRVTARVPEHGGRFVSMTFDAFTKSLVDRFAAALPADWRMNDEYEIRAATGVEVRSFLNDLAFTAPQPLTREVARLQPARFMTDLVGRWRLPTTIPIGVEIDATSYAVREWWRARYLRPGKPQLDFVMINRLAELLVREVTQLRRALRMTYPLVFVDEFQDTTGAQFSFLAAVFGEKAAVTAVGDTKQRIMGWAGALPRAVQRFAEAFDATSYSLAWNFRSSDALVELQHVIASKLEPNTVRATSKATAEDGHDPAALWTFRSPEREATFIADWIARDIAKSDRGPADFALIARQKIKDFEPLFRSRLAAHCIKLRNDDAQVGKMRLQDLLKSETARLLMGVLRLAQHPQGFASIWQDVSTTLERVHGAADDDVAQRRVGEHLTQVTGRLRTWLRSHSPMTTPAADVVQEMLDLVDSAALQRYIKSAVPGEDFSLVTDAFAARLEEASSSATNWGEALDEFECADAVVLLTAHRSKGLEYHTVFFLGIHERQWWSYQNDPREGTSTFFVGLSRAAQRLILTTDRVDSTGPLAALFAMLKEAGVPEVAQD

SEQ ID NO: 66052 - protein, 651 aa, Streptomyces albus
MRISRVLVENYRNFRKLLIDPFPPSAVIVGENGVGKTNFLRALRIVLDPDLPDSARWLRPEDICEASAASYSDGVRVRIEVDITDFAGELAAEASLDGCFVSLDPLTARLTYVFEPLASVAESAGRQLTRDDYTWDISAGIDGDRDGKRIRRDINFTVLQALRDAVGDLSRWRDSPLQDLLELRRPQQAALTSTAEEVATAMETLAREPEIGRLAEELSNRLTSMAGERTDIAPSFGFASSDPDRLIRSIRLFVDRAGTRSVSDASTGNANILYLALLLERSRLRKESNAIVDTILGVEEPEAHLHPVLQRQVFSHLLHNEASLMVTTHSPHIAAVSRLDSLILLRKTADGSTAASYTSRADFSADEKEDLERYLDVSRAELLFCSAAILVEGTAEVYLVPALAQALGFNLDAYGVIVANIGGTDFLPFRQLLGEDSLNIPHVILTDGDPTNKKGEYLHYGLSRAAKLMHGAAVDEFTQRVEEFLAKDPESATLDLRLEAAKVGVFMGPKTLEVDVAPLLGPHMVKAHDQFNDVSENLKEKFKVAVDGLNDGDSSHQKQLLLRIDSISKGRFAQRLAHHVEQDGLASFRDAMCGQAPSELLPSGNAYRFSEQLFTDSTYGYLISALDNVSRQVRNHGLFEVKPALPGPEAQ

SEQ ID NO: 66053 - protein, 624 aa, Streptomyces albus
MTKDLRVRPVLAREILALNEDQQQAVTHDGDLVVLAGPGSGKTRTLVARVGYLLETAKSSSRGVAAITYTNHAAREISERLARLGISASGRLTAGTLHSWCLSNILRPYSTLVGRCHPNRLTVLDDKSKEWVNLLEECFERAGVMLIAKYEIPAFTKARRRLAVGDAGEPGDPMVDAVRIFENEMSDRGFIDFDLMVSSSLSLLVENPRVAQLVAAKYPYIVVDEYQDLGPVLHGLVTFLNEAAGIQVSAFGDPDQTVMGFTGADPRYLNELTEKFHPVTLKVNYRSGRAIIAASHAVLGEKRDHRAREDREDHGVIEPIEVRSGLRRHSQIVVQKISELTASGVPAHEIAVLYPRKGPLLTSLLREFSVGSVDYIHERDGLLPSGPVADFIRACAARVVSGYQPSIGRESSADAVQTVGELAATYRALRRDGGLEDIPHRFVSKRIASLVRLNSSREIPATLEWLDGLVENLELSRLAQASPRRLDINSIEDFKECCIDNALTLVDISAGELRTGKVALTTYHSAKGREWQVVILPGLVDGIMPSRFWDRKRKLFPEPPPGRLKQDRLTFYVGLTRAKSAAILLYGDHWETDWGGRNTLGVSRFARDVLTQLSASGDSLSPPR

SEQ ID NO: 66054 - protein, 638 aa, Pseudomonas fluorescens
MYLRTLDIHGFKCFGEPFTIEFHDGLNVLVGENGAGKTGVIAAIRQLFNDSESGKRLINERDFHRGFHEAAVAAQRIHIQATFSGLDENDAIAFRDWCGNEDEAKLTFTALNVESRGRFKSQLYGGYARATALETEILDLIHCIYLPPLRDAETKLRDGRQSRLARLLKALCRKELDTARKEGKPHPLEERVGAFNQELSASDDYAIRQANERIGNSLRAALGMQLSQNTLIQFSEVSFSRIVEGLRLLYYPNLAAADATQFRSLEENSLGYNNLLYIASILAELTLEVEEERGEETYLRLLLIEEPEAHLHPQLQIRLLKHLSSVAKEKSIQVIVTTHSTVISSAVSVDEIIHLSNKCTPVAIPLRTCGLPEPSRKFIDRWLDVTKSNLLFSKGSILVEGIAEAMVIPELARRVLAQYGDGENTLEDYGVSVTNLGGIYFKHFMQLFCDVTDESAGENLPVRCAGLTDKDPPQTIKVDVDGGKQVAVEYTPHDDDLRDGENHALAYIAKIGQSQFGRLYAGQYKTFEYDIAMEGANLRMMLSLAADLWPAQEGTVAPELRERAKLAFDDMKSPERAGHAAELLYRIDSTSIGKGIYAQAFAEELEKQEGEFVVPAYIRDAILWACGLEEPPLNDQAD

SEQ ID NO: 66055 - protein, 584 aa, Pseudomonas fluorescens
MIKLTDEQKAYIGAPIDQHVYLNACPGSGKTEVVAAMVAKVVEEWTRFPSGIAVLTFSNSATDELKNRLVRYLGEPLGFPHLVSTFDSFVHSRMVASIASEVTEFPGKDGDSRIRILENKADIFHTRKKICGRSVSACKYNYDLETKGFTFSTGERTRDKQLNDAPITNVALEDLINTKKRFWAAGFATYKDVDMIALAALKRPSLKSYFQCLAKRFPLVIVDECQDLSAEHLAMVRKLHGLGVKFHFIGDLNQSIYGFRKSNPDNVKALLAELGFAELPLTANWRSGQSIVDLCSDLVRIKRISGNPEIAPVKPLLLQYAKCPSELIPKIIELTNGYEDVVVVARGHSTLQRFRRGDSFKGVEMLALACVAASNGSNKDLNVAVALFAEWLADRLSLQATRSGPHCPVAIESKLDWRKFIHQCLKHLVVAGAADTNLTWKEWAAVAKKNLRNLPDQAFVLDEISGDLEPLRGLELRSPAKQGGIALSVRLNQAVAQQPVADVLRYETIHQVKGETHDATVVVSSLQKGIHLSHWKEWLASPTSEGARFAYVASSRPRHMLIWAVKNLKADEIKTLTGLGVELV

SEQ ID NO: 66056 - protein, 640 aa, Pseudomonas fluorescens
MKLCSLRVNNFQSFGPEGEEVTFEDVTYLLGPNGAGKTATLQGLCRMFAFEPNLRRIRRSDFHVPASEENPPEQRELWLEADFSFEETQDDEDADTVPEFFNQMALRTFDDVPRVRFRLEATMYEDGEIEERFLFVTKTDDAGNPTSTASVPKRHRDKIHLHYLPARRDPSDHVAYGATALLGRLLRAANWNDDRETVAELTEQITECLTGNKSVQALSDSLSTAWQKLHRGDFFASPRLTFQNSEIEALLRHLSVSFSPGHGENQVDFVRLSDGQKSMLYLSLVFSALAIGREVRSGKNTSFDPHKLKPPAFTILAVEEPENSLSPHYLGRIVNSLKSSVGVDAQALIATQAPSMLRRVEPEHIRYLRLNSNRQTRVTKILLPPKRSDAYKFVREAVQAFPEVYFARLVVLGEGDSEEIVLPRILQAKGAPVDEFAVTIAPLGGRHVNHFWKLLSAIGTPYITLLDLDTGRHQGGWGRIGYIRDQFDAHAPHLNLPQDWIRHAWDDPERPIKSHHFFNNCTVSLFAELEKRDVFYSAPLDLDFAMLAAFPQAYRAEAFPATAKNLTSVLGENHFNPGQYDDVEQAWFAAYHKLFKLSSKPAAHLDALGRLTDEQLLASLPESLDRLADRVIAKLEEAPE

SEQ ID NO: 66057 - protein, 560 aa, Pseudomonas fluorescens
MINPDRWAPSPGIRLEQNAWEVIRECGRSVVLTAGPGAGKTEVLAQRADFLLRTNNCRYPKRILAVSFKTDASRNLKQRIQMRCGVEHASRFDSVTFHGFAKRVIDKFRPVLVEEALDQDYVIGPEYVAGKQITFKQLLPFALKILKDSEVARNAIRTTYSHVFLDEFQDCTGDQYELIKLLFHDTSTILTAVGDTKQTIMGWAGALDGIFKTYADDFAARPLRLFLNFRSLPRLLRMQNDVIREIEAAAVMPDDLVDGDGGDILTGHFRNSAEEAEALAEIIQHWIVEERIPPNEIAILMPRQIEEYAEALMEQLARKSIPFRNDHELQDLLKEPAVGLVVDYLTCLYEPGQSEAWSRLMSQLAPFEDDDSKSSAPQIFEELFRSHKRQVAADSKTPTPYASWWKLVLALLKGLSASDLAAFSPDYQSRQRLTEVVHDVRDRIRAQIAEEPNLLKVLAGLSDSDSVRLLTMHKSKGLEFHSVILLGVETQAFWGKLAEERCVFFVGVSRAKQRLVLTTSELRPRPKSSKKRWDERRTQHGEFVSHVARHQTCSLHAWKG

SEQ ID NO: 66058 - protein, 597 aa, Pseudomonas sp. W15Feb9B
MQLTRVAIRNFRNFKDLDVPLSGNLVVVGENRVGKSNLLYALRLIFDPGLPDSARQLGQGDFWDGLGEPLEDEKITVFVEITGFEQDVDLLAVLTDFRLNDDPDTVRLTYELRPIPTLGRFPASDEDYEFICYGGEVERKRFGHDVRRRISMDVLPALRDAEGDLAMWRRSPLRPLIERAFAEVGRDELTEVQATIRAATNGLTAFDSVQALEQNLSSMYASMSGPKQDIEPRLGFSTIDITRLYRNVKLLIDGGLRTISEASLGSANVLFLSLKTLELQQLMNENRRDHSLLAIEEPEAHLHPHLQRSVYRHLFEELGGEGNEDRLSILLTTHSPHITSVAPLRSILLLRETPHNGTVGRSSAAINLSDKEEEDLTRYLDVTRAEMLFARGIILVEGDAEKFLLPVFAKSLGHDLDHLGITICSVAGTNFQPYVKFLTALEIPFSVITDWDPRGGKNPLGFNRALELVRTILRIRSGREPNRIIAGLKALSYGDFEIQCDGYGVFTNIDTLEVDLFDDDFVAPILATLRDQSLSVERSTWVDDWEQDPKTLDIENYLKLIEAVGKGRFAQRLASRISGLAPPRYIESAIEYVVQRV

SEQ ID NO: 66059 - protein, 595 aa, Pseudomonas sp. W15Feb9B
MSDRTAYLSAAEGLRANPGQWAAYESRGHCVVLAGPGSGKTKTLTTKMARLLAEDVAEPRGIACITFNNECARELENRLSDLGVEAGGRVFIGTVHSFSLTQIILPYAKVAKLGLPDEFTVAAKSERAQALRIALEAIGENPESLGAWEFRMNDYRRKILDRNSRDWLEMDPGLARLAEAYEEQLRVMHLIDYDDMPLLALKALRENEWLRSALLAKYPVLIIDEYQDLGSALHRMVLGLCFTAGLRLFAVGDPDQSIYGFNGARPDLLRRLSERPGVETVRLRLNYRCATRIVAASGTILGEARDYEAVSGAPPGEVYFHPLWGRYEHQATTLINELIPQALARHPQLRLGDVAILYPAAWLGDTLIPAIQQAGLPYIRTDNNALYPRSSRLMQWLEQCAKWCCGGWHAGTPLFSRLASDGRRLFSEIIQSDEQTTDFHRQLISKLWATRDETTSLLQWLVDLRTHLLAPLGGKCSELRDELTTLAQFIDRISPGGDSHGMCLGDLAGQGEGPGSLNLSSLHSAKGREFALVFMFGIDVGRLPRAGDMERELAEARRLFYVGLTRAKTEIHLVHTNGRASEFVRELQQRIEAGT

SEQ ID NO: 66060 - protein, 628 aa, Bacillus pumilus
MDILIEEMRIRNYKCYESVDVKFKESSLILGANNSGKTSLLEALKLCFTRYSKVDEELIFVRKDEELTKDKKIIIDVLISSVHEQFNDAWFDLFGALIIEDQFDDKQCVALRTIIKYNFQKGEYDLERKSLNVWPKSNEVHDFEDFNSNSVTSEVVESIPVFYLDAKRDISAEMGDKYSYWNKLVKDVNLSDDNLNILEESLNEINDNIIENSDVLKHLSTKLNNLNDVLDTGSNSVEINPVTRKIKDLNRGMEIRINDKDSESFLINNLGMGTKSWATFLTLAAYIEWKSKEMSENEKPFHPLLLLEEPEAHLHPQAQRKIYKQMESLQGQKVISTHSPIIATQPSLEDFIHVYKRRDSSSINYINLGDLNQNEKRKLKEEVLKSRGDILFADTIILCEGETEEQALPKFFNEFFDHETFELGTNIVSVNGYGNYKPFIRIAHDLDIDLFILSDGELRVIKKVKSDYKDVFKTSTDEDLKVHIKFLPNEADFEKYLIDQDYKEELSRIIDNLKGKESFIESYIEKNSGRKNGKRKSTKEKCVSCQQFIYKAEIKDYSGEAGFNQALLDCLDDCKTEYSAIIGEEILKRQGIDRIPQIIQELFESIANKKGYSIKEEFKLNKNQEGKS

SEQ ID NO: 66061 - protein, 612 aa, Bacillus pumilus
MKLTESQKEIVEFLDGPLLVTAGPGSGKTRVLTQRIANILEKRKGKVLALTFSNKAAEEITERVNSQILLEDLNRVQVETIHSFGLDIITNKGHLIGLPSRLSVIEETKDKLELIKRVFLDANNSMPDDKTLRETLRRIQKNKQQFISPEMIEKKVDNIGFINIYESYNNLLLNNRVIDFDDILFYSFKILVERPKVASNYTRLYKYILVDEAQDLNNSQYKILKALTRNFFNIMMVGDPDQSIYGFNGSDSNIMMGKFTNDFNPTIYSLNENFRSTSKIIEAAKKLQPKSNSRAVFPLEGVLEVIPFEDEVEEAEWIVEKINSIKNNGSPWLDDEVKLENIAIIGRNKYLFKNIEETFKNSKLDYSFGNSTTNSESETIEMKIFEAGIRVLMNPYDDLHYSKVNSYLSRVDNENDEFHLEDLLNNEEVNNLDVNVKIFSSIIEAWNVLHENNDNFLKALRIIEENLNEKINDENFLFLIQNDINLWKHRWEKYCKSTVKGDRSLSYFRNQVSLGKMNNDSSSGVSFLTVHMSKGLEFDVVFIIGLTQGTFPDYRVKTIAQRQEELNNMFVAVTRAKRECYLTYPKNKMMPWGTTKRQQPSEYLYTITKSNG

SEQ ID NO: 66062 - protein, 630 aa, Sulfuritalea hydrogenivorans sk43H
MQVTRIHIENFRGVKDATLDFTKHAVLLGDNNTGKTTALEALDLALGPDRLNRTPPVDEHDFYQGRYAANSKKSVLGDQGEVGLKAPDVENGEADATENGAGAVAPAEDQALKIRVDVTIVDLSEEQRNRFGDYIEFWDDEAKKLYQEATPEGVDADSISPALRVTFVGEYNPEEDDFEGKSFFTLTLADGCAPQAFTKKDKQVCGFLYLRSIRTGSRALSLERGSLLDIILRLKEVRPQMWEDAIGKLSTFSVAEDPSLGLSGVLQSINNALKKYVPREWGIEPHLKVSNLTRDHLRKVITAFIATGDGTHAAPFYRQGTGTINMLVLAMLSQIAEDKQNVIFAMEEPETAIPPYAQKRIIHEVRKLASQTLFTSHSPYVLEEFSLEETVILSRDSAGMLKQFQVSLPDSVKLKRYRQEFRTRFCEGLLARRVLIAEGATEASAFPVACRRLAELDPAKYSSMESLGICVVDAGGEGSIPDMAKLYKEIGKRTFALCDLQDAAALAQIKSQVEHVYMHNEKGIENLILKNTPQEAMERFCDLLQWPTDLAGKFPNPKGDVINALMAYFAKKKGDFGIAEYLAQCNEAEIPIWIRESCVHLRELCMPPPVPAEAAIVIGDIPGGDDDETL

SEQ ID NO: 66063 - protein, 601 aa, Sulfuritalea hydrogenivorans sk43H
MKLSDKQIEVLDTEGHLLVIGGPGAGKTTISILKAAKVAASLKPSQEILFLSFARATISRVIEAIENEHDIPKAIKSRINVETYHSFFWRILQTHGYLLGLPRPLSILTPANDAIALSAIRSEYKADGKLSNAEKAEKKGKLHAERLRLARAEGRVCFDLFGSHVAELLERSTRLRQLIAARYPIVILDEFQDTNTDQWRVVQQLGLAGTLIALADPEQRIYDWIGADPARLDQFRATFKYNEIVLQGENHRSAGTEILLFGNDVLTGKFSKNMYLGIEIKTYPSNENEACTALVTQTYAARKRLVELEKKEWSLAILVPTKKMTRAVSDVFRNPLAKMQPIRHSAIVDLDAAILGAELVSFMLQPPSLFHLDGVIDLLCNYFHGKGGDSPTKSALQQAAGIRKAFGLYAEKKAAGKPLPKNSIIVPLLQTYEQLRAIALTGDPDQDWRSVRKIMENGPCIRLKEVAIEVKNLRLLERGTQLRQELSQDWRTFRRYENALNITRQAFVREHFATQSNPEIGVIVMNMHKAKGKQFDEVIIFEGWPRYVKKKIVANPDRIVRANLKDNIDDQARQNLRVSITRGKQRTTILTPQEDPCVIFM

SEQ ID NO: 66064 - protein, 634 aa, Comamonadaceae bacterium A1
MKLQTIRLSNFQSFGEAPTEVALEEITYLIGPNGSGKTAALQALCRFFAFDPSLRRILRSDFHVPFNEEAPPAERQLWIEADFLFPELVEDKDNSTVAPHFGHMRLYEVDGTPRVRFRLSATMGMDGDIEENMVYVLDINADGSPLTIAQVPRSERNHIHVHYLPARRDPADHIAYGANALLGRMLRAVTWDAERTVIKGLTDQISDSLAANPSINAFSTSLKTAWSALHKGSFFADPKLTFVASEIESLLRHMSVSFTPGHDEQLVDFSRLSDGQKSMLYLSLVLSSQAIGRAVLAEEDKSFDAVKLRPPVFTVVAVEEPENSLSPHYLGRIVSALNSMTGDGDAQALIATHAPSMLRRVAPERIRYLRLTQERTSRVTHIQLPESTDEAHKFVREAVQAFPEIYFSRLVVLGEGDSEEIVLPRLLQIKGAPVDESAVTIAPLGGRHVNHFWRLLSALQIPYLTLLDLDVARYAAGWGRIKYVNDQLGKFRPEQKLPKGHGIPKWDSTTDMVRDYDNYLEELEERGVYFSYPMDLDFAMLLSFPDAYGVEEDEPDESTIKAVLGKSHHDAGQYSEDELKLFSTYHQRFKLGSKPAAHIDALAQLTDAELLANMPASLRRLADAVIAKLAELPE

SEQ ID NO: 66065 - protein, 558 aa, Comamonadaceae bacterium A1
MIAIDAWQPSDGLTLEPNALLAVKEQKRCLALTAGPGAGKTEMLAQRADFLLRTGTCRYPKRILAISFKVDASKNLKERVQRRCGADLASRFDSYTFHAFAKRIIDRFRPVLTGKDALEPGYILGSPKITHKQIEFSDLLPLAIQILQKSKLARNAIRQTYSDVFLDEFQDCTDKQYELVKLAFQGTGIRLTAVGDTKQKIMGWAGALDGIFKTFAADFAATPLNMYRNFRSKPRLLRLQNEVIRVLDLASVMPEEQIAGDEGEVLTWGFEDSRQEAAHLADRIAEWIDHELVPHSEIAVLISKQPDLYANHLIAALEAKGIPYRNEQQLQDITTEPAARLVVDYLSCIYGKREPKAWVRLMNLLVPFADDEIQANTRRDFDRLIKAQRKSASLLELIDEPYSGWWESARGFLNKIPRETLVALSPDYESPDRLKEVVRDTKARIEELLKIEPELPKALERFADDKAVRILTIHKSKGLEFDSVIILGVENQTFWGKPDEERCGFFVGVSRAKRRLVVTMSKHRETPPSNPYRWQEKRTPHQEFFGYVMPFVSKENEE

SEQ ID NO: 66066 - protein, 565 aa, Acinetobacter baumannii
MKISSVSLKGFRNFKDSIIKFNGDTLIIGANDVGKSNLLHALRLLLDKTLSDSDIEPTELDFYISPCEAMNILEITICFEDIQEDAVLSILKGNVSSEAKTFLRYQAVKNNLSYQILIGPSLENLELINSRFYLKYVNLKYIQSQRDLQRFIQKEKRKLLKLSQSNLTESQREEDTDLLNEIGFDLKEINEKITQLYYVDHATKEVNEELKKLAYHHSEYSVQLDSGAIQVSDFIDNLQLGANVHGSNILLGGDGRNNQILLALWKAKSIAEHDINHEVVFYAVEEPEAHLHPHQQRKLANYLIEELPGQAIISSHSPQIASHFLPDSIIRLLVKNYSTVAASGGCSDCISECWDEMGYRISIIPAESFFSNGVFLVEGPSEVLLYTALAKALEIDLDYYNISILSVDGIAFEVYTNILNALEIPWVMRTDNDVSKVPRKNEWQYAGINRCLRAIGLAEWPHSTISINHIDVINDKRWNSFHASIRDKGVFISNVDLETDLINSLEASILPILDKDNKQDAIKFMQQKKAIRMSNLLKQIKEKLIDLENDNLTEPLKYLKSLIIG

SEQ ID NO: 66067 - protein, 541 aa, Acinetobacter baumannii
MKTLNLTQQQIEAIEYSSNLVVLACPGSGKTTVMKEKIRKSIPTLLSHQGVIAMTFTKKASAELKKRCKSNGFITKQSFFGTIDSFCLEEVIYPFLSHLWGGHPNKCKIITELGDLQKKFFKQPYMAPTLDNIINDEIGFTTLYKQNFLWIDSLAGLALYILEKCTAAVRYIKAKYKFIFIDEYQDSSRAQHELFMKFIEIGLIGTAVGDVDQSIYQFRGSDPKCIEELKANSLFKFLTIDQNHRSHISIINYASRLLNPTYPTEPCEEIRIFRGVLAGNPTQAAKKISELIKRITSSHESVNYSDIAILAYRTSSLNYIARGLELDYRLYTDTPLEKIETPEAALIRDILAFRFGKITTMQEIFDMHFAYSNLSKGSLLKIRKILLEIKNLELTQVRNKSIEILALSGVESDCHSELDALTSTLGSENYIKNFMPILTNEVQLMTLHKSKGLEFHTVFHIDLDDWSFPYREYTGSFDDPPVYPQYKQDLNLHYVGITRAKEYCLLVQTTKRFNKQGVEKNTQPSDFLTLPHLETLYKKFK

SEQ ID NO: 66068 - protein, 687 aa, Bacillus sp. OxB-1
MHIEEIHIQNFRLLKDVRISLEEKTTVIVGRNNSGKTSFAELFRRLTTESLPSFKLEDFSLEVHNQFWKAYEILQKENDEVLIRENLPTIEITISINYRNVTASFGLLSEFVIDLNPNCTNALINISYQLDSGKIQSLFENLDLKTVGSEEKQKNLFFRTMKERVPKLYKVILNAVDPNDPANQKSLEWKKFQNLLQGSFINAQRELGDMTSKEKDILGKILEGMFNSAKSDSANAYDQGVAESLNEAVKGIQEKIDSDFNEQLTGLLPTFSLFGYPGLPDPKLLTETVLNVDTLLRDHTKIRYTGVNGVHLPETYNGLGARNLIFILLKLLEFYKEFIAKKITPISQIIFIEEPEAHLHPQMQEVFVSKLNDLIRIFSETFNNGVSWPVQFVITTHSSHMANKSDFSSIRYFMASKSKTFYSTKIKDLKVGVKGTLGDDVEFLQQYMTLTRCDLFFADKAVLIEGTTERLLLPTIIEKLDVNNPNINLGSQYISVIEVGGAYAHKFFGLLEYLELKALVITDIDTVDSKNHGEKCKVADGDGTSNYCIKEWFNSDVSPKDLLEKTREEKIKGKIAIAYQVPEKDVLFCGRSFEDAFILANPNLFGIYGNTPEKQLEYAWKKAKNIKKVEFALEYALEKKEWNIPKYINDGLLWLASNELHSITKPSKARLDDVFEEVAASKEDSYD

SEQ ID NO: 66069 - protein, 585 aa, Bacillus sp. OxB-1
MTEVLNKNPAEEAAEKAMKEIFKCLSQSESFLLEAGAGAGKTYSLIQALKYLVKERGESLISKGQKIACITYTNVACDEIKNRVDGHPAVLASTIHAFCWSIIKDFQSQLWEELLHIERWAEMIAESNIRNKIKIEYDLGYRSVDSEKISLGHDDVVSLTAKFMNYDKFIKILSSRYPVLFIDEYQDSDKDFIDSILTHIIDKKEQTLVGFFGDGWQKIYGNGSGSIENSNITYIDKHANFRSENAIVEALNKIRPDLKQAIKDPHSTGSVNVYHTNGWKGERQKGSHWKGDLPTEVAQRALEKVRLHLKEEWDFKPKKTKILMLTNNVLAREQGYSGIANVFRRSEDYLKKGNPYIDFFVSTLEPLSIAFENSRYGDMFKVLDRRSAIIQSTNDKTEWYEAMSSLIQLRATGTIGEVVSHLKDTRRPRLSAIMEKMEKKLEQYNPTCEEEKVSSMERIKQLKKVPYQEVVELARYIEEKTPFSTKHGVKGAEFENVLVVFGRGWNHYDFNRFLEYSVDIEKISIDQKDFYERNRNLFYVAVSRPMRRLTLLFTQELSNDSLSKLSEWFGDDNIYSMGDSILDEN

SEQ ID NO: 66070 - protein, 634 aa, Pseudomonas aeruginosa; identical to SEQ ID NO: 63582

SEQ ID NO: 66071 - protein, 558 aa, Pseudomonas aeruginosa; identical to SEQ ID NO: 62801

SEQ ID NO: 66072 - protein, 634 aa, Pseudomonas aeruginosa; identical to SEQ ID NO: 63582

SEQ ID NO: 66073 - protein, 558 aa, Pseudomonas aeruginosa; identical to SEQ ID NO: 62801

SEQ ID NO: 66074 - protein, 713 aa, Chryseobacterium sp. StRB126
MYISKVSLINYRNFANAIFQFHKGINTIIGENGSGKTNVFRAIRLLLEDASMQFAYKLNEGDFNRQLGKNKWKGHWIIISIEFDELNNEEAIQSLFIHGAGIAEEDYVKKATYNLFFRPKADVRQKLSELKEGDKAGLQTILNDITIQDNYETFFTGKSTADFNDLEVYKELVGDFENVIFPASIDASKFGSRIPHQLSVAKEISFTFIQALRDVVSDFHNNRTNPLLTLLKNKSGEIKEVDYKPISDLVNDLNENIEALPDVQNIRADIKFTIQDAVGLTYSPSSLSIKSSVPDEAEKLLQSLKLFIGEPEEDYEGGIHELSLGGANLIFLTLKLLEFKYRKSKDTFANFLIIEEPEAHIHNHIQKTLFDKLNYVDTQIIYSTHSTQISEVSNVENINILAKKLNYAEVYQPSTGLLPENINQIQRYLDAVRTNLLFAKGVILVEGDAEEILIPIMVKKVLGVGLDELGISLINIRSTGFENVAQLFHSDRIKRKCAILTDLDDAICDTTEVEGDTDEIIKYKKKVAGSQKKGLERKAKLDLLETGNIWVMAFYAKHTFEVDFVTEGNNWEVQRIIKQVYVDKATRDQAKLDLENTNVAVSGKRVLTMAKQEGKGWFAIMLGKHIFFKTIIPEYILDAIFFAKDRYSSHIIADIIEFRINENFKDKNTLDFASCRAQLLKYRNAEIPLEDLVIDLDLVIPNDQILTIIEKLK

SEQ ID NO: 66075 - protein, 603 aa, Chryseobacterium sp. StRB126
MFIWEKGSINDEQQNAILEDKSVLLIACPGSGKTRTLTFKIAYELSRLKTDKEFVIAITYTNNAAEEIKDRVELLGVDTTQLWIGTIHSFCMEWILKPYHLYSDRLKNGFKVCNSFDTEKLLTEICNKYSNPKVTFYDFQYYATINGTYKFTSKNSNQNNHIKAILKEYFLILEKNNQLDFEQILFYAYDLMKSKPVISSILCKLFPFILIDEYQDTKEIQYHIISKILCANKGCSKTLIVGDPNQSIYNSLGGYPMAKKELEKLLGFELQQLSLDKNYRSSEAIINYFDYYKTFTTPIISFGNNKDYNSLITYNFSVSVGNLIEEIAKLILFNVQEVGISPNEICIVAPQWVHIASITRKLMIRLPDYNFDGPGMAPFSRDIENFWFKIARIVLTEPSPFMYVRRLRWSKEVLYEFEAVGIDITKISNKEFLKICNSIEIDENDGLTYLRFFFNQICNKLKIDISNFPLLKEHHTSFFASSESRIQRLIDEGNPFIGDIENFRKVFRQKDGITVSTIHGVKGEEYDTVIGFALLDDYIPHFNDTNGYENSKKLLYVLASRARKNLHLISETSRGINYYNPDGKSPTPHLLEYDYEYSILNIN

SEQ ID NO: 66076 - protein, 712 aa, Chryseobacterium sp. StRB126
MYISKVSLVNYRNFANANFYFKKGINTIIGENGSGKTNVFKAIRLLLEDASLQYAYKLAEGDFNRTLDKNKWKGHWIIISIEFDELNDEEAIQSLFIHGAGIAEEDYVKKATYNLFFRPKADIRQKLSELAKGDNAGMQALLNDITINDNYETFFTGKSTADFNDPEVYKELVGDFENVIFPSMVDASKFGSKIPHQMSVAKEISFTFIQALRDVVSDFHNNRTNPLFTLLKNKSGEIKEVDYKPISDLVNDLNESIEALPDVQNIRDDIKSTIQDAVGLTYSPSSLSIKSSVPDEAEKLLQSLKLFIGEPGEEYEGGIHELSLGGANLIFLTLKLLEFKYQKSKDTFANFLIIEEPEAHIHNHIQKALFDKLDYGDTQIIYSTHSTQISEVSNVENINILAKKLNYAEVYQPSTGLGSENINQIQRYLDAVRTNLLFAKGVILVEGDAEEILIPTMVKKVFGVSLDELGISLINIRSTGFENVAQLFHNDRIQRKCAILTDLDDAICDTTEVVGDSDVLKKYKKKVAGSKQKGLARKVKLDAFEVGNIWVKAFYAKHTFEVDFITEGNEWEVKKIIKQVYVDQDTRDTAKTDIEDADVSIYGKRVLTMAKQEGKGWFAIMLGKHISYKTILPSYIMDAIFFAKESSPNIIADIIDYRIKKNLEDNNALDFTSCRAELLKYRKGEIELKDLAFDFDLVLPDDQILTLIDKLK

SEQ ID NO: 66077 - protein, 601 aa, Chryseobacterium sp. StRB126
MFIWEKDSINKEQEDAILEDNSVLLIACPGSGKTRTLTFKIAYELSRLKSDKEFVIAITYTNRASDEIKERVELLGVDTTQLWIGTIHSFCMEWILKPYHLYSERLKNGFKVINSFDSEKILTELCAPYKKEKITYYDCGILAKPDGFYLTCLDSGKHNSLKKILGEYFKVLEKKRQIDFEQILFYSYEILKSKPVIANILCKLFPFVLIDEYQDTKEIQYHIISKILSVSKGASKTLIVGDPNQSIYDSLGGYPMPKDELEKLLGFELTPLSLDKNYRSSSAIISYFDYYKTFDTPIVAFGNGKDYSSSITFNSSVSVDNLIEELAQLILYNVEKAGISPNEICITAPQWVHIASITRKLIIRLPDFSFDGPGMAPFSRDIDNFWFKVSRIALTEPSPFMYVRRLRWSNEILNELDSTGVDVSNMTSKKFLRICNSLEIIEKDGLTYLRTFFNQICEKLKIALPNFPLLDEHFNSFFASSESRIQRLIDEGNPYIGDIENFRKVFRQRDGITVSTIHGTKGEEYDTVIGFGLLDGYVPHFNDNNGLENSKKLLYVLASRARKNLHLISERNRNVHKFYAPDGKPPTSHLTDYNFKYLDTL

SEQ ID NO: 66078 - protein, 606 aa, Paenibacillus sp. VKM B-2647
MDAVRLCLARGGKRSSPFDEYDYYTNENISNPKDTEGIQVQFLFQEEKPNEWSETLIRNLGELAQPVAWDMNPEEAIYTVRVSVTSKYEEARNDFYLNIEFLNPEGEPLPPRNQTNTSWSNFIQETPVFYLSALRDIKESFGARSQFWGSFLRNINIPQDKVVEIQDSLQSLNEDIFTNDERLEGLKTTLENIQEVIALGAGDTVSIQALPVRIWDLLSKSQIVLKGRGGNVSFPLQRHGQGTQSLAVLFLFQAYIDVLLKSAYSRTANAILALEEPEAHLHPQAVRALADQVQRIDCQKIITTHSPYFFQNLDLLNIRVFKKNGSETRVHYLKEYVSTRVVAHHGLERFVESKKGKFHYNLSSSELKAYAPLNEHELNALEGMNRNSEHFENISEFYLKSQQILDKDERTDLYTFAQRTRGELFFARGWLLVEGQTEYIVLSYFSEVINKSLDTNGVTIIDFQNNGSPGAFVKLAKSLSFTWRLLSDSDDQLEGTLSQIKKTGYSEEETNRLVKILPWIDFETYLANEGFINEYEAILGDKVREVTVPRHSAEYPIHIANLIKKDKVGNALKFVEYLKNHNFDSRRIPELLRQLINECVGEANAI

SEQ ID NO: 66079 - protein, 643 aa, Paenibacillus sp. VKM B-2647
MQYKEAIKRNIELLTDVQKEAASWDEGPLLVLAGPGSGKTRVLTLRIARLLVESSDDNFRILGLTFTNKAADEMRTRIRELIPGMDKRLYLGTFHSFCAEVLRNHGSHVGVKPDFTIYSENEDLDEIVSEVYSYLLRQGKINPLNVSKVLPIIQYLKSRLILPESDLSSYISNIEDRQAIEMIYMNYEQKLKDLNALDFNSLIMKSYELFRKYPFVAKHYRTIYPYICIDEFQDTNQGQYNLVRSLTLGKHNNLFIVADDDQVIYQWNGASASRVEEFRKDFNAQVIQLPENFRCPPEVVQLANNLILYNVNRSKDKKPLLAKKPIQDSFEVNLEYFPDYPTEADWVAEIIQETYALNQNKTVAVIARNRKLIQPIFEKLKANEIPVVIGQRKNEFESTQLSWVHFILRLAHKRNDKKFLNKVVSNFSLLTESTLNAEEIIAWSKATDGDYLRGFLIAVQKGILTDGHLLKSLEFDLVEGKDFFRFIEVCFGWLDEHMDISQNKEDVLYYDEKRVWDDLQSSLLSRYDREELTLGMFLQELDLLSKEAEPDGSTVQCLTIHASKGKEFDFVYLVGMVEDELPSFQSKKKGDHSIEMEEERRNCFVAITRAKEILTMTYSERYNGWVKQPSRFLYEMGVLQQND

SEQ ID NO: 66080 - protein, 592 aa, Jeotgalibacillus campisalis
MYISKVKISNFRNFKETEVELGKQMVIVGENKIGKSNFIHALRLVLDPTLSESKRVLQISDFWDGLDLPLNNEEIKIDIELTGFEQDDKLKSVLSEFLVKSLPLTVGLTYKFFPEDENGNKVYNFKVYGTKTENIFGYEQRKWLPLEVLSGLRDTESDLSNWRKSPLRPLIERAIETTDKQELENVAKEITRSTDSLKELDEIGSLTERINTQLENIVGDRHSIETSLGFSPADASKLYRAIKMFIDDGNRGINEASLGSSNLLYLVLKLLSLELYVDENERAHTFLAIEEPEAHLHPHLQRLLYKYLLNHDKLIVEGSQEQHKIHSVSNILTTHSPHIVSVAPLRSIVLLKETHEEDQATKIVSTSKISLDDKDVKDLERYINVTRGEVLFSKGVILVEGDAEEFLLPSLSELHGIDLDKHGITVCSVSGTNFLPYIKLLGRKGLDIPFVILTDYDPNIRKPLIHNRLIKLLNFIDENHEYKELKTGDLVTYGEEVGIFTNSHTLEIDLFDTMPEEILETLIELTTNKKAIERAQGWKAASSINGNKDSYLSDIESIGKGRFAQRLATNLTKKSVVPDYVKGALDYVIAKV

SEQ ID NO: 66081 - protein, 608 aa, Jeotgalibacillus campisalis
MSLLRFDKLLYREAAKDLENNEAQKKVYDSTGNCVVLAGPGSGKSKILTLKLAKILNEDIEPPQGVACLTYNKECARELKEKLNKLGINESSTIFIDTVHSFCLNHVIRPYKHLVNTNLPKKIKVATSKEIKDTMLQTFNLTIGKNEKHTSSWSTAFNVYRRTFLERESSEWQTNDSDIAQWILNYENSLRHQGLIDYDDMVLNGLWMIKENQWIQELLQAKFPVIAVDEYQDLGASLDKIIRVLCIENDTRLLAVGDPDQSIYGFTGAQPSLLNDLAQQSSVLKVRLKKNYRSKKNIVKASIASLLEERDFVSSRDGDGSIIFHSIRDGIDAQCDYICKEVIPNILTSDPSNTLGDIGVLYIDKNDGDLIAEKVTIEGLQYIRVDGNAPYNKNQLTVWIENCAMWCSGGWLKGSPKFSEIERTFGSFFLNSNISESKLESRKLNLFKFLFRCRDVKLKLSDWLDEFNDSIVSELLDFFTEEPDIVKEYNKLIVSAKNGQLKDFKISSLSRQVGSKSHLNLYTLHSSKGLEFKYVIMFGLEHGRIPWLNVLENKVNESRRLFYVGLTRAKDEIHLLSSGWYYDYYGRYQNYGPSKFVLELKEFVDNNL

SEQ ID NO: 66082 - protein, 650 aa, Pseudomonas aeruginosa; identical to SEQ ID NO: 65324

SEQ ID NO: 66083 - protein, 555 aa, Pseudomonas aeruginosa; identical to SEQ ID NO: 65325

SEQ ID NO: 66084 - protein, 597 aa, Acinetobacter baumannii; identical to SEQ ID NO: 62720

SEQ ID NO: 66085 - protein, 593 aa, Acinetobacter baumannii; identical to SEQ ID NO: 62631

SEQ ID NO: 66086 - protein, 768 aa, Halomonas sp. KHS3
MAEKAPDFLSSGDISLRFIELCQFRRLGKIRLEIDKKTTILVGANNSGKTSVLAALRHFLADQPSFGAFDISISQWPELRALGRNWEALTEDPLTVAGAEELWEKQFQIILAAMPTLDLWFDAEPGMYHYVAPFLSKLSWKGGAVGVRLRLEPAASIDDLKQLAWAYHNARLPVKDMGADSLAWPIDLLDFWLREPSKLGHVRAYKLSADNNPVTSPATYATQTLSGDANPIERKHLSRLIRVDFVAAQRGLGSEEADSRSVSGPHRVGMFSNQLLKFAQQHLNVSSTGHGHRADLIKAVAEAQRDLDGKIHDAIADSVEEVKELGYPGLHDPQEIRFRTRIQTADLLDHGTAVQYSMQKDSLEELLPEHSIGLGYQNLQSLSYQLVSFKAARLQPEKGSPEPVHLVMIEEPEAHLHVQVQRIFPEKAHKLISPLKSASGLKSQLLISTHSSHLAHAENFDRLRYVRRIAKSATNSMPATEVVNLGQVFGDDKQTRQFAERYFRVQHTDLLFANAAVFVEGSAERMLVPLFIERDFKALRSQYVSFLDIGGSHAHRLKPLVEKLRIPTVIITDVDPSEEKEGKPKKNGEPSKRLIAVANTGQDGLHCGNQTLRVWHPKLEQLDDFKNPTEAQLVWSEVADCLVRFAWQLPVEDAGGSWPSTFEDSLVLTNLHWFKSLMDEKFDEDGEEIEAPKGALGSVAKRAAETESFPELLVALHALMHSSFDKGEFAASIFEMISSDEPIVAPKYITDALAWLEQQLEPIQESMI

SEQ ID NO: 66087 - protein, 649 aa, Halomonas sp. KHS3
MSVIPVVDDNNRDAGVVEEICGYLTEETPRSYFLFAGAGSGKTRTLVEVLRRMTGVLEHEKGNRFSRSLKMYGRSIRVITYTKNAVSVINGRLGNNDLVVVSTIHAFCWELISGFNDDIRTALIALEEARLEKKTAEALAKPRGITAAKQRDLDEIKKGIEGFRETNVFIYHPDRETYGPGALAHKHVLDVTAWLLKNVPTLQTILKDRHPVILIDESQDTMKGMLDALMELAELRSSSLTLGLLGDYRQRIYTDGHSDLPSLVPPDWATPELQMNHRSQRRIVTLINRIWEAKLEGRAQPAKGVEQCSRTEKTGGVVRLYVGDTKLTPEEKVHGEQWCTDQMRKASGAAAWSNGEYQLLALEHKLVATRGSFLDAFGAMNLLDPNAAAPSGSGENRGPAAVQVLLNELAELETCISADGNVDEFKVTEVFRRYGLLDDMPVDMAARECRANEMLQAIECFAAACENPISTVRDVLEPVLTARLFAVDDRLLSAFMDKSPPPPVPGRGEDESRQDRMRRGWCALFASPWNQLQKYRSYLSGQSALATHQVVKGSEFLHVMVVMDDKLAGGNQISYDKIFGGTKLSKTDTENLEKGKETTIDRTLRLLYVTCSRAEESLALVLWSSDPAAALVSIKDSGWFTEEEFAAIP

SEQ ID NO: 66088 - protein, 586 aa, Bacillus subtilis
MQLKSLTIENFRNFEKVNVDLTNQNVCFGMNDVGKTNLLYAIRFLLDRDIRKNGFKESDYFRNERDRVIRITLGVDLSDRLKDEDSQHIIAKVGGARSSNELDNFFFQVEGTYDISEEVGIPKIYWGSNLKDLDEITQNGIYSNLDNLFKIVYVDPTIDLEKTFSKNRRQLFDQNKLDENDITISNEIKTLGIEMNKKISSMGVIQSFQDTITEEYKKLKKEKINIEMKSEITINGYFSNLIPYIKKENDDNIYPTSGDGRKKILAYSLINHLIQAQEGNKIIIHLVEEPENSLHRSMQIALSKQLFNSKVYKYFFLSTHSSELLYEMDNTSLIRIYSEDRINCDSYIYNVSEEYKNVKKELNRALSTALFAEKVLLVEGPSEKVLFEKILENVYPTYELDGGYILDVGGIKFKPYVDVLKGLNITPIVKTDNDLKSKRDNKTIFDLIGIKRCLNLINDEEKSIEPVEIEYFENDAQGKRVPNNKVKKQKIKDKKLELYVLFQDTIEHFKENNIYLSKIDLEHDLYEVIGDRMEEILGSNPINYLQDHKLLNMIELTNELTRTDCNNIINHPLFESLRKLVPNEVD

SEQ ID NO: 66089 - protein, 513 aa, Bacillus subtilis
MIDQEDRTAILENNDDIVVSASAGSGKTTIMIKKMGIELEKITDHRTIAAITFTVKATDEIKKKAVKNIKKPFVVMTNDSFIENEIIRPFIKDAFGKDYGNDYSVEYGNEFKFDNYSSGLNQLRNNNILGSFEDNKRNFNFKVANDILEKSLAAQEYIKAKYSWIFIDEYQDSDRDMHRFFMKLKNKLNIKLFIVGDSKQAIYLWRGAMSNIFKLLEKESFSSYELVTNFRCDKEIENYANLFHNSQYYVHLSENVENVVFKEYNNFSNYYERKNFVGFIDEFKGLILEKTLELDKEVTIIANYNDDAKKITELLNLEGFDFVFIPKTPIDEGIPNGYLLKELALFSKNSTYTIYDFLEKTHIDERVRTRYEVNNIIGKLKKNTNPDIVEEVVSSLANYLEISIGEDEIEKFCESICDSKYDMAFRLIESKHKVMTVFASKGLEFEQVISFSRYYKIYKDENLQNHYVCITRAKEKFIMFIDDKGYYDFVLEVADSNGIKNIEKLIRYKESCN

SEQ ID NO: 66090 - protein, 586 aa, Bacillus subtilis; identical to SEQ ID NO: 66088

SEQ ID NO: 66091 - protein, 515 aa, Bacillus subtilis
MKLIDQEDRTAILENNDDIVVSASAGSGKTTIMIKKMGIELEKITDHRTIAAITFTVKATDEIKKKAVKNIKKPFVVMTNDSFIENEIIRPFIKDAFGKDYGNDYSVEYGNEFKFDNYSSGLNQLRNNNILGSFEDNKRNFNFKVANDILEKSLAAQEYIKAKYSWIFIDEYQDSDRDMHRFFMKLKNKLNIKLFIVGDSKQAIYLWRGAMSNIFKLLEKESFSSYELVTNFRCDKEIENYANLFHNSQYYVHLSENVENVVFKEYNNFSNYYERKNFVGFIDEFKGLILEKTLELDKEVTIIANYNDDAKKITELLNLEGFDFVFIPKTPIDEGIPNGYLLKELALFSKNSTYTIYDFLEKTHIDERVRTRYEVNNIIGKLKKNTNPDIVEEVVSSLANYLEISIGEDEIEKFCESICDSKYDMAFRLIESKHKVMTVFASKGLEFEQVISFSRYYKIYKDENLQNHYVCITRAKEKFIMFIDDKGYYDFVLEVADSNGIKNIEKLIRYKESCN

SEQ ID NO: 66092 - protein, 598 aa, Dehalococcoides mccartyi CG1
MFLSRIEINNFRNFEHLDVKLGRTTVVVGENNVGKSNLLHALRLILDPKLPDAARQLKEEDFWDGLKQPVTNKLALEIAVEFQDFQEDKSILAVLQSYLVKGVIPDTARLTYRFRPRSPLPKGRDVTIEDYEFVVFGGVDEKNRVGYDVRRWMPIELLPALRDAESDLSAWRDSPLRPLIERLQIPPAKLDTVAGSIDQATNELMKEKDVQTLIASIESRLVKMIGGVISVGPSLGFTPTNPDRLLRSLRMFGDGTSKRNVSDLSLGINNILYLLLLSLELERKEATSERATTILAIEEPEAHLHPHLQRLVFRDFLRRKSPVLLTTHSPPVASVAPLPSILLLKQDQNKKSSVGSSALEAKLSEQDVIDLERYLDATRAEILFAKGIILVEGASEMFLLPAFASRFGTPLDEHGITVCSVHGTDFGPYIKLLGSGGLNLPFVVVTDGDWFESTKGETISRGFRRAIEIVKTAGYPESPTLEALYKSRKWPEINKIVSERGVFVGKRTLEVDLFNVGYQPELTSTFVELGASLQMLERAKELAGMKAPMTAEAEEQLLSDIERIGKGRFAQRFAAKVDEKRCPDYIKASLAQIVKVLS

SEQ ID NO: 66093 - protein, 612 aa, Dehalococcoides mccartyi CG1
MPTIRLNPLEAWTASFNDEQRDAFEFDGHCAVLAGPGSGKTKVLVARVARLLGWRATGPRGVACVTYNNETVREMRKRLAQLGYEQDHRLFIGTVHSFCLSCVVAPFGHLFRDDLPIKLTVASTTKQRKTFELAVSQSKVGSTPDSWDLPFQQYRRTHPFRDSKNWKEEPQIALLIETYETLLHREGLLDFDDMAIIALDLLRRRPFVQKALEARFPFLVVDEYQDLGYPLHAIVRLLMRSTTIEIFAVGDPDQSIYGFAGANPKYLRDLASDPAVHQIELKMNYRCAQRIIDGSQVALALDEPHNFISARDDAIGELFFFECPAGLAQQAATIVNQIIPSLNKLGIQNGQIAILYIDKFDAGVLAKALEVAGIKFAGERDLRYPRTPLTRWLEDVAAWCSLYPHVQDTAGIDILLSTWITIKTDAGASVDSALLKEKTEFFSCLAQTARPNMPLAEWLGVLNASLGIRSCLVKRVSVPDDLTVWDDIVNQCIDGHPLSSFTVDDFARCGGRSDTVTLTTLHSSKGLEYQIVIMPGLEQGRLPGWAATSAGALSEARRVFYVGMTRAKDAVYLLYSGWNKNRYGQVFKNGPSKFVLELLYELGIKPSVVQNP

SEQ ID NO: 66094 - protein, 701 aa, Bacillus bombysepticus str. Wang
MYISELEVTNFRNFKNANFKFKPGVNTLIGENSSGKSNALYAIRLLLDDTLPINSSKFLESDFNQNIIDWKGHWIVLKLTFKDLDSSEAASFLAHHSEDVTAEESIGTYALYYRPNKAIRKSLFEFTQQSRPIEELDEILKSITVNDYETVFTCRVNADFNDEQMYKELVGDFEQGIFPNPEDDNTNILGNISPHITLIKKEVSCTFVKALRNVIAELKQRKSSPLLKLLRGTANDIEIEEADAIKKQIKTLNKNISELEEIDILTKKIKASLNRTLGYTYSPNVSVKSELPEEMETLLHSLTLWVGDDVSSNQGKLDDLSLGGANLIYITLKLLEYEFYQDQEEKAAHFLLIEEPEAHIHTHVQKTLFDKYHFENTQVIITTHSTHISSASKIDSVNILIKESGFTKVCQPNNGLDADTCKRIERYLDATRSTLLFAKGVMLVEGDAELILIPAMFKAVFGLSLDEIGVSVINVSSTVFEHIACLFDEQRIHRKCAIVTDLDEAIETLPENPEEDNNEQEKMRNSQIAGQIRSTLLDATYGINPWVEVFYAPHTFEIDFALNLNTYEIKESLPSIYKRQSDIDSSTKKLDSEDKTIVGKEALRLANKEGKGWFALLVSEKLSYETVIPEYILRAIAFTSEHIKDEHLIAMAKYRIKEMNIDLQVDINTMTLDELIELLLPEDGLVKLIKLLGVELKEHVY

SEQ ID NO: 66095 - protein, 599 aa, Bacillus bombysepticus str. Wang
MYINLNPFQQAVIDEEGNTLVIACPGSGKTRVLTMKIAKELENLKKRTNRIAALTFTNRAADEIDKRIHEMGIDSSKLWTGTIHSFCLQWIIKPYGGYLPELQKGFSILDEFKAQDLKSRFKNDFAIPRYEDFITRRDRQGNYINAERNFNEAAETYHKYILENKLIDFDLILYFSYLLLGKYPKIANNLSRIFKYFFIDEFQDTQDLQYAIVGKIVWAAEGQCKIFLVGDPDQAIFKSLGGVVKSSTEISQEIGGYSIKKLGLNGNYRSTQRIINLYSNFQSTDLSIESLTNYCDEDGVISFDRTIHKENLVEKITEIIQEQISDGVPPNEICVLAPQWSFLTSMARKLKSHLPDVAFDAPGLTILPRDRDNFWFKIARIILINQEPNKYLIRMKWAKEILEELVMLNSTIIHVEIESCRKFLKIINSINIPKEDAVEYLEEAFKYIFEKIGFDYSSSDLLIEQWKSFFNGLSRRYEHIDFSDIPKDINYMKKMFNTKKGVVINTCQGVKGEEFHTVIAFGLLRGYVPHWSQIINRPTSNEIEESNKLLYVICSRAKKNLFLFSESGRLTQSKQPYQVNNQLNRIVFEFNSLAPYRSE

SEQ ID NO: 66096 - protein, 559 aa, Streptococcus agalactiae
MKFEKVVIKNFRNFDNVELDLSNKNIFFGLNDVGKTNFLYALRYVFDKDIRKQNLLDSDFHNKQLDKPIEIVVTIDISDVADSDCQKLRAQLKGALLSEHNKVYIKLFAEYSKTEMLALPILSWGGDINHLYEMKQRGYLYEIDYVFNVIYIDSYVDLYSLFKKNVSQLVRNEKDEDKDILAKIQNTVDDLNGHIASLSGIKEFEDKLTPEYQKFHDEGISVSIKSEIAVKGLYSNIIPYIKQDNDDNLYPTAGEGRKKLLAYSIYDILSDENAEKKINLFLIEEPENHLHKSMQIALSQILFTDSKYTYLFVTTHSPFVLYEMDNVNLVRIYSERKINSISTFYKVPDAYEKNRKMLNRCLSEAIFANKVLLVEGPSEYMLFSKVLSVVHPFYEADGIYILPVDGVGFETYFSILDELEIFNVVKTDNDLRAVTGKGTYSVLGFSRCNNYIGEKRLPTKQIQENSVSAKRSLYNSNINTLDKIRSDFHIFLSKVDLENDLDEFLHDRLSALLDNDNPVKYLQDAKHYHMVELIEKLSDTDCRTIYNHYNFACLKEVAE

SEQ ID NO: 66097 - protein, 499 aa, Streptococcus agalactiae
MKLSPIQEKIVETPGNLIVRASAGTGKTHTMVNKIAKEIDDNHTHKVIAAITFTIKAAQEIKDRLSVDVVQHFIGTNNSFVIEEVIKPFMKDVYGADFDLDMSTDYSAKVDTFQEAIEKIRNEGILCSYRDNKRNFIFDLAQEIVENSSACRLYLQAKYFKIYIDEYQDCDKSMHKFFMYLCDELNIETFVVGDEKQSIYIWRGAYPEAFKSIWNKPNFKKIFMGDNFRSCQQIQNYSNLLCDETRSLYNPTENIDNIVWLSPTKANWATEVLSNIVPDKKSALLRFSNDNARIGASELITNGLEYVYIPQTPIADITTDTAWLYTAIAKYLIIEKYSAYDVISEIPVEGNESRKTVSTVKRLLKRIEETIDDEQSFGSCVTALAEYLGYDTRPDHINKLFKTISDTSFHVAFEADKYKHIAITFHSSKGLEFEQVIVFAEDYRLSDMSSIYNHYVAVTRAKSKLIIVKLNNYNANCFQNNLQKIFSESGHNIEDVVLF

SEQ ID NO: 66098 - protein, 698 aa, Flavobacterium psychrophilum; identical to SEQ ID NO: 62716

SEQ ID NO: 66099 - protein, 633 aa, Flavobacterium psychrophilum; identical to SEQ ID NO: 62717

SEQ ID NO: 66100 - protein, 698 aa, Flavobacterium psychrophilum; identical to SEQ ID NO: 62716

SEQ ID NO: 66101 - protein, 633 aa, Flavobacterium psychrophilum; identical to SEQ ID NO: 62717

SEQ ID NO: 66102 - protein, 698 aa, Flavobacterium psychrophilum; identical to SEQ ID NO: 62716

SEQ ID NO: 66103 - protein, 633 aa, Flavobacterium psychrophilum; identical to SEQ ID NO: 62717

SEQ ID NO: 66104 - protein, 656 aa, Thauera sp. SWB20
MHVERVTITGFRCFGPTPATILFSQGLTAIVGPNASGKTAVLQALMRLFGVTRAQRTIVPSDFHVATTEAERPKSRTLTIDVRLSLPELVEGSATAATVAPVFRHVRIERPGGTPLCRLRLRARWDDDGTAEGAVSQDLNWINTVDDVVRDDQASPVAPGDRGLIQLFYTPASRDAATQIRATTGALAARLLKAIEWSEDTEKAVNTASEQLMTAFGSEKAIQAISESLSKRWGKLHDGDIDCEPELSLMSRRFEEVVARIGVMFKRGPAGEDRGLEALSDGQQSLFYFALAAAVFDVERAAVAGQIKGFRAEELSVPALTLFAVEEPENHLVPYYLSRILQQIRTLVETGAGQAFVSSHSPSVLGRVPPDDVRYCRRDMATGVSTVLPIPMPAGDVEAIKFVRNAFLAFPELYFARFVLLVEGDSERIVLPRLAEALGLLVDPSFVAIVPLGGRHVNHFWRLLHGLGISYATLLDLDLGRDGGGFGRVKNALQQLLTLGVPREQILALSDGTYVSDESLAKMETWDTAHLEGWLSYLENSSAVFFSYPLDLDLAMLAAFPAAYAATIDGTGPRMTNEDAAEVVLGTAGPGLASYTGNALAFRDHMAAYRYHFLTHSKPATHLRALTHVDLPALKAGMPAPLERVLRHIAAQLSGL

SEQ ID NO: 66105 - protein, 633 aa, Thauera sp. SWB20
MSLPPRRVPPGDWQPVGVDSLEPNALTVVRSGEHCSVLAGPGAGKTELLAQRAAFLLQTGASPAPQRILAISFKRDAARNLARRVRQRCHPDHASRFDSLTFDAFAKGLVDRFGQALPDRWRPTADYGILFPKRAHWADFLRRAGLAQDNLFGQAAVQGLSVNYFERRHVLDERLPEAGWPPVTAGRWAGQRFWDEQLRGIARSYLTFPMISRLAELLIRVNASVRNALALTYSHVFMDEFQDTTQAQFDLVQAIFLGTPTIMTAVGDNKQQIMRFALAMDDPFGAFEQSFGAQRIPLLSNYRSSPELVRIQHVLAQALDTAAVHPQSKAPASIHDACCAIWDFSTVNAEALTLAQYVASQMREHNLRPNDFVLLVRQKAEDYAQVLTPAFVTAGIPLRNEAAYVGSQMLQELLTEPLSELVLLILRLACAARSGSTWSEAQHVLADLHGIAPTDDRARRALAQDLDAFARQFSKQHPRPPDTEAAARSIVQDVIAFLGRNALIAAYTPYGQGGWLEEVENSLALHLQSSAAQAPDWHAALEAYEGTKALPLMTLHKSKGLEYHTVIFVGLDDSAWWSYAQDTADATAGFFVAFTRAKQRVIFTYTPERGARTNIAPLYGLLAAAGVQTTSIA

SEQ ID NO: 66106 - protein, 767 aa, Cupriavidus basilensis
MHLKKLAVRNFRRLRDVMIDLASDISIFVGANNSGKTSVGHVLQLFTERGRFSVYDFSADQWPQIVAYGEGDANARLPTIEVDIWLEISADDIHRVVDLLPSLAWEGSLVGMRVVFAPIDSDATRARYAEARQRALEAVAGGEGPAFDPSPRNLQDYLRDRLNDEYELRHFVLDPTRFDANMVAQQDYDPMPLTGRDRSGRDILNGLLRIDFLHAQRHLADAPGSTRAETLSRVLSRFYERNLEQRGEDLAALRALAESEVSLNEHLEQVFEPTLQRLAQLGYPGLSNPRLVIRSALDPASIMSSPHGARVHYALGPDDGAPEPPTLPDSYNGLGFKNLIFMVVELLDLHAQWLAIEDNRPPVHLIFIEEPEAHLHAQLQQAFIRKVMSILALGAEDRTHYTSQVVVTTHSTHILYERGFRPIRYFRRSRAEHVSTSAVLNMSVFYDATDHDVRTFLERYLKLSHCDLFFADGAVLVEGNVERLLLPQMIANAAPRLQSTYLTVLEIGGAFGYRFKTLIEFLGLTALIITDLDSVFGPPAPAAGAVENGADAGAPAVGDNGAELKEEDDDDEDAEAGAGAEGKPGKVCVASHPGAVTSNQTLRQWLPRCGTVAMLWEATDDQKTQARSENSEAIVRVAYQCRTNVTWAGETQALAGRTLEEAFALENLAWCQDIARKPLQLRIARSDNKDLAELTRRIHRRVQAKSFSKTDFALALLAEDPTQWSVPTYIAEGLRWLEGEVAPPAEPDDDGQEEQAVGDPAVAAVVA

SEQ ID NO: 66107 - protein, 596 aa, Cupriavidus basilensis
MMVAGAGSGKTTSLIKALAHLRETRGKALRRAGQQIACITYTEVAVGEISADVGVTPLFHISTIHSFLWSVVRSFQSDIAAWVVSRIEEKIAEKRAHYDKPGTRAATKMRLDQEIVGLEAELEAVGRVEKFTYGTGSRYSEGILGHDDILKLTPACVEKHHLLREIVARRFPYIFVDESQDTQPAVIQALRQIASEQPLCVGFFGDPMQKIYGTGAGAIELLPGWGEITKPENFRCPTSVLGVINAVRAPGDGLVQTRGRTVTVDGEEQSVVGTVNIFILPSDDQRTARLGAVRAWLAAQTGDGLWTSDMRDGDVRLLVLVHRMAAKRLGFASLYSALNDHAPQSLSEGIADGSAWPLRPFVQQLLPLIVASRAGDQFTIMSILRADSPCLEPERLRGQAVAPVLVALQHAIEQLATLLADGSAATARDVLRHVRDTELVALDDRFAAHLMDDPVDDGAEGFGNVAAFLECNVGELWAHRKYILEESPFATHHGVKGAQFERVLVVLDDEEASYNQYSYGKYLGYAPLSDTDKANIAEGKESVLDRTRRLFYVCCSRAVKDLAVVLFAADVAAARSAVVDAKLFPAASHHGVEQLG

SEQ ID NO: 66108 - protein, 688 aa, Bacillus cereus 03BB102; identical to SEQ ID NO: 62646

SEQ ID NO: 66109 - protein, 571 aa, Bacillus cereus 03BB102; identical to SEQ ID NO: 62647

SEQ ID NO: 66110 - protein, 708 aa, Bacillus megaterium NBRC 15308 = ATCC 14581; identical to SEQ ID NO: 65704

SEQ ID NO: 66111 - protein, 599 aa, Bacillus megaterium NBRC 15308 = ATCC 14581; identical to SEQ ID NO: 65705

SEQ ID NO: 66112 - protein, 605 aa, Myroides profundi
MYISKLRLWNFRKYGNASSINTIDFNAPVLEVPFKEGMNILIGENDSGKSAIIDAIKLVLKTHAYEWIKIEEEDFYCLANNIACKVRIEIEFEDIKPEEASNFIEWCGWNDKGEPKLVLIYQAELRDGRIIPSDVKAGMDGIGHALTYEAREFLKCTYLKALRDASSELTAKKNSRLSQILRAHKLFERKNVLSERHDFEEIFENARAEINGKFNKKGEERDYSIIKNAIDKYIQAFINDDISTDFNLGGSTITNILEKLSLGVLNQSNLGLGTMNRLFMAAELIHLEKTNWNGLRLCMIEELEAHLHPQAQLKIINRLKQESNIQFILSTHSPNITSQANLEDIILCKNNLVYPLSVGQTKLDKVNYKHLERFLDVTKSNLFFSKGNIIVEGWSEEIILPALAKKLGYDLTHKEISIINVASTAYLHFAKIFQRSKGECIQVPISIITDLDKREYEREEIIVKKESKEKRKEYNYIKQNIDYSKEIEKRKEGIKISTSSEVKIFISKQWTLEWCLLKSKALEGIYKTILKEVHHDIFNICDDNNENWEKALSRILLSNSINKTEIAYQLRAKLEELGGSLIISNNDTAFYLVEAIKHVCEYEDK

SEQ ID NO: 66113 - protein, 674 aa, Myroides profundi
MKINNEDIYKSEQIFINDAKFDLERLDFISDFSTFDLLAVPGSGKTTALLAKLYCLAQQLPLKNNAGILVLAHTNSAIEEIERQLKIHCPQLFVYPNFIGTVQSFANKFLTIPYYISKNKKKVSVIDNEMYNELFKSRLKYSRSKSINYILHKDPSKLYESYLKYNKESDKECDVINNGKLFNIEVPPKTWIKEDKVEEEIKKIRNFIVSTKISLFSEGYLNYNDCFFFSFTYLSKYPQIINIIQKRFKYVFIDEMQDLNQEQVDLIEMIFRTKSSESIIQRIGDKNQAIYSSNRGLEEESVWNQESNGSRIKVKTLNNSYRLTPILGRLVDGFVLKRDKGYKVEGIATHNEVPPYLIVYNNENDGLKLKNKFKELITKYNLYSSSQNKFNGYHIIAWTTEVKDKSNALHLKKLFPEFLKEKTQKKEHFNSLEKYLCFFDSDSLTFREVQESLLNGIIRVLRLYRVFENTLQKKYYTKETFIQFLKEPKNDGLDHYKAFKEVLYDWCINLIKHNNIEYVFNDYLSFITDYLSQNLKNFVVDDNDPFFKYTGNISNNKINASKNKEINSIDIKLSSIHKVKGQTHCATMYIETEFHNTESFKLTKKGCKTPLFFQKNEYKIQNRKRIDQTLKMMYVGFSRPTHLLCFAVQYDNIKNDIEKYKDAGWIVDSSIVEK

SEQ ID NO: 66114 - protein, 770 aa, Stenotrophomonas maltophilia
MHLHSYRLRNFRRLKDAHIELADDISIFVGSNNSGKTSATQAIHAFVAGGRDRFSLYDFSSSCWKTFDEAANINLADPIPEGFSLPSIDLDLWFEVAAPDLYLVIPLLPSTAWEGTKVGIRVSLTARSAIKLIQNYQEAKAKGTGQAAELPPESQYIPWPRSMTDYLQRELRNEYELRYFILDRTQFDETFREIGDYVPDELGGEPGGGTILKSLIHIDNLGAQRHLSDPNPEAGGRSEDLSKRLSRFYKRNLSQRQDDHTALRALFESEQALNVHLDGVFKPTLDRLAKLGYPGINNPRLKIMSALDPAHVMSQDARVHYQIGDGEDTATLPDSYNGLGFKNLIYMVVEILDAQARWATMDNRPPLHLIFVEEPEAHLHAQLQQVFIRNVLELLNIDGDDGSIFGSQMVVTTHSPHILYERGFKPIRYFRRKKVGKEQLTEVLNLSAFYQAQPEDRDFLERYLKLTHCDLFFSDAAILVEGNVERLLLPVMIRKVARTLRSACLCILEVGGAFGHRFQSLIEFLGLTTLIITDIDSVALVATAVGEDVDDEEVEEFEVPADAEEDVAAQAQDNGQDPVGEPIVTAPKKKYGKACLPSEPDAATSNQTLIKWLPGKLTIEDLRNASEADRTHVLEDDTKVRVAYQTERAVTWNGATETLRGRTLEEDFGLENPEWSQAAARKPLGLIVKGGAAGPAALAKGLHEKVSRKSFDKTKFALAVLTEDENAWHVPAYIRDGLVWLKDEVRIELETVLPDAVLIGEDVAIGGEHE

SEQ ID NO: 66115 - protein, 648 aa, Stenotrophomonas maltophilia
MSSRANKPDTQADIDLRNCLGDVPPRSFIMKAGAGSGKTTSLIKGLSSAIRIHGDKLRKFRQRIACITYTEIAAGEIWRDVGSDPLVHVSTIHSFMWLLAKPFQNDIRVWVSRRIAEKIEALEQKQATYGPRVQQRTKDKDTRDLERLRRQSGRIAEVKGFRYGTGSDYVKGILGHDDILKLVPYLIAERPLFRTLLARQFPFVFVDESQDTTTEVIEALKIVEREPGVTFCLGFFGDPMQRIYATGTGLVEAAPNWADIPKPENFRCSTKVLNLANAIRRDGDDLVQIPGQRLGPEGIVPTPEGSAHLFVLPADDTRDANLVRVREWMAARTGDDHWRAGNDDQEWVKHLVIVHQMAAKRLGFGELYTALNSKAPTAFKDGFLDGSAWPLSPCVKFLIPIAIAHTEGRQLEVMRLIREYSPLLEKGDLARANVAERLKALRELVASIAEGIAGNSNVTIGDLLKQVYAAGLLIFDPRLASYLDPEAAPPAQPAEEVDNDDDQEDDESDKEMASMDAFLACPARQLLAYQTYISERSPFWTQQGIKGTEFDRVLVVLDDAESTHFQFSYEKYLGLKALSDTDRKHIEAGEETTVDRTRRLFYVSCTRALKELAVVLFTADPEQAEAHVRQLDLFEGDSIHTKIVFEAG

SEQ ID NO: 66116 - protein, 624 aa, Yersinia frederiksenii Y225
MYLAELTIKNFRKLREATLKFQPGLNVLVGPNNVGKSAAIDALRTLLAGHDENYPRLDGSDRHRPHEGDPTGDISFHFVFRDLSLEDEADFIAALKPNGDKTMEAHIHVQYTDMDKTGRFKVRRWCGDHPEVSLTSDMMENLRGVYLQPLRDAAQGLRPNRNSQLARLLHLLTDDAGRDTINTALKQLDETLKQDKSIQSTHKAISTRHDSMMGAQLAQELAVGLSVTDFQRLSSRLTLTAEAMEIEKNGLGFNNLIFMAVVLSELAKNTDSAFRSLIIEEPEAHLHPQLQRVLLQYLAGIPTGEGEKPVQLFVTSHSPNFASNSKLDSLVCLIENEAGVETFFPRDIKFEKGKREKLERYLDVTRAELFFARRVIFVEGAAELMLIDALAKKMNFDLKGYGVSLISVEGLNFDSFLPLFGEQGLRIPVAVVTDADPFEEEEVEAVAEGEQAEEGIDDLLSEAAYQEETDAPDDEEPAGNAEKKKKVKRKEVYPALGDQVRLSANTIKMKNLEDDFVKVFHGLKTLEYDLALIEANRDPMLTALADPHPKISKALRNIVDAQPDNTAKTKALFCGMFERKGNGNIQKGRFAQALAEQISKENGFEAPEYLKKAIQHVCQGVVKP

SEQ ID NO: 66117 - protein, 575 aa, Yersinia frederiksenii Y225
MKLSKEQIDIIEAPLGPIAVTACAGSGKTATAIRRLIAIRQKMQNSRGRVVLLSFSNVAVNTFNAGYAELAAGLPDDANRRRVEVDTLDGFFTKHVLRPHAYRTMTAPQAAYLVSGLEPFLARFKYWGEGHPPLPLKDIKISILDGDFVFYSDVRNDLEILDKGKVLKIIHDLGRLGAYTHEIGRYWVYRTLDSQPAVLRALAARYPQILVDESQDLGTLHEEILKLLIAAGVQVTLIGDVNQGIYGFAGADGEFLNSYEERAEVTGYKLTRNYRSLPPIINIANLLSGRQDEPYRLGEQGGAYFIGYKDSELPKLIDAFKARIDELGMQHQDAVLLCRGADRAAVIAGRTAPPGQGMVKVLAEASLLRDQHSNYHGCFNLVCRAILSLLEDIPHGLSSRLQGVSHDAEMKGLKRLLWCFSRNADLGLPSSALVAKTDWHSKLLTNVKVLLAEIEKHYGYKVAGNVGTKLTKKLLPDQTLTSAVSAQGHELRVETVHQVKGESIGAVMYVAKKSNIKALLSGTDDEEGRIGYVAITRAKNLFWLAVPQSCLKELKEDLIKAGFQEWIKLAVIDPA

SEQ ID NO: 66118 - protein, 769 aa, Yersinia frederiksenii Y225
MSEVANTTSLSGQISLRFLELSQFRRLGKVQMDVDPKTTILVGANNSGKTSILAALRHFLADGSPFGAFDISISQWPKLRALGRAWEALEEDPSTSGASEDEWEEQLGTLLSAMPTLDLWFDAEAGMFHYVSPFLSKFSWKGGAVGVRLRLEPATNIEDLKQLAWKYHLARMPVKDMGKNSLAWPIDLLDFWLREASLLGQVRAYKLDADNNPLDGIKTYVSQTLDADSSPIDRKNLQKLIRVDFVAAQRGLGSEEADSRSASGPHRIGLFSNQLLKFARQHLNVAATGHGHRADLIKAVAEAQQELDKKIHEAIGPSVEEVKELGYPGLHDPQEIRFRTRIQTADLLDHGTAVQYSMQKDSLEELLPEYSIGLGYQNLQSLSYQLVSFKAARLNPEKGAPAPIHLVMIEEPEAHLHVQIQRIFPGKAHKLISPNGSDESGLKSQLIISTHSSHLAHAENFDRLRYVRRIAKSEEQTMPTTEVVNLGQVFGDDKTTRQFAERYFRVQHTDLLFANAAIFVEGVAERMLLPLFIERDFAILNSRYLSFLDIGGSHAHRLRSLVERLRIPTVIITDIDPVEERPGKPKKNGEPTTTLVAVANTGQPGLQCGNPTLRGWHPKLQQLEDFKNPKDEHLVWNEIAECSVRFAWQLPVAEADSQWPSTFEDSLILRNIPWFKQLIDEKVDGDGKQIKPPKGALGSVARQVAENDNIPELLAALHKLMHGSFNKGDFAASIFEMVAADEPIVCPKYIEDALEWLQTQLEPSKEVMP

SEQ ID NO: 66119 - protein, 649 aa, Yersinia frederiksenii Y225
MTNSQILDGNDRDAGVVEEICGYLTDIPPRNYFLFAGAGSGKTRTLVEVLRRLTGVTEHEKGGQLARSLKMYGRSIRVVTYTKNAVSVINGRLGDNNLVSVSTIHSFCWELINGFNDDIREALIALKEAQLARDTAEAEAKPRGITPAKQRALDEIIDEIEILRATEVFIYHPDRNMYGPGALPHNYVLDATAWLLRNKPTLQSILKDRHPIILIDESQDTMKGVLDSLMILAKKRERDLTLGLLGDHRQRIYMDGHADLPSIVPENWATPELQMNHRSQRRIVTLINKIWETELEGRTQPVKGSAQHPRTEKAGGTVRLFLGDTSRSPEDKVLSERWCAERMFEVSCSVAWNQEQYQVLALEHKLVATRGSFLEVYEAMTLLDPHAAAPSGSGDNKGPSTVQILLNELGHLEACVSNEGIVNEFKATEVFRRYGGLDNMPEDSEARAERTDEMLEAIAIFAMACANPESTVAEVLAPVLNAKLFEVDHRLQEAYADKSPAPQAPGRGEDESKQTRMRRGWCALFAAPWKQLKCYRNYLAGISELATHQVVKGSEFKHVMVVMDDALAGGTLIKYDKIFGGTELSPKDKKNAEAGKETTIDRTLRLLYVTCSRAQESLALVLWSSNPATAMARIKESQWFAEYEILIIP

SEQ ID NO: 66120 - protein, 591 aa, Yersinia aldovae 670-83
MATLINCVRISGFRGIKEIEVELGRIVILLGTNNSGKTSFLKSLHLALGDYQRYFSEEDLHIDVTGNKVSEVVIDFRMVPVNDNYEKIDEFEDKWIDVFGDNIALDADGSEFVAIRTKVNPDEIKGGFNTQRYFLTEWPSYEEWKNVVPNERKRFRARIDAIPYICIEAQRDIHSELKDKSSYIGRVLSYIKYDDDDVASLENMISSINEVAVSKSEPLQSLKACLQGLNESFLGSNHTEITPFPKKIRDLSKQFTVHFGDEENQSFSMEYHGTGTRSWASMLTVQSFLEFMHERHESEGKALHPIIGAEEPEAHLHPNAQRTLFKQLTSSQGQIILSTHSPYLSAMADIEDIRSFIKRSDGVTVNCLRKKIGHDEKNAIKREIMLTRGELLFSRALILCEGVTEEQLIPAMFELYFKKSLFTVGVNCISVSGKNYPPFVKLANNLGIPVSIISDNDGNTRNEITSQMARLTRDDGLIFNEDCFSLNFIEDGNDIESELFTELNIKEEIIESLVLSETKGNANVQYRNAKLAEINALDDDAIIKKMRDSKASYAGYLGLILTENPNEKQIEEILPQSVIAAFQKVRGWLEL

SEQ ID NO: 66121 - protein, 632 aa, Yersinia aldovae 670-83
MIDNLSLAQEKIVKAPIGEAMQVLASAGSGKTRVLTERVRYIIDNSTRGSVVALTFTNKAADEMLERLDNGTGIRERCWISTIHSVAQRVLDSYGYTIGLPKELHIFERDQDRMEVFLHSLREQGVNIDNYLNVDDEREKRSREKIMGQYLTIFSHIKRELLNEDEVLTKYSTNPRMWNIYQDYQSALLESGGVDFDDILLYAHKILLNQDSVARIYQKKYIALFVDEAQDLNRAQYEFIKVFCGERIKNIMMVGDSNQMIYGFNGSSSDYFLKSFKRDFLPETYKLTENYRSSREVIALANKIKPNSQVGINAAIAGYKSFAALPDESAEAIWVCNNIEKILELKTHQDIEGGIDLSSIVVIGRNRFVFKYIEDEMKKRDLPYFLKSSERNEQPVSLIGKIIDLALRVKINPRDWVDGRKLFSIIGLKINSDASYVYILDDICKEIESNIIKDKKLILSVLHSIDMLELDSPNFIKFCSELKSELKELGSKTQDFTMEEDIAIGIKDIEQLNSMWVRFKRKGLGDSILSFRNALALGQLNEDGMKKGIMLSTVHTMKGLEKDIVFLIGMCEGVFPDYRAKSAADIEEERNNVFVAVTRSRRWIFISYPEKRMMPWGDFKYHSASRFFVEMQ

SEQ ID NO: 66122 - protein, 769 aa, Yersinia kristensenii; identical to SEQ ID NO: 66118

SEQ ID NO: 66123 - protein, 663 aa, Yersinia kristensenii
MAPDTAGAKQGGDAMTNSQILDGNDRDAGVVEEICGYLTDIPPRNYFLFAGAGSGKTRTLVEVLRRLTGVTEHEKGGQLARSLKMYGRSIRVVTYTKNAVSVINGRLGDNNLVSVSTIHSFCWELINGFNDDIREALIALKEAQLARDTAEAEAKPRGITPAKQRALDEIIDEIEILRATEVFIYHPDRNMYGPGALPHNYVLDATAWLLRNKPTLQSILKDRHPIILIDESQDTMKGVLDSLMILAKKRERDLTLGLLGDHRQRIYMDGHADLPSIVPENWATPELQMNHRSQRRIVTLINKIWETELEGRTQPVKGSAQHPRTEKAGGTVRLFLGDTSRSPEDKVLSERWCAERMFEVSCSVAWNQEQYQVLALEHKLVATRGSFLEVYEAMTLLDPHAAAPSGSGDNKGPSTVQILLNELGHLEACVSNEGIVNEFKATEVFRRYGGLDNMPEDSEARAERTDEMLEAIAIFAMACANPESTVAEVLAPVLNAKLFEVDHRLQEAYADKSPAPQAPGRGEDESKQTRMRRGWCALFAAPWKQLKCYRNYLAGISELATHQVVKGSEFKHVMVVMDDALAGGTLIKYDKIFGGTELSPKDKKNAEAGKETTIDRTLRLLYVTCSRAQESLALVLWSSNPATAMARIKESQWFAEYEILIIP

SEQ ID NO: 66124 - protein, 624 aa, Yersinia kristensenii; identical to SEQ ID NO: 66116

SEQ ID NO: 66125 - protein, 575 aa, Yersinia kristensenii; identical to SEQ ID NO: 66117

SEQ ID NO: 66126 - protein, 675 aa, Bacillus thuringiensis HD1002; identical to SEQ ID NO: 62958

SEQ ID NO: 66127 - protein, 653 aa, Bacillus thuringiensis HD1002; identical to SEQ ID NO: 63647

SEQ ID NO: 66128 - protein, 572 aa, Lactococcus lactis subsp. lactis
MEFKSLQVKNFRSFEDISIDLSNKNVFFGLNDVGKTNLLTALRFVFDRDIRRNDFMDSDYFEKKTEIPIEILVTVDISDNNEDSSKLRARLRGAILSGQDLIYIRLISKYDNSEMVGVAELFWGGDKENLQEIKPRGTRFDIDDVFNVFYIDSYVDMDVLFKRNIKKFIQSDTEDDKVINDSIKSIVSELNEKISSLSGVSDFESRITPAYQKFNDENISISIKSEIAVKGLYSNIVPYMKKKGDDNIYPTAGEGRKKLVVYSLFTLLAEQEADKRINLFLVEEPENNLHKSLQIELSQILFGNSESYPYLFVSTHSPYILYEMNKVTLVRIFAERRVTSKSAFYNVPSDFQDNKKMLNRLLAEAIFANKVLLVEGPSEQLLFDKVLSVIKPYYEVNGMYILSVNGIGFKNYQPILKDLGIHYVIKTDNDIQWRENKGCYALGFSRINGVTNGTLVTDWPMRDFHESKEEFTKNSIGYRKQLYELEQNLPTLNRIREYYHVYLSKVDLENDLDEVLHDNLVEYFEVKDPVTYLQAAKNNHMVELIEKLTDEDCREVYEHYNFACLKDLVEWN

SEQ ID NO: 66129 - protein, 508 aa, Lactococcus lactis subsp. lactis
MSKGFGRMELTDTQKKIVDTAGNLIVRASAGTGKTHTMVAKIAKEIDENKDHRVIAAITFTIKAAREIKERLSVDITGYFIGTNNSFAIEEVIKPFMKDAYGVQFDCEMTTDYSLKFDNYEEGLNFISENCTLGSYEDNNKNFIFELALKILRKSEVARLYLQAKYFKIYVDEYQDCDTAMNEFFMYLTDSLTIDLFIVGDDKQSLYTWRGANPEAFKSIIGKRNFEKFFMVDNFRSNKQIQNYSNLLFEETSSLYDQQTSIENIILLNCTEQDWIEKIKCFWDADKSSALLRFSNSNAKSAADILCANDMDFKFIPKAPIEDISNDAGWLYYAIAQYLLVDTYSVFDFIYDIPSGTEEDSKIKSKLERFLQGLKTNVVDENQFKEKVSELATFLGYEAQPKDLSALYETISTDRYIEAFKSDNINHRAMTFHSSKGLQFDQVILFVEDYNLRDEVSFYNHYVATTRAKSKLIFISIKENYGTRLFYQNIAKRLGASGLTLDKLVTIY

SEQ ID NO: 66130 - protein, 597 aa, Acinetobacter baumannii; identical to SEQ ID NO: 62720

SEQ ID NO: 66131 - protein, 593 aa, Acinetobacter baumannii; identical to SEQ ID NO: 62631

SEQ ID NO: 66132 - protein, 663 aa, Vibrio parahaemolyticus 846; identical to SEQ ID NO: 63134

SEQ ID NO: 66133 - protein, 583 aa, Vibrio parahaemolyticus 846; identical to SEQ ID NO: 63135

SEQ ID NO: 66134 - protein, 663 aa, Vibrio parahaemolyticus 97-10290; identical to SEQ ID NO: 63134

SEQ ID NO: 66135 - protein, 583 aa, Vibrio parahaemolyticus 97-10290; identical to SEQ ID NO: 63135

SEQ ID NO: 66136 - protein, 663 aa, Vibrio parahaemolyticus 3324; identical to SEQ ID NO: 63134

SEQ ID NO: 66137 - protein, 583 aa, Vibrio parahaemolyticus 3324; identical to SEQ ID NO: 63135

SEQ ID NO: 66138 - protein, 663 aa, Vibrio parahaemolyticus 12315; identical to SEQ ID NO: 63134

SEQ ID NO: 66139 - protein, 583 aa, Vibrio parahaemolyticus 12315; identical to SEQ ID NO: 63135

SEQ ID NO: 66140 - protein, 663 aa, Vibrio parahaemolyticus EN9701173; identical to SEQ ID NO: 63134

SEQ ID NO: 66141 - protein, 583 aa, Vibrio parahaemolyticus EN9701173; identical to SEQ ID NO: 63135

SEQ ID NO: 66142 - protein, 663 aa, Vibrio parahaemolyticus EN9901310; identical to SEQ ID NO: 63134

SEQ ID NO: 66143 - protein, 583 aa, Vibrio parahaemolyticus EN9901310; identical to SEQ ID NO: 63135

SEQ ID NO: 66144 - protein, 703 aa, Vibrio parahaemolyticus 901128
MHIKSLEITNFRKFKDKSNTVTFVEPTSKTDNESMISSSTTLVVGKNNSGKTTVTQALNMVVSEQSKVWGHDFNYSYIDELLSSYESGSFEKFPNMRFKLTFVTDPKLASLVNSKKVISLGQATKEDHNDLKEFSLVVDFQIENKIKFQEDVRILLEKCSSKTRDFKFRKLLELISEFKFDKVVKSPEGIVKAINISSLIELKVISAANNIHDSRLLSKAFNKIIKYKYQTNDKDFDEVNELISNNNDELTGNIRETHESVIEKVLQGIVGTESLGIELRADLTFDKLMDGLITYEHKDAGFLVPEGQFGLGYANLISIISEIIDYIERTPSTDKTTKVRLICIEEPETFMHPQMQVNFIRHIDSALRKIIGEGEKIKSQLLITTHSAHILNSKVHSSGSLDNINYIYPHQKYCENVPIKDEDISPESGRKDEFYFVKKHIKHQVPELFFADGVIFVEGITEERLLNFYIERDEVLSRKLISVFRVDGAHAKVYDKLMRQLRIPSLIVTDIDFKRNKSESTLSEETKSGKEITWEIYPQMTSISDDRCSTNKTLKYYFNSNKVKDYTDYYEDSNIKVVFQKDPLEIILSESEQARYYASSLEEALVLENYDNDIFRNVLRSTIQKNYDELVPEGTCEYVNLAHNSFKIQKELNTSKSKFANNIIYALVVNEESAALPKLPNYIENGLEWLASKLSGAEGEASI

SEQ ID NO: 66145 - protein, 690 aa, Vibrio parahaemolyticus 901128
MTIHSLLEEEKQVQAQIFKNLEEKRSFYFLAGAGAGKTYALVETLKYSLNKSMQKLDRSGSRIACITYTNAAKNEIIERFYDSNYLCVSTIHSFLWEIIEPYQKELLGVHREYIEQLISDIKYEIYTCDVKGKAPAFKKLRALSQDESLFLNEKVIENTKEIYNCFRCEDASSFWAELESILGGDIYTKIKSSKADVEKILRSIIKISRLEFCAKMIDCKDSKYSTVSYNEKGGREILHKNLIGHDTLIDYSLTLVEKYPLLRRVILDTFPQIYIDEYQDTHTQVIKIMDMLITYSKSHNIDFIVGFFGDPVQSIYSNNELALSIDNELDMVYKNINRRSHGGIVDLINVIRGNHQKIHQKALKNNAESDIFISSYGKEGVDEICFINDKIEEVKVKWKITSKNKLTCMVLRNKTIANLCGFGSLYDIYNNIYCDKSSFLSYASINDEVLSKDIVKLGILPLLILKISTPIFKIKFESNSPLSDVFSDESLDNHTLEEISTCLDYVRNGGYSSLSEYSSDLLKKSTESDRLKALYSDLAKGWAINSEDINCPDDIVDCLCYSISSSASDKLRDNVKLILSLDLNEIFNWIRFVYKIDIDDEVSYITCHGSKGLEFDNVLAIIDDKFGKDSNSKNVKDKFTKLFVSGFHENHDTDMEKTRNLFYVICSRAIRNLEIALLKEGSVNEEIIFK

SEQ ID NO: 66146 - protein, 663 aa, Vibrio parahaemolyticus EN2910; identical to SEQ ID NO: 63134

SEQ ID NO: 66147 - protein, 583 aa, Vibrio parahaemolyticus EN2910; identical to SEQ ID NO: 63135

SEQ ID NO: 66148 - protein, 667 aa, Staphylococcus aureus subsp. aureus
MLISELHISNFRSFGNESQMIEIADLTALIGANSSGKTSLIMALLRLFGQKNTDRTLIKTDFHIPESADISKINEIDLMIEAKVIFPELKLESPANIKTVPEFIKHLIIEETDADPYLRIRLKGKWIQGSTPEGNIEQELVYVKIPYGREEKEEDLTRVPIHHQKLIQMMYIPAMRDPAKQLKNASGTLLWRIFDGIDWPENLNDYIKSLTSPIETLFKEIPSIKDIQGILNNQWNKYHKDKRYSNSQFKFNGNSLQEFLKNAEILFNPTIDGNSVKVDSLGDGLKSLFYITLVSTLLEIENKQEKDDKPLLNILAIEEPENHISQHLLGRIVRNLKEISKKDNAQVILSSHNSSIIGKVDPEYIRHLQIQNSESIVNNITLPEKNDDAHTYIKEAVKAYPDLYFSKLVILGEGDSEEIVLPKLLSADNIYLDDFNISVVPLGGRYVNHMWKLLNDLSIPHVTLLDLDRERGGGDWGRIKYVLKQLDENNRCSEQLRTVLLIPSNTYHTYSMEEIEDFHNRKSNRLNSLNTWIEKLEKEDVFFSYPLDLDFTMLMSFQEEYQNTMERGPQIPKDSNSTEYDEKLKKSIQATLKNEKAIAKTYSEDEKKLMIWYNSLFLGRGKPSTHIAALKDIDENEIIENAPKELLRLIQRVKEKVGLVGGSNIDE

SEQ ID NO: 66149 - protein, 641 aa, Staphylococcus aureus subsp. aureus
MNNRILEDEWKPSDDVTLEDSALHAIRASSHVAIAAGPGAGKTELLAHKAGYLIETGMCPYPKKILAISFKTDAARNLQERVELRYGKGVEKRFESKTFDAFAKGILDQFIHALPKEYQPQKNYEIILNEKSLNDIINAYITEPYSYYSNWQYEYHINSVLRTMKETKLPIVSFEDDLYSWINERLWMALLNGKGNLKSSLTFSMISILVEYLLKENPLLVKALQATYSHVFLDEFQDTTHIQYNLLKTIFLKSNTVITAVGDNKQRIMGWAGALQNAFGIFKTDFNATQYTLLNNFRSAPNLVYIQNIFSKTLNDASIEVLPAGEWNKNEGVCEIWNFKNHNIEAILLASYISKWMKVENLKPRDFCIIVKQHEHIYAAEIMKELSKINIKSRIEKDYQDLLSEELVLLIIRFLKLSYEEKSPELWLNVIDEIIDMKYSDADSESINYLIIEKELVKMLDEVRKLYSNINDTNFNTQFAEILQEIVVFLGEDIIKATYPKYNQANYFNEVMQKMIDKLQYQNCISMRGLVQEFCGEYSIPIMTIHKSKGLEYHTVFFIGVEDDAFWSFSTQKEADKNAFFVALSRAKQKIIFTISEKRNILKFGEEKNILQETKNISELIQTLIDAGVPLIEKSGLDNIL

SEQ ID NO: 66150 - protein, 643 aa, Pseudomonas putida
MKLCNLRISGFQSFGQGITEITFDGVTYLLGPNGAGKTATLQALARMFGFEPGLRRLRRSDFHVPLDEQAVPAQRVLWIEADFTFDETLDDDEDDTVPPFFTQMTLQTADGVPRIRYRLEGVLHSDGEVEERLLYVTRMDEKGQPTSLKTVAKRERDEIHVHYLPARRDPADHIAYGASALLGRLLRAVNWSDDRDSIKQLTEQITECLSENESIKTLSTSLSGAWQRLHKGDFFANPSLTFANSEIEAILRHLSISFTPGHGESHVDYERLSDGQKSMLYLSLVLTSLTIGREVRSGQNTSFDPLKLKPAAYTILAVEEPENSLSPHYLGRIVSSLKSCVGVDAQALIATQAPSMLRRVEPDQIRYLRLNAKRETDVSIIVLPDKRSDAYKFVREAVQAFPELYFARLVVLGEGDSEEIVLPRILQAKGASVDEYAVAIAPLGGRHVNHFWRLLNALGTPHITLLDLDVGRYQGGWGRVKYVRDQLDKFDPGRSIPNHWERHEWNDAQRPVRTHHWFENGDTTISSMFQELENRDVFFSDPLDLDFAMLKAFPDAFLAVRSNPTPHDHLAVLGKCHFNPGQYDADEQQLFSAYHFLFKVSSKPAAHLDALGKLTDAELLASLPASLNRLADRVKAKLEESPE

SEQ ID NO: 66151 - protein, 559 aa, Pseudomonas putida
MISHDQWVPSPGVRLEKNAWSVVRELGRSILLTAGPGAGKTEVLAQRADYLLRTNSCRFPKRILAVSFKTDASRNLKERIHLRCGWNFASRFDSVTFHGFAKRIIDKFLPTLAEEGLSPDYTIGAEAIQGKQITFKQLLPFAIKIIQRSEVARNAIRKTYAHVFLDEFQDCTADQYELIKLLFLGTGIHLTAVGDRKQMIMGWAGALEGVFKTYTTDFDALPLHLYANFRSKSNLLRVQNEIIREIDPTAVTPAELIAGDDGEVLAAHFQHSSQEAMMLAENICRWVEAGVPPREIAVLMPRQVDDYGSALMAELGNRGIASRNDSELQDLLKEPAARVAIDYLTCLYGRGQSDAWARLMDLFTPYEDASRDHLHRLFETTYRAHVRQVRAASKTATPYEDWWALTSSFLRDVGYPILTALSGDYESKPRLHEVVREVRDRVSALLASEKTIPNALARLSDDQAVRFLTIHKSKGLEFHTVIILGVETQAYWGKLAEERCVYFVGVSRAKERLLITTAEYRPKPKGAGRWTEHRSPHGEFVSHVTRHITGRLPPSKTML

SEQ ID NO: 66152 - protein, 663 aa, Vibrio parahaemolyticus; identical to SEQ ID NO: 63134

SEQ ID NO: 66153 - protein, 583 aa, Vibrio parahaemolyticus
MTALNPAAQASVETLESLRGCIDQGQCFRLEAGAGAGKTYSLIESLKHLISLRANEFVVSGKQVACITYTNVAKDEIKARTDNNPVIFADTIHAFSWSVLQNYQVQLRQLIPTLGAKWQERIAESVGIGNQTVKYDLGYASIKEHEISLHHDDVVALMARMLAFPKFQKLLKSKFPIIFIDEYQDTDSALAESIVQNLIDNDSGVVVGLFGDHWQKIYGSSACGLISSPAGKIIEIGKRANFRSDKNIVECLNRMRPELPQAESDPSSVGGIEVYHSNDWQGARQTGAHWKDDLPEEETRRFIQQTKSLMVEHGWDMSLSKTKILFLTNNLIATEQKFKNLADCFNYAEDYLKKNDKYIEFFVDTVELTALAFQQRKYGELLQIKKKNRSYLTSQADKTAWIENLEKLMRLRDTSTIGDVLDLLITTSMPRVPAKVADSEVRYQTLSARDKDSLEPDELSFVAKIRRLRAVSYSEVINLAEYINDKTPFSTKHGVKGAQFDNVLVVCGRGWNHYNWDQMLEWIENGVPKGKDGTFERNRNLFYVSCSRAKHNLTLLFTQYLSDKSLTALGKIFGNENIKGSPF

SEQ ID NO: 66154 - protein, 663 aa, Vibrio parahaemolyticus; identical to SEQ ID NO: 63134

SEQ ID NO: 66155 - protein, 583 aa, Vibrio parahaemolyticus; identical to SEQ ID NO: 63135

SEQ ID NO: 66156 - protein, 663 aa, Vibrio parahaemolyticus; identical to SEQ ID NO: 63134

SEQ ID NO: 66157 - protein, 583 aa, Vibrio parahaemolyticus; identical to SEQ ID NO: 63135

SEQ ID NO: 66158 - protein, 663 aa, Vibrio parahaemolyticus; identical to SEQ ID NO: 63134

SEQ ID NO: 66159 - protein, 583 aa, Vibrio parahaemolyticus; identical to SEQ ID NO: 63135

SEQ ID NO: 66160 - protein, 663 aa, Vibrio parahaemolyticus; identical to SEQ ID NO: 63134

SEQ ID NO: 66161 - protein, 583 aa, Vibrio parahaemolyticus; identical to SEQ ID NO: 63135

SEQ ID NO: 66162 - protein, 663 aa, Vibrio parahaemolyticus; identical to SEQ ID NO: 63134

SEQ ID NO: 66163 - protein, 583 aa, Vibrio parahaemolyticus; identical to SEQ ID NO: 63135

SEQ ID NO: 66164 - protein, 663 aa, Vibrio parahaemolyticus; identical to SEQ ID NO: 63134

SEQ ID NO: 66165 - protein, 583 aa, Vibrio parahaemolyticus; identical to SEQ ID NO: 63135

SEQ ID NO: 66166 - protein, 663 aa, Vibrio parahaemolyticus; identical to SEQ ID NO: 63134

SEQ ID NO: 66167 - protein, 583 aa, Vibrio parahaemolyticus; identical to SEQ ID NO: 63135

SEQ ID NO: 66168 - protein, 663 aa, Vibrio parahaemolyticus; identical to SEQ ID NO: 63134

SEQ ID NO: 66169 - protein, 583 aa, Vibrio parahaemolyticus; identical to SEQ ID NO: 63135

SEQ ID NO: 66170 - protein, 663 aa, Vibrio parahaemolyticus; identical to SEQ ID NO: 63134

SEQ ID NO: 66171 - protein, 583 aa, Vibrio parahaemolyticus; identical to SEQ ID NO: 63135

SEQ ID NO: 66172 - protein, 663 aa, Vibrio parahaemolyticus; identical to SEQ ID NO: 63134

SEQ ID NO: 66173 - protein, 583 aa, Vibrio parahaemolyticus; identical to SEQ ID NO: 63135

SEQ ID NO: 66174 - protein, 663 aa, Vibrio parahaemolyticus; identical to SEQ ID NO: 63134

SEQ ID NO: 66175 - protein, 583 aa, Vibrio parahaemolyticus; identical to SEQ ID NO: 63135

SEQ ID NO: 66176 - protein, 663 aa, Vibrio parahaemolyticus; identical to SEQ ID NO: 63134

SEQ ID NO: 66177 - protein, 583 aa, Vibrio parahaemolyticus; identical to SEQ ID NO: 63135

SEQ ID NO: 66178 - protein, 663 aa, Vibrio parahaemolyticus; identical to SEQ ID NO: 63134

SEQ ID NO: 66179 - protein, 583 aa, Vibrio parahaemolyticus; identical to SEQ ID NO: 63135

SEQ ID NO: 66180 - protein, 689 aa, Aneurinibacillus migulanus
MFISQINIQNFRNFKGDNNVVEFNEGINIIIGHNNSGKSNLLKALDLVLNVGSSKKLSVDDFNKEVSIAELREKPPKVSITVTFSESANEPEFSEDLVTVSTWLTELKSPYKAQLTYVFYLPEKEEAEYKREMSLLSSSNINEYWLTIKHNFLRKYKSAIYGGNPDYKNSVDTEALKKIDFQFLDAIRDVERDLFTGRNTLLREVIDFFMDYEIKSNKEIDKSQQLSEINQLKKEFSQEAAKLINSLKRRMERGTKEMLTYANHTGASFGNSEPDFDGYILDSELYSVLRLIIKYQTGITVPATHNGLGYNNLIFISLLLAKMQKDASGDYLGSNAKIFPILVIEEPEAHLHPAMQYKFLKFLKEKSHQKARQIFITTHSPNITSAVDLDEIICFHRKDDNSLNIGYLGRAFGDDKKSKAYVQRFLDSTKSDMLFSKGIILVEGITEQLVMSLFARYEDFDLETNHISVINIGGRYFEHFLKLFDSNKSHTIHKKVVCITDLDPVRKIKQEEADYERCYPFELDIDKENYLYRNYSNDLIDKYSIDRYGMSTHPNIVCFSQEKGIGKTFEYTLAYTNPNCKLIITDSISNSKELNRLFDAYSEGKELEELINIHGKRGEENTRVIESIRKYKKPDVKEHLIASRYLNSIKKGENAFELAQALEENLETGNVADFKVPNYIREAITWICR

SEQ ID NO: 66181 - protein, 572 aa, Aneurinibacillus migulanus
MQIINSDSYIDINQHFKVSAGPGAGKTKFLINHIKNVLRNSERLGRNRKIACITYTNVGVETILQRLGDETDHVEVSTIHSFLYTHIVKPYMFLISDKYGIDPTNIDSPCEHIVSNGYLSRTDLATRFFVREKDMKNVYWEVSDETCKLHLRHRDRDKGYHKSLLKYKKFFWEKGIIHYEDILAFSWEILKSFEEVLRIIRSKFPYFFIDEFQDTNPIQTNIIKLIAQNETIIGVIGDKAQSIYEFQGADVKQFNDFSLPNISLYRMEDNYRSTENIISILNNIRKDIEQKNPLNKKGNSPVIIVGEALQALKTVQEILGEQSFTSLSYSNLTANAIRNNKPIEEGDRWKVIEEDFDDSDSKRRKIFISLIKAIELARLSHYKESLRELSRHVKKTDNFNGEKTALIVIKTLLNDYYEFNSKPLWFLYDKIVSMGYFQFPKIRESKNAKVPSKAEKYYKETLYSDIALYVKIAEDVSLHCTIHKAKGSEFDNVLLIVKGRDGKKYIEERDLGFLLDPDIDENEEHRVYYVACSRARENLFINVPEITEETKNKLQDMFDFKYVSDRSLVTIT

SEQ ID NO: 66182 - protein, 616 aa, Pseudomonas sp. MRSN12121
MLGQELVRRNAIGWPSQCNCAGDNNAGKSTLLEAVDLVLGPERLSRRPVIDEHDFYAGTYVDPVKKEVVPIQIEVIVAGLSDEQQRHFRDHIEWWDAQAKTLLVGAPPERTDAPHVGAAMRVFFNGWYDVEEDDFSGDTYYATPETPDGSYLRFSAPDKRKCGFLYLRTLRTGTRALSLERGSLLDVILRLKETRLTMWEDLLDQLRALPVGETEDIGELLAAVQDAVRHYVPSDWAEDPHMRVSDLTRDTLRRTLTVFMGTGAKRPDGSVYSAPYQHQGTGTINTLVLALLSIIAELKQSVIFAMEEPEIALPPHTQKRIINSLRQKSAQAIFTSHSPYVLEEFEPAQVVVLKRVAGVMTGIPATYPPSVKPKAYRTEFRTRFCEALLARYVLVLEGRTEYDALAAAARRLGELDPTRFKSLENLGVAIVDARGETNVAPLGAFFRSLGKTVFAVFDKQSPEALAAIKASVDHPYESASAGFEDLVLQGASEAALRSYAAAVVAGGDWPQHLAAWTPAAATPLADLQAALSSYFSWAKGGGDAGDLLASCQTADDMPEYVRTTLAAIKNVIEPPRLPPLPPQAAGMPLLPETAAKPAPLAAAYGRFQPSPPQPST

SEQ ID NO: 66183 - protein, 549 aa, Pseudomonas sp. MRSN12121
MGGPGGGKTHVALVKARDEIRSGVLKPGQKILFLSFARPTVARIIEKASELISREDLKQLEVSTYHGFAWSILRSHAYLLNGRRSLQLLPPPEAAAHLTDIDKAQHENEKRRLFEQEGRLHFDLFASLVSDLLRRSDRLNTIFSDTYPIIILDEFQDTNSDEWALIQQLGRRSRLIALADPEQRIYEFRGADPRRVGDFLESFSAAHFDFAGENHRSGGTDIATYGNDLLTGANKGRTYQQVKIIRYGFLYGKSSHFSAKTAVYSALERLKKVPDKSIAVLVPSKRLMLELSDYFSSTSDGLPELYHDVAMDAEPPALAAGVIATLLEGGTASDVASRMLGALHSHIRGRRGGKPTPQTELDLAGALSGFLSTGKIRGAKRQLIVSEVQRISELRQRLEFTGDPSEDWLYLRGLLASSTAEALRQVATDARYLRLLHRGSVLRTSLGALWRAQGGYRGAEEAVRSALMQEHFAAAQKDWRGIHLMTIHKSKGKEFDEVIIYEGLYQRIAKAPQDPKTCAQDLLALRVGVTRAVRRTTVVTPKREPCPFL

SEQ ID NO: 66184 - protein, 614 aa, Burkholderia pseudomallei
MHLSKLVIKNFRKLKHAELSFQAGLNVLVGGNNVGKTAVVDALRALLAGHDEPYPRLGEEDVHRPHDGTPSGDIVFEYVFSGLSLDDEADFLAALVPGAAGGLEAHIKIRYSDADKAGRLRAKRWCGEHEDVGLTADMMENLRGVYLPPLRDASQGLKPGRTSQLARLLQLLADESGIEGINKALQELDGKLKEHLPIANTHNAINTRHKTMLGPQLAQLLEVGLSASDFKSLKSRLSLLVDAFEIEQNGLGFNNLIYMAVVLSELTKNPDSCYRGLIVEEPEAHLHPQLQAVLLQYLQSIQAVEGEKPVQLFVTSHSPNFASIADLNSLVCLVDTGTAVETFLPRSVVFDKGKREKLERYLDVTRAEFFFARRVIFVEGAAELMMVNALAKRIGCDLRQHGVSLISVEGLNFDSFLPLFGDKALKIPVAILTDADPVPPETQSVAAEAAAVEGTPPSWSADPAADESVDESQDADPEPVYPAPGDIITLSANTAKMKGREDTYVKVFHGLKTFEYDLALESDNRTAMLKALAELHPRIAKSLIAAVDAEVGDAAKAKALFCGMFERPKNNVQKGSFAQSLAQVISDDKVAFTVPNYIQAAIQHACRLAATPKP

SEQ ID NO: 66185 - protein, 608 aa, Burkholderia pseudomallei
MSELTPEQQEIVDAPMVPLCVIACAGSGKTKTAVHRLVRMRRNLGEARGRVALLSFSNVAVDTFRKTYDDLASSLPSSAGRSRVDIDTLDGFITTNIIRPHGHRTMKSLRATFLVTGNESFLEGFKFSTSSFPQPITALHLAFANGEEVFYHVYNDQIELVDTSAARNLIAKLGRTGAYTHDLGRYWAYRTLKERPELLAALVRRYPHILIDEAQDIGSAHQAILELLIDAGSCVTLIGDPNQGIYEFAGANGKFLTDYHQRAGVKKHSLQRNFRSTPSIVDVANGLCGRSDVADRAASSTPHGAFFTGYKRAQHAQLITAFQGAMSVVGADVTRSAVLCRGKGLAETLRGDEAPAGQGLVKAFAAAAVLRDRRKDFLKAFQRVAVAVVALLENAPHGLVSQITQPSSDEADRELRKAIWAFTRDAATGLPSSSLVAATQWHSLLLARIKVLLASLESKFGLKSTENIGRKLSKKALPSAPLASAEDLAYGDVTTLRVDTVHKAKGESLDAVLYITLKEHAQALLDGVTTEVGRIGYVAATRARDLLWVAVPDSALKELRPMLLAKGFKEVGIAVAPVPAVKAKVSTHVGIASVVATTPVISSTTQTP

SEQ ID NO: 66186 - protein, 729 aa, Staphylococcus aureus
MFISTLQIRNFRNYESEIFRFDNETNTIIGENDSGKTNALTALRILLDDSYYYSSKTLKESDFFHGIQNGWQGHWIIISATFEGISEEEFDNEICASISLNSESQTILEELISNADKGVGSISLFIRPNKAIRKQLFDISTELDSHQFNEFRNSIRLSDYEFYYTSKSNLNFCINENYDKLVGRLNDNIASNPEEDDEALLGSRIDMSDIFKHISVVYVDALRDVLREMKNNRNPVKRIMETIESKISSDNVESLKTIIQQLNETITSVPEIRKIGENINRQLNSIIGSVYSPNLLLSSTMSDDMGSLAKFLSMKPEQNIDLDLLGLGHLNMIYLALKIVEFEACRSRELLNIMLIEEPEAHIHHHIQKTLFEGLNLQKNYTQILMTTHSVHLAEVSEISRMNVLKSFNGKSIVMNPANNLNSFAKEKLKKNNLNLINAVERYLDVKRNGLLFSKGVILVEGDAEEILIPQIVKKLFGINLDELGIGLINVGSTSFEYIASLFDDDRIQRKCAIVTDLDEQAIPSEHRLYKSTAQEKGQARKEKLSSLFNENNWVNCFYANTTFEIEFLDVNKENILTYVSPIIDDAFKDKKTITAYKEEIQSEQYLERNLAMLKLANHVGKGWFVIELGEKIDFLIKIPKYILNAIAFACQEIVDLSIYKKILLHTIDLYEETTELSALSASLKTSDTADLNIAIISLLEYFGKDEDVVYLINQIENYTKILYAEVSK

SEQ ID NO: 66187 - protein, 597 aa, Staphylococcus aureus
MTNIFEKIVNDLNLEQKDVVESEDNLYVNACPGSGKTRVLTRKIAYQAIKHDGSLKRIIAITYTNRAAEEIKERLSLLSIDDDINIWVGTIHQFCLEFIIYPFKMNLSRVSKGFTIIDDYTQRAYVSQINNMLNLNLKTYELNKIDLSLSHDFKINEVQYTQVSEMYHTMLEKNKEIDFDMILLVAYKILTVNSNVARNIASNIRAIYVDEFQDTRELQYNVIAKLLQNNPQIQSMFVGDIDQAIYGSLDGIAKSVEELEMLTSHTFQSKTLHGCYRSNQRLVDFYSNFQSCPYEIESRGNNKNDRGFISYDCKVTKEDLPNIIKNIIKEKIESGIHEKDICVLAPQHYPLFSLGEYLKKELPYCNFDAINISPIKVNNHSLFFKLAILYFTESGEKVRRRKLIANDILIILKNEFGIEVKDYFIDLDLLQLINSVKRMYSGDDNGVDLYKFVTKHIFVNLNIDENNYPSIFKHYLFFINEVEDRIKNNSLSSSVSSFKKMFKSRDGITLTTAHKVKGNEYDTVIAINLLNGKIPHWNEIFNVSDKGISSARKLLYVICSRAKNNLFLFSEVGYFTSKGDLLYPTQLLDKIEFDYNI

SEQ ID NO: 66188 - protein, 729 aa, Staphylococcus aureus; identical to SEQ ID NO: 66186

SEQ ID NO: 66189 - protein, 597 aa, Staphylococcus aureus; identical to SEQ ID NO: 66187

SEQ ID NO: 66190 - protein, 651 aa, Pseudomonas amygdali pv. tabaci; identical to SEQ ID NO: 63506

SEQ ID NO: 66191 - protein, 556 aa, Pseudomonas amygdali pv. tabaci; identical to SEQ ID NO: 63507

SEQ ID NO: 66192 - protein, 715 aa, Bacillus subterraneus
MYISKLYIRNFRNFCSQNFLFQPGVNTLIGENGSGKTNAFFALRLMIDNNLPISASKLIETDFNRNLSRWQGHWIIISLQFEDLDSSEGANILAHKLEHVNEASSSGSYHFYFRPNKKFRKKLYELSIDKDKDQQKLEEILNEITINEYEGVYHFRGTADFSVEAVYKELVGDFENIIFPNPDDEKKDLLGITTSQIFLVRSEIACTHIKALRDVMAELRKNRQSPLLNLLRGSAKNIQVTAASNITSKVTDLNETISNLSEIKELAEKVKKTLDSTIGFTYAPNVSIRSELPEDINKLFQSLTLWVGDGEDTSYQGKLEDLSLGGANLIYITLKLLEYEYKQPTEEKAAHFLLIEEPEAHIHTHIQKTLFDNYKFQNTQVITTTHSTHISSANKIKSVNILCKEVNETVVCHPSNGLDDNECTKIERYLDATRSTLLFAKGVILVEGDAELVLIPALFKSVFGLSLDEMGVSLINMNSTVFDHIANLFHDQRIRRHCAIITDHDISLTPLKVNKDDDTVEERKSRNSEIKGEERKQKLDLYCKDNPWVEAFYAEHTFEVDFVLTGNQREIIQSLSKIYKSKKSIDNSKALLESSDNINVGLETLRLADKVVGKGWFALTLAEELTYETFIPDYILKAIAFAAGHIGFKHFVKMAKYRIEQHCSYDEFCEFVDALENLNDIEQSYSELRKLCEEYLDENDDLILLIDNYERYQVC

SEQ ID NO: 66193 - protein, 598 aa, Bacillus subterraneus
MLDGLNSNQLDAVTTDKNALVIACPGSGKTRVLTRKIAYELERFDSKKKFIVALTYTNRAAEEIQRRLDDLGIPQEQLWAGTIHSFCYQWIIKPYSAYEPALVNGFSIIDDNKKRKILNELKKKHSIPFFSDINTGLDRNANYMNADPYNNAIAKEFHESILENKEIDFDLLLYYSYKMLINNKKIRSHLANIFSHIFVDEFQDTQDLQYAIIGQVLTVAGDKCKLFLVGDPDQAIYGSLGGTPKSLYEIQEEIGNQDIVFKEIPGNYRSTQRIVDFFRNFQSTEVNIEALGQRANEHGYITLDTTTNKDNLYKEFADIITHNIKKGVKPSEICIIAPQWYFLTPLAQKLKSVLPDIPFDAPGVSPLPTNRESFWWKLSRLFLSEITPKTSMSRFRWMSHLINDLNGYTNGSLGNEYIDCRRYLKIINSIKPNESNGILYLEKAFKAFFNKLELDLNDYYVLVEQWDIFFDGIRTRYESTDFIGTPDDIQYFKNIFKPSTGVVINTCYGVKGEEFETVIAFGLLWGYIPHWSSIRNQPNYITESASNKLLYVIGSRAKKNLHLFAEKGRKANSGYAYQTNHQLAQAKFEYDGTYYQEK

SEQ ID NO: 66194 - protein, 805 aa, Pseudomonas stutzeri
MKLQAYRLQNYRRLRDVVIELDDEISIFVGANNSGKTSAVQGLYSMLRGEVKKFELFDFSAALWAEIDAVGRTPPGDEDAPKRLPSILLDLWFRVGEDDLAIAMSLLPSTEWDGKCVGIRVAFEPRDAHDLVWKFHELHEKANNAAVALAAKRKAAGEQAVEAGAEDAAAVVADAGEYKPWPESLTKYLTKELSKEYTFRYYVLDERAFVGYQAKEADYEPLPLGKEPGGAAILKSLVRVDFLRAQRHLDDPDTGSSDRAESLSRRLSRFYHRNLEKRGDDHAALKALDTSEKELNFHLKEVFSDTLKRLAKLGYPGVNNPEIVIRAALDPTTVLGQDAKVHYVIPGVASAQLPDSYNGLGFKNLVYMVVELLDLHEQWKAEEDKRAPLHLVFIEEPEAHLHAQIQQVFIRNVLRLLEDANDHATFFHTQLVITTHSPHILYERGFSPIRYFRRVSDQLGHHTNVRNLSLFKTGASEAPAREFLQRYLKLTHCDLFFSDAVILVEGNVERLLLPAMIEVAAKRLRSSALTILEVGGAFAHKFQELIAFVGLTTLVITDLDSVTVKTDAEKAAAQGAGAEGTVDGDDEDDDLKPFELEDDDEAEPGGKKKSKKRGSTCHAHVEGAVTSNQTLISWIPKKRSMAELWEVTAEQKTLSLAEDSSAEVRVAYQIKVSVTVGATTSQLCGRTLEEAFGLENADWCQAEANRAVGLKLRSAPSSPEELAEKLHNRVVGKNFDKTRFALEVLASGPLNGWKVPAYIAEGLAWLEAKVAHELEADAAIAAEVATIEPTAADVVAVIVAPGQTA

SEQ ID NO: 66195 - protein, 643 aa, Pseudomonas stutzeri
MSRRIDSPDTDADREIHTCIAATPPQPFVVRAGAGSGKTTSLIKALDWVMSEHGASMRAKKQKVACITYTDLAANEILADVNDDPLVHVSTIHSFYWSIAKTFQADIKVWLQNDIRRRISELEEAFENYSSRVRQTTRDRNKADQERYGRSLEAVAGVRTFNYGVGSDYAKGILGHEDILQLADFLLQNRPLFRRVVALNYPFVFIDESQDTFPGVVKSFKEVEAQMRGKFCLGFFGDPMQSIFMRGAGDITLEDHWRAITKPENFRCAKQILDVANAVRAQGDGMEQVRGLHERGDGGLKPVEGSARMFVLPNTLNRTEALARVRAWSSATNNDEGWATPDIAVKILVIVHRMAANRLGFGGIYSALNDKTSDAMKQGMQDGTGWPVRPFLNFALPIIAAVNAGNEFAAMNLLREFSPRLAPAALTGQRAVDVLRELHAAVLRLVAMLDEAGTTIGDIALHLCDTGLFEFDVRFARVLGFVRDVADAVQEPEAADAVPAEGLSSDAAMAKFFNCSAQELWPYERYVSEGSPYATQHGVKGAQFERVVVVMDEEESDYRTYNYERVFASAEARAADRARALDGDENTWSRTLRLLYVCCTRAQRGLVLMFFVADPATTLENVVASGILPRSAVFTQEVLAGWP

SEQ ID NO: 66196 - protein, 636 aa, Bacillus cereus
MYLSEINAWNFRRFGIKDDGKPGVHLKFNQGLNLLVGENDSGKTAIVDAIKYTILTQSYENLRIELEDFHIPVGESDEDERAQELRIECIFRGFSDLEAKNFLEWLGMEKNSDEIYEYYLKVFLIAKRKGNHIYYDIKAGSDQEGKALNGEARSLLRTTYLKPLRDAEKEMASKRNSRLSQILESHEAFKGKEEHYLYEIIQEANGKIKNYFKGKDTSGEELTDQEGKKILEQINVYLESFAGENKMLSSDFNISPLRLKNILERLNLELIESKSGLGSHNLLFIATELLLLKRENYQGLKLALVEEIEAHLHVQAQMRLIDFLQQEVENSNLQLIMTTHSTDLASKVNLSNLIICKDGAAFPMGYEYTELSQGDYLFLERFLDSTKANLFFAQGVILVEGDAENLLIPTIADIIEKPLSKYGVSIVNVGNTAFLRYSRIFKRKNPEIGGLKIPVAAITDNDVRPDLYKSKDPQAKTWEDLENEKPIEQRREERKARIEGQDVKLYISPVWTLEYDIALGILQKELFEAVLRAEKIQNSDSIGLTPAKIKAVNKTVEEKYKNWEEENVPNEKRAFYIYSNLMLDKSISKAITAQCFAEVLSQKQKEDHEGLKEKILKDENLKYVVQAINYATNGVG

SEQ ID NO: 66197 - protein, 634 aa, Bacillus cereus
MTQIDSRDISYAEQMLLHNGESFDDERRAVIQCLESKDIIACPGSGKTTALLAKLAILAGKLPLENNKGICVLTHTNVAIDEIKNRLGMHGEKIFKYPNNCSTIQSFVNQFLAIPAYIHFYGKKPFRIDDEIYNEEIRKKYYRIVPYGLRFGIEQSRIDVGTIRFNLENETLQKSLYGAKIYTNEQSRSYLALKTLKEQMLEDGILCYDDAYFLAYKYLRENPNLKGVFSNRFLYVFIDEMQDTMKHQKELLELLFDDSVVIQRIGDLNQSIYDQSGAIGSWEVDSESSLEISDSKRFSKAIADIVKNICVTPQNLNGNTNIEDIKPCLLVYNSTNIQNVLKEFARIVVERDLHNLDRKVFKAIGWVSEHEREIGIKDYWEEFKTSRRKRSDFNSLIMYLLKESSEDLERFGANLYNDKILKGIIKALRIMNEKNEGKHYTKQTFLNYLKESHNEVYEDLMLKLSIWCLMIQNRQEVVGEVEEFITVKLKRIFNWNDISQLTSFFSNTEEESTEVYSIQTNVMKFLEEENEVDIEVASIHSVKGETHTATLYLETYYFEYDIKRIIAYLKGNHTNTNRSRMVQNLKMAYVGMTRPTHLLCVAVREESINGHEAELNAAGWDIRYVEERVPVTQV

SEQ ID NO: 66198 - protein, 771 aa, Raoultella ornithinolytica
MHLRKLAVRNFRRLHDVVIDLASDISIFVGANNSGKTSVGHALQLFTGKSRFNIHDFNAECWTDIVTFGEGADAASLPSLELDIWFEVTPNDVHRVVDLLPSLSWSGSLVGMRVAFSPINPEEIRSRFLAVRQLAIDATPKDENGTLKYDPSPRNLWEYLRDRLNDEYELRYFVLDPARFNAEMISEEGYEPTPLTGRDRSGREILNSLIQINFLNAQRHLSDGSGGSRAEDLSRVLSRFYGRNLEQKGEDYEALIALAASESAFNQHLERVFAPTLKSLAKLGYPGLSNPRMMIRSALDPAQIMNNQNGAVIHYALGEDDGNPTPPTLPDSYNGLGFKNLIFMVVELIDIHNQWLAIEENRPPVHLIFIEEPEAHLHAQLQQAFIRKIMDLLAMESQELMHYTTQVVVTSHSTHILYERGFRPIRYFRRKRSSNMSATDVLNLSVFYDNTDPEIRDFLERYLKLTHCDLFFADGAVLVEGNVERLLLPQMIATAAPRLKSSYLTVLEIGGAFGYRFQKLIEYLGLTTLIITDLDSVYCTPLVQDATEARANGLDGLAENPAANDDGEEPDDDEEEQANTETPGKACIASHPGAMTSNQTLRQWLPKCDTVAALWEATEEMKIQSRTAECDALVRVAYQCQTDVTWKEETLALAGRTLEEAFALENLSWCQDVSCKPLKLRIARAVSMDLLQLAQRIHKRVQSKSFSKTDFALNLLLKKPDEWSVPIYIAEGLKWLEAEIAPPELEAAEVQGENVEGMSVVLAETDGGRVA

SEQ ID NO: 66199 - protein, 625 aa, Raoultella ornithinolytica
MTSRIGSPDTQADIDVRACLDSSPPRSFVMVAGAGSGKTTSLIKALAHLADTRGSALRRAGQKISCITYTEVAVGEIAADVGNSQLFHISTIHSFLWSVIRPFHLDIAKWVIARIHEKIAEKQAHYDRPRTQAKTKSRLEDEITYLSAQLECIDDVDKFIYGTGSNYAKGILGHDDILKLVPACVEAHPLLRRIVAKRFPFVFVDESQDTDPNVISALRTIADDNPDMCIGFFGDPMQKIYMSGAGAIPLSDGWSEITKSENFRCPTSVLGVINSIRASGDGLQQIRGRTTIVDGVEHTVSGTVNLFILPSNVERSAYLTSVRRYLANETSDEQWLSDTREGDVRLLVLVHRMAANRLGFPNLFSALTDKAPMSLSEGVNDGSAWPLRPFVQHILPIFAAAQANDQFQIMSIMRNECPKLEPSRLHGQAMVAVLNELQRGINGLLALLEEGSQATVRDILLHVRDCELLRLDDRFDNHLRDEPVNDGNDDFENVQNYLRCNAHELWAYRRYLSEESPFATHHGVKGAQFERVLVVIDDEEARFSQYSYGKYFQYIPLSDNDLANLEEGKESVLDRTRRLFYVCCSRALKDLAVVIFVPDVAVAQSAIIEQNLFPASVILGEHDLA

SEQ ID NO: 66200 - protein, 711 aa, Pseudomonas oryzihabitans
MHISRLQLVNYRNFQCANIIFNKGVNTIIGENGSGKTNLFRALRLLLDDSLLRSAYRLDEKDFHRSLGEWRGHWIVISLEFDEVSHDEAIQSLFLHGTGNIADGAIGKATYNLIFRPKAAVRRTLADLALGDTIGLAEARSQITISDYETIFTGKSTADFLNPETYRQLVGDFDAVLFPQELTNPAIGGVIPGMLSISREVCFTFVQALRDVVADFQNNRTNPLLTLLKSRSGAIDPESFEPISALVKGLNDAIEGLPDVRTIRADIRDTISDAAGETYSPRSLSIRSDLSDEADRLFQSLKLFVGESEEQYEGAIHELSLGGANLIYLTLKLLEFKYQKQKESFANFLVIEEPEAHIHTHIQKTLFDRLNYDDTQIIYSTHSTHISEVNNVLNINILGREGGQCEVFQPSAGLDAGQIGNIQRYLDAVRSNLLFAKSVVLVEGDAEEILIPILIKKVFGLSLDELGISLINIRSTGFENVAVLFHNERIRKRCAIITDLDRAFIDTVEDVLDKDDVVAAKKKALGSQVAGLRREAALKELCDGNPWLTVHFADHTFEVDFVSAGNVSTVVSVLGDVYTDGGTIATSKSELESGDIARFGARVLTMARYAGKGWFAIILGRMITPETVIPDYILDAIFAAHKPVSIQTWARVLDYRVSVLAASQLHAPGNIEAMRAQIRLYHRGEIDFARVRAEMLQAFPADGINKILASF

SEQ ID NO: 66201 - protein, 599 aa, Pseudomonas oryzihabitans
MFIWDRKDLNDTQVAAIEHPGSVFLVACPGSGKTRTLTYKIARLLSELKSDKKRVIAITYTHRAADEIHERIEQLGVNTSQLWIGTIHSFCLEWILKPYGIYHPDLKHGFRVINAHDTERMLEELCRAVQGTKLSSFECTYYFEPNGPVLTCNKTAKHEAITGVLQAYWEALRAERQIDFELILCYAYHLIESNPSISVLLGSIFECVLLDEFQDTREIQYAILASILKTSKGGASAFVVGDPNQAIYGSLGGYAITAADLGMRCGIAFKEMNLSDNYRSSSRIVSYFGNYNVLPSKIEAIGKDKDYLSVVSFDSQTHRDALEEELVRLIKFNVETLGIAQHEVCIVAPWWVHLASMTRRLVAALPAYSFDGPGMVPFARDVDNFWYKLARIILTEASPQLYVRRMRWAGEVIADLNDAGIDVPNLDRKTLLRACNTITITETDGLVYLRAFFDQLCSVFGIDRYTCTALQEHHDAFFECSQRRVDKLIDEGSEAIAELAMFRKVFAGRTGITVSTIHGVKGAEYDAVIAYGLLKGMVPHFSDPDQVETAKKLLYVVSSRARKNLHLISERGRSLRWGGDYQPTDVLTGCAFEYDQFFN

SEQ ID NO: 66202 - protein, 595 aa, Acidovorax temperans; identical to SEQ ID NO: 62972

SEQ ID NO: 66203 - protein, 445 aa, Acidovorax temperans; identical to SEQ ID NO: 64283

SEQ ID NO: 66204 - protein, 650 aa, Pseudomonas aeruginosa; identical to SEQ ID NO: 65324

SEQ ID NO: 66205 - protein, 555 aa, Pseudomonas aeruginosa
MIKVDAWKPSAGIKLEPNAEIAATEQQRSIALTAGPGSGKSELLAQRADFLLTTGVCRYPKRILAIAFKIDASNNLKERVWRRCGAAYAGRFDSYTFHGLAKRIIERFRPVLAGADALNPDFKIVAKGKAHPVQTEFKELIPLAIKILDAYPAAVNAIRQTYSDVFLDEFQDCTDEQYELVTKLFKGSGRRVTAVGDVKQKIMGWAGALEGVFASFVDDFEAQHLNIYRNFRSQPHLLRLQNDIIKVLDPDSEMPAHLLAGEGGEVHVLSYADCQDEATDLAKRIASWINVEGIAPAKIAVLPRNQPEAYCIRLMAELDNWGISYRNENKAQDISTEPIAQVIVDYLLCIYGLREPKAWTRLTRRIIQVEDDAESELKTNWSRYIKEARKSAAADLATKTFDQRWTLLEEFLKMVGPALLAGLSHDYESWVHLREQIESVKKYIDEALAKEPDLLKALAQLSDDQSIRILTVHKSKGLEFDTVVLLGVENQAYFGKDHHEVQCTFFVGVSRAERRLVVTTASHRQNLAQLEYWRSARTVQAEFLAYVNLWKTHSN

SEQ ID NO: 66206 - protein, 662 aa, Bradyrhizobium sp. LTSPM299
MFIERLALTNFRCFGPAPTVIDLISGLTTFVGVNGAGKTAVMQALQRLFGITGDHRRLRRQDFHVPAAELIAPLQRSFVLEVILAFPELDAGAVDAGAVPEFFQQMATDEAGRLKCRLRLEATWTDDGSLEGTIEQRYRAVRTLGPFDEVDCIELKALDRARIQMIYVPASRDGASQVTAFLRGRLWRAINWSQGVRDTFSEAGSTLNNAFSGEAAVDIVAAAVRRRWQEVYTAGTDTTPLFRPVDLRFQEFIRKVEVIFRPDEAGRERALDDLSDGQRSLFHLAMTAATLDVESSIAADPVAAGFQAGGVPLPALTLIAIEEPENNLAPFYLSRIVRQIDDLTKGNRAQAVVSSHSASILARADPSQVRHFRLNPTDRTARVRAIRLPVGLEDASKFVREAVRTYPELYFARFAVLGEGASEEVVLPRLAEAMGFDIDRSFVAVVPLGGRHVNHLWRLLTDLDIPYATLLDLDWGRDGGGWGRIKTACAQLLENGVAPQAIFAQPNPAGPAANLAAFDANPIEDFASLTNWANALRQHNVFFCTPLDLDYSMLRAFPAPYQVIEPGRQGPSQQGNPRTAVLGDEGRGDLYGNEQDQVLRWYRYLFLGRGKPSTHVRVLSGQTHQALAAGAPEELRALLSSIAARLAPAALPPPPLPLPPVA

SEQ ID NO: 66207 - protein, 627 aa, Bradyrhizobium sp. LTSPM299
MVLVRPQDWRPRGIDDLEPDAWRALRQGGSACVVAGPGAGKTEFLAQRAAYLLETGLCPAPYRVLAISFKGDAADNLAARVRKRCPPELANRFTSITFDAFTKSLVDRFHSAIPAEWRPDRPYDIAFPVYRQVVGFLDLSRLAAPPQWQPEIAGLGAGNFESRFVGAYRLPIARPPPQSGIEFTIQRWWAGQLRIQPRSAVSFVSLNRLAELLLRASPDVRRALQLTYPFVFVDEFQDTTYAQYDFLLSAFGGANIAVTGVGDDKQRIMTWAGARTDAFDRITADFAAVRIPLLFNFRSSPDLVRIQHVVARALDPNTAPTVAQAVRQVDGDVAQVWNSPNKGVEAGHLARWLANDMATRGCVPRDYAILVKQKSDDFESDLAEPLAREGLTLRNESHALGRTTLQDLLFDQFSRIAIGLLRLGATRRAPDAWQLCSAALLEIRAISSGDEVAEARAETDLTVFLTALRADMANTLPSPANAAIFAARVVAFLDLAAVARTYLEYSSGDLLTIMVDAFQEHFVASAASVPDWTACLDAFEGVGQIPLMTVHKSKGLEYDTIVFIGLDDQAWWAHTPGNPEGLATFFVALSRAKQRAIFAFCQERGQRRRVAELFQLLSNAGVPEIAI

SEQ ID NO: 66208 - protein, 798 aa, Enterobacter cloacae; identical to SEQ ID NO: 65816

SEQ ID NO: 66209 - protein, 622 aa, Enterobacter cloacae; identical to SEQ ID NO: 65817

SEQ ID NO: 66210 - protein, 594 aa, Klebsiella pneumoniae; identical to SEQ ID NO: 64492

SEQ ID NO: 66211 - protein, 605 aa, Klebsiella pneumoniae; identical to SEQ ID NO: 64493

SEQ ID NO: 66212 - protein, 771 aa, Klebsiella pneumoniae; identical to SEQ ID NO: 64244

SEQ ID NO: 66213 - protein, 625 aa, Klebsiella pneumoniae; identical to SEQ ID NO: 64245

SEQ ID NO: 66214 - protein, 641 aa, Klebsiella pneumoniae
MKLEAIRLSGFQSFGKEPTELGLEDVTYLIGPNGSGKTAALQALCRLFAFDPTLRRVQRTDFHVPFDEDEVPPERQLWIEADFLFHELAEDEDNSTVAPYFGHMRLDEPEGIPRVRFRLTATMGIDGDIEENLAYVLDVSPDSSPQTTAQVTRAERNNIQVHYLPARRDPADHIAYGANALLGRLLRAVRWDDERNTIRGLTNQISDSLAANPSINAFSESLKLTWATLHKGKFFSDPKITFVASEIEALLRHLSVSFTPGHDGSLVDFSRLSDGQKSMLYLSLVLSSQAIGRAVLAEEDVTFDPDKLRPPIFTLVAVEEPENSLSPHYLGRIVSALNTMAKNIDAQALIATHAPSMLRRVDPKFIRYLRLTEERKTRITCIKLPPKTDEAHKFVREAVQAFPEIYFSRLVVLGEGDSEGIVLPRLLQVKGTPVDESAITVAPLGGRHVNHFWRLLSALQIPYLTLLDLDVARYGAGWGRIKYVNDQLAAFEPEKVLPTEWKITKWNDETTPIRTHHFFNKGTQDIFEELENRSVFFSFPMDLDFSMLLAYPEAYGVEKEEPDESTIKAVLGKSYNNISQYSVDEQSFFATYHLRFKLGSKPAAHIDALAKLSDKKLIANMPESLNRLVDAVIAKLGELPE

SEQ ID NO: 66215 - protein, 555 aa, Klebsiella pneumoniae
MIPIEAWQPADGLTLEPNAKRAAKARKRCLALTAGPGAGKTEMLAQRADFLLRTGTCRYPKRILAISFKVDASRNLKERVERRCGADLASRFDSYTFHAFAKRIIDRFRPVLKGREALDSDYTIVDKKISISRSQIEFSDLVPLAIKILQNSKIARNSIRQTYSDIFLDEFQDCTNLQYELVKLAFLGTKIRLTAVGDTKQKIMGWAGAMDGIFQTFTDDFNAVPLNMYRNFRSKPQLLRVQNEIIRRLDLASVMPDEQLNGDEGEIHVESFRNSQEEAIYLANIINDWINKEGLAPTEIAVLVSKQLDLYADHLMMELELRGIPYRNEQQMQDITVEPVARLIVDYLSCLYGKREPKAWIRLMNQLIPFADEEVQSCARKDLDRLLKKQRKEATSAEQLDSPFSCWWKFVKEFLKHIGSDTIVALSPDYESHKRLQEVFRDTKARIEELLEIESDLPQALGRFTDDQAVRILTIHKSKGLEFDSVIIMAVENEIFFGNQDENRCAFFVGVSRTKRRLFLTHAAQRERPANAKRWEVHRTVQSEYIGYVTPFIKR

SEQ ID NO: 66216 - protein, 601 aa, Desulfitobacterium hafniense; identical to SEQ ID NO: 62638

SEQ ID NO: 66217 - protein, 602 aa, Desulfitobacterium hafniense; identical to SEQ ID NO: 62639

SEQ ID NO: 66218 - protein, 588 aa, Bacillus amyloliquefaciens; identical to SEQ ID NO: 65702

SEQ ID NO: 66219 - protein, 458 aa, Bacillus amyloliquefaciens; identical to SEQ ID NO: 65703

SEQ ID NO: 66220 - protein, 661 aa, Acidithrix ferrooxidans
MKVAFVHVSGFRLLDDAIISLEGDTTIIVGRNNSGKTSLVEAFYKFLGTDKVSFTLDDFNLKSLAEFRSAAELWRQAEQARVDGNSVDAEQLESDAITLLPNIRLDVEFVYDEAESLAPISDLILDLDPDRHDVLLSCRYVATRPLEFLKAYSESGFEDIVDFLRKRMHAFFDREFLAIDKADPTNLRTVNSAQAKAAVLCDFIYAQNLFDDTSSDTGHGLSKGFESYYRAIANPDGTIESLEAALVDVASKLDSEYTTLFADVFGDLKHFGAGRMPSLQEIRIVSEFSAANLLNGSTRVMYAHESGTDLPEAHNGLGFSKLIFIILQFVSFFEAYKKRQPRSGVQLLFLEEPEAHLHPQMQTVFIKNVSDYLKLKPEWNVQLVITTHSSHVVAESGFSCLRYFDTTSNSLKIKDLSTFRTDLEVSDETTLKFLQQYMALQRCDLFFADKAIFVEGTVERLVLPKLIKKSAPALQHEYISVIEVGGAYAVKFKKLIEFLGIPTLVITDIDSADPKGRHPKTRTDTTGAITTNVTLKEWLPQSTMVADLLAKADADKISGAVRVAYQVPEVAGSGTGRSFEEAFILANADQLANATSLASKRIFTGDDGKSLSADAIRADAYEIAGRIDSKSDFAFDILTLEDWITPRYIEEGLKWLVPPIE

SEQ ID NO: 66221 - protein, 544 aa, Acidithrix ferrooxidans
MVSTSDRVIECLETKQSFIVEAGAGSGKTRTLVEALAHLLAVEAGRLLSGNQQIVCITYTNVAANEIMSRINRDPLVRVSTIHEFLWSVVRGFQAELRTAIVKTNDAAGSRRIENLDLTDTPIDYWQYPRKWEDGKISHDDVVALSAALFDEYPKLVRLVADRYPIIFVDEYQDTHQSTIKLLLDNMLAGNSERLTVGLFGDHMQRIYNTGVGKVERTELRIIQKTENYRCSIAVIELLNKLRPELQQVPGDTNVQGSVRFVYANSGVRNPVAKIRVKLRAEGWTEQNEKVLMLTRKSIASDLEWRDLLAAYEQRSGFSVDDLMRRDDEFGELFTNIEAMASAFNSGRYGVFLALRAGSSGRITHHSDKKMAAEMIARLNKLRSSATVGEVADYVWSEGLLRKPRRVVSLEERIANGDNPDRAERDNAFLSALRAVPFAQVTSFERYLNSETPFSTNHGVKGEEYENVLVILDDTLWNQYKFEAVLARDTSKTQYQRSLNLLYVSCSRAKRNLHVLVVSPLSKSAIDGAKRIFGGENVSELANM

SEQ ID NO: 66222 - protein, 615 aa, Paenibacillus sp. IHBB 10380
MYLSEVRITNFRKFGQGTDGEPGLALSLNKGLNVFIGENDAGKTTVIDAIKFVLLTQSREYSRLEKEDFHGTSSEMKIECIFKGFTINQAKDFLEWIAIDLDREYTLRVFLSAKRDVKGKILIDDIRAGNDNEGQILHSKARDLLRAIYLKPLRDAENELAARRNSRLSQIFLSHPEFSVGDEHRLVGIIKDANQQIKEYFDYDDVTSEEKKILKSLNTFLMKFSDNKNLLKSNIELAAVNLKMILEKIDLLLVNTKSGLGSLNQLYIAAELLLLQIEKTEGINIALIEEIEAHLHPQAQIRVIDYLQELSEDSKSPMQILLTTHSVTLASSIKLNNLIIFTEDKAYSLAEGNTKLHRGDYRFLERFLDSTKANLFFAKGIIIVEGDAENLLLPTLADKLGKSFTKNGVSIVNVGSTAMLRYSKIFVRESDPQMVLPVAIITDCDEKVSRVDKDSDTIIMLSDRNPKVTKNVREIKYSDGNVKAYVSNEWTLEFDVACSYLKKELFAAILMAKDYINQDKALTEERKTKKIKDSSDYITEAEKKISEWNFDDSFELASNIVRDVVLKKNISKAVVAQCFSEILKERIFTTEDIRVIRSDIYLKYLIDAIDYVTGV

SEQ ID NO: 66223 - protein, 658 aa, Paenibacillus sp. IHBB 10380
MYKLSVTDEDIEYAARVLNLPSGFDVPRVNAIKCMESRDIVACPGSGKTTVLLAKLIILARHVPLQNNKGICIITHTNVAIDEIKERLGDKASELLSYPNFVGTLHSFISKFIANPAFVNFYSSRISRVFEGEDYKSRLLRKFKSLYPPFSGSKLDRFLYGKLNQKLKDSKDNIAILKAKEDLLLSLELHYIDNIIYQVSFNKKTSAIKNPNTESYKEYVRLIDELLNEGVSSYNDLQGLALKYAIEFEKELSRIFSERFSFVFVDEMQDTSSLQLEILNKVFDKQKVVFQCFGDPQQTIYESEDKGCSWQPREPLFIKNSNRMSKSIAKVADVVALQPYDMQGREEQRADLHSPVIITYKDDDVSHVLETFAKLIIKYQLNERDSSTFKAVGMVKARNEGLSITSYFPEFDKQDVKKKVNKDFSELQSYLVKLEKEVVNREGVKAYYHRFILAILRYLRIRDIRTNEGRFFSNVSFLKYLREEDERLYKAIHKYFARIVLKIEEGKSVLISFKYIIALIVNRLFNHEVDLRNDQFIEGTASSPTLVVGETKENVYTFNNLSIEIDSVHGVKGQTHTATLYLETFYFSKTNESIIEYLTGGQKSNIEVHLEKHIRVAYVAMTRPTDLLCIVLNETVYLENKEQLKRLGWEHQMDVLQE

SEQ ID NO: 66224 - protein, 673 aa, Paenibacillus sp. IHBB 10380
MQISKLCLKNFRSFGDSGTTISLNKLSGFVGENSSGKTALIHGLVKLFGVSSHDRALEKSDFHIPVQTTIESIKEHWLSIEARIDFPELVDSSGDSQSKNSLPPFFNQLVVRSTAEAPYLRVRLIAKWTAGNTPEGEIEQKLYFVTVAEGIDESDEDLVPVTPHQRSAIQVIYVPAVREPSIQLKNASGTILWRILNNISWPDDIDDTIKIKMEPVNELFDGIDGVAQIRSVIGEEWKKYHKDVRYQDAKLQFNSSTLASILKKIEVSFSPTHDLGEYSVDKLGDGLRSLFYLSLVSSLLEAEIKITGKSNASLTLLAVEEPENHISPHLLGRVMENLKDISKKENAQVVLTSHSASIIKRVDPENLAHLRIDQTSFTTIVKKIVLPSKTSDAYTYIKEAVRAYPEIYFSRLVILGEGDSEEIVIPRILEINELYPDDYGISIVPLGGRHVNHMWKLLNELDIPHITLLDLDRERGGGGWGRIKYAINQLLLNGRVRDELLTVWYPEGDGFREDILTENQLEIFEKNPMTPEWIKSMNDFWLPRLMEDKYNVFYSAPLDLDFLMLETFPDAYKKTVPRGPSIPSRADDLQNYNKKIKGGIIAALKNEKSTGYTYTEKQHELMVWYNTLFLGRSKPSTHIEALLKIDDDDLLIFMPEVFTKLVERVKELLERNV

SEQ ID NO: 66225 - protein, 640 aa, Paenibacillus sp. IHBB 10380
MSYISPENWSPADRFTLEPAAEIAVKAEMNNLILAGPGAGKTELLAQRACYLLQTNLCPSPQKILAISFKTDAAENLKKRVELRCGKELASRFESRTFDSFAKQLLDRFRLGIPEAYRPEKDYNIVFSQREVQDIVTSYIQERHPNRPNWQQEINFSILFRRLSEDRLPIYEDGEDIYTWILVRLWDILVHGREGLSSTLTFPMISKLGDYLLQHNLLIKKALQMTYSHVFLDEFQDTTYLQYELVKTTFLGTSSILTSVGDDKQRIMGWAGALSDSFEQFKRDFNAGQIELTQNHRSAPRLIEIQNVLAKIINENSTDASVSSSHSEQEGKCEVWNFQTHIDEAIFVASNIVKRIQHEDITPRDICIIVKQQEQVYARAVIEELGRQGVHARIEKEYQDLLAEECVQLIVDFFKLATMEKTHESWVRVSELLVYVHGYDLELDHQKILRMELDLNEHILQMRSVLNQVSNDAELCKQRIDEIVEGILSFIGNEKLFRLYPKYSKGSYFNKLTKDTAEKLSEAYLKHLNWINSIADFLGLFSVPIMTIHKSKGLEYDTVIFLGLEDDAFWTFRTQRLADMCAFFVALSRAKKQCFFTFSNSRETLRFGDIQVRSQSSNNISSLYQLLQEANVDVREFNNV

SEQ ID NO: 66226 - protein, 590 aa, Photobacterium iliopiscarium
MSILIDVVRICGFRGIKKLEVTLPRIAVLVGQNNAGKTSIVKALQLAIGDYSRYLSEEDFHIAQDDTRSDQILVDVRIVSLNSDGTISNEFSEDWLEEFGDKIRQDAEGKQFLALRTLVKPDSIKGGFSVERYTLDQWVPVGWVDIEVVSKNRLRGKLQALQYISIDAQRDLHSELKERSSFIGKVLSTVEYNNADIIELEGMIKEVNQQAINKSQPLSTLKKHLNALNDSFDGKGQAELSPFPKKVRDLSKRFSVHFGENESNSFSMEYHGMGTRSWASILTVKAMVELSNENHAAEAKPFFPIVAAEEPEAHLHVNAQRTLFKQMSEMPGQVIISTHSPYIASLSELENLRCLSKSEGTVAASQLIGGLDSEDIKTLRREVMRLRGDILFSKALILFEGVSEEQILPAMFECYFSRSPFEVGVSCIAVGGKNYKPFIKMAGSFGIPVFIVSDNDGNTQAEVQSQIVKTKQETPLTLNDDSFGISYLGHGNDIEAELLSLDMLDEIKKAIVLAETRGKDIPGWVAAKAAEVEELTGEQLLVKMRGMKATYAGFLADVILTNENGKQPEQLMPLAVKQAFDKVKEWTTYD

SEQ ID NO: 66227 - protein, 634 aa, Photobacterium iliopiscarium
MINLSDAQLNVVQSPLETALQVLASAGSGKTRVLTERVRYILNSTKKGSVIALTFTNKAAEEMQARLIEYDISEERFWVGTIHSVAQRVLEQYGHTIGLPSDLHIYERDKDRMEVFMQSLRDDGIDIDNYLNVSNSKELRSREQVLSKYMDTFSIIKRELLSEIDVLERYPQNNKLWKNYEDYQRALLNSNGIDFDDILLYSHKILLTQDWVGKVYRAKYKHLCVDEAQDLNRAQYEFIKVFCGSQVKSVLMVGDPNQMIYGFNGSSSKYLTNSFVDDFSPLQMVLNQNYRSTKSVIEVANRLKPGSQRAGNFALQGMFDVRCLSNEQEESDWIVRSINNLLSLGTNQEIEGGITLDKMVVIARNRFVFKYLEEALQAAGIDFHLRKGERRNEPTSLLGKVLDYSIRLKLNPKDWVDGNKLCNALSIEPPKVWGDKNVLSMISQSLAESHLFNKELLKLVLLEVEKLDISEPNIRKLMKVLESEVEKMVHDGNRGNSHIEELKLSMEELHEFWSSWISFKQKGLGESLLAYRNAISLGQVSETKAQSGLTLSTVHTMKGLERDIVFLMGMCEGVFPDYRATSSDKIDEERNNAFVAVTRAKRWLYVSYPQYRVMPWGDTKCQAPSRFIHEMSPS

SEQ ID NO: 66228 - protein, 624 aa, Enterobacter cloacae
MYLAELTIKNFRKLREATLKFQPGLNVLVGPNNVGKSAAIDALRTLLAGHDENYPRLDGSDRHRPHEGDPTGDISFHFVFRDLSLEDEADFIAALKPNGDKTMEAHIHVQYTDMDKTGRFKVRRWCGDHPEISLTSDMMENLRGVYLQPLRDAAQGLRPNRNSQLARLLHLLTDDAGRDTINTALKQLDETLKQDKSIQSTHKAISTRHDSMMGAQLAQELAVGLSVTDFQRLSSRLTLTAEAMEIEKNGLGFNNLIFMAVVLSELAKNTDSAFRSLIIEEPEAHLHPQLQRVLLQYLAGIPTGEGEKPVQLFVTSHSPNFASNSKLDSLVCLIENEAGVETFFPRDIKFEKGKREKLERYLDVTRAELFFARRVIFVEGAAELMLIDALAKKMNFDLKGYGVSLISVEGLNFDSFLPLFGEQGLRIPVAVVTDADPFEEEEVEAVAEGEQAEEEIDDLLSEAAYQEETDAPDDEEPAGNAEKKKKVKRKEVYPALGDQVRLSANTIKMKSLEDDFVKVFHGLKTLEYDLALIEANRDPMLTALADPHPKISKALRNIVDAQPDNTAKTKALFCGMFERKGNGNIQKGRFAQALAEQMSKENGFEVPEYLKKAIQHVCQGVVKP

SEQ ID NO: 66229 - protein, 575 aa, Enterobacter cloacae
MKLSKEQIDIIEAPLGPIAVTACAGSGKTATAIRRLIAIRQKMQNSRGRVVLLSFSNVAVNTFNTGYAELAAGLPDDANRRRVEVDTLDGFFTKHILRPHAYRTMAAPQAAYLVSGSEPFLARFKYWCEGHPPLPLKDIKICILDGDFVFYSDVRNDLEILDKGKVLKIIHDLGRLGAYTHEIGRYWVYRTLDSQPAVLRALAARYPQILVDESQDLGTLHEEILKLLIAAGVQVTLIGDVNQGIYGFAGADGEFLNSYEERAEVTGYKLTRNYRSLPPIINIANILSGRQDEPYRQGEQGGAYFIGYKDSELPKLIDAFKARIDELGMQHQDAVLLCRGADRAAVIAGRTAPPGQGLVKVLAEASLLRDQHSNYHGCFNLVCRAILSLLEDIPHGLSSKLQGVSHDAEMKGLKRLLWCFSRNADLGLPSSALVAKTDWHSKLLTNVKVLLAEIEKHYGYKVAGNVGTKLTKKLLPDQTLTSAVSAQGHGLRVETVHQVKGESIGAVMYVAKKSNIKALLSGTGDEEGRIGYVAITRAKNLFWLAVPQSCLKELKEDLIKAGFQEWITLAVIDPA

SEQ ID NO: 66230 - protein, 584 aa, Legionella fallonii LLAP-10
MLLKRVLINGFRNFKKTTVSLNKKSLIIGPNDIGKSNFLRAIRLLLDRNLSDAEIEPSDADFYAFEDTHKIEITLHFHEATEDCIKSRFKENISDKDELIIQYQAIRDPSTGQKNYKIRVGPSMDNLKDGETRFYLKVLNLHYISSNRDLNAFIKREKKHLLGNARDNRTEDEIEQDDASLKNIETILKGAGTEIAGLNFVSKATNNLNSELASLSVLNENYNVGFDTGASDIRQYIDNLSLSSSQEGKTVALGGDGKNNQIYLAIWSAQRKVLQYDPTEISINCIEEPEAHLHPHQQRKLSHYLSSKLQGQILLTSHSPYITCEFEHNSIVSLSRNENGSYAASDGCSPIIQNSLYNFGHRLNAIPAEGFFSTVVFLVEGVSETLFYKALAKRLDIDLDKYNISIIPVEGIGFETFIEVYINLGVRFIVKTDFDIFKVPKKTYYRAAGLQRGLAILNKYNQNINSNTETLIQALGDSHKKLHKREIPELLKDTVANLKNELKHYDIFFSETDLETDLAKSALKNSLKQWYEASDEQNLIELMKEYKGERMFEYLKENYDSLADLNDSDISEPLYKCVERASLK

SEQ ID NO: 66231 - protein, 537 aa, Legionella fallonii LLAP-10
MNIPTLEQKKILDELNSCVVVARPGSGKTFTLSYKIRDILPTLPDYKGVIAISFTNKASTELKHRVLNLGVQIKSSFFGTIDKFCLTEIVIPFLRHKFGLPNVDDVKIIKADESQLLKQLCPEGIVKISWNSIKNLYCSGEVILELSGRLAINLLRKNRILREYMKARYSHVIIDEYQDSGKEQHLIFMELFNLGLIAIAVGDLDQSIYAFAGKSSDYLYELTQRDDFKKYPLTVNHRCHPSIAAYSLKLINSEFVLTNQDKEKRVYSKIVQGHHPNIAQWIEKSIQPLQTKFSDVKLGGIAILCRSNISAKMIKENITKYEVQLREDTPLDSLGSPWAAFFSECLYCLFDSKLNVNEIFDKYLDGEALKDSHKKSLLKLIELKNETNEKNFNKLKGAHNILKETAQLLIPNAEKIDSERALFEVLSSDVYLQSYFPQKDTHIQLMTLHKSKGLEFDVVFHLDLYQWTIPSYEAVKGNTNEMIQSVNLHYVGITRARQACILVASTEKYNTKINAAKEAIISEFLTRADLSSLRKEL

SEQ ID NO: 66232 - protein, 422 aa, Acholeplasma oculi
MESKYEEIFDDIIETIHSDLFLNDPSSTLKVQSDIDIETMLRSNAKLRYIMDDIELSEAYNGLGFSNLIFIFIEIYYFNSLVLKDNNPLNILFIEEPESHLHPQMQLTFYKKLQKVLDDSKNTYIIFSTHSSHLLSISDFSNINYFYRIKDNVSIKSLETFITENQNFEIFLRKYFKLNTADLFFADKAVLYEGSAERILFPAFIEKYDMKNKSNISNQHIALFEVGGRYAHVFYKLLEYLNLKTLVIADIDSINDKTRVTCNIIDDISTSKKRIKTSNGVIKSWFEMIGKDLYVLDLITKSKESFISTNGEKSMKLTTQLPKEPNYHCGRTLEEEMIIKNAIKIVEDINKKITDEKFDNKFKIIKNIIDKSEKIDSKFLIDNAFNIVEKIDKMGFALELIENLDIWDLPEYIEEGLKWLEN

SEQ ID NO: 66233 - protein, 571 aa, Acholeplasma oculi
MVGELGIIGQIKSCINNKNNFIIDAGAGSGKTFSLIQTIEAILQEQINNHQKVLCVTFTNVAKNEINDRLSLNTDKIIVSTLHDFIWDFIKQFQINLQLEVENLATKKVQRIKDEIQEAQRKIDNPTRNTNIDKQMRIIENNEKRLLKYKDIDYKNLEITYDVYSGYHKGKISHDDIISIMSNFLEDEFFSKLLLSTYPYILIDEYQDTDWDVIKKLLLATSKFKKEFPTIVGMFGDKMQMIYEDVEFNFDSLDLVQIKKEDNYRTAIEIVEANNKFRNDGLVQNCNNQYPKVIFGNLLFVYNRSQDYNLNKFINDDVAFSTYKRLYLANKNIAYEIGFTEISDVFNSVFNKDANDKLFKLKDQFISYVINGIVDKIVMFENKNYYDLIQNINFVSVESLNDLLSKLTNLITMKDQSLIKYIDFFINNKLIDYKRYEEIISSYDGFDNGFISRMKDIDINQYKKLSLQINNQTTLDTLHGVKGNEFDNVIVNIFENQSWNKYDFDNLFLFKNMTDKRVMRARKLLYVACTRAKSNLIVNYIADANSKIDLPNLEICVKKHFGHNMIFKTMD

SEQ ID NO: 66234 - protein, 400 aa, Xenorhabdus nematophila AN6/1
MGLESLIKQVNDDAVNKSKELKSLKSHLEKLNQSIGGTGGAEVTPFPKKIRDLSKNFSVYSGETDTNSFSMEYHGMGTRSWASMLTIKSFVEILSHRHIAESEPLFPILTVEEPEAHLHPNAQKTLYRQLSDTNGQLILSTHSPFLAAMADLYQIRSLVKTKNGIVAHKISHPMTDDEKKSISRSILAKNGELLFAKCMLLCEGVTEEQVLPAMFEIYASATPWSVGLSCVNVGGKDKYIHFALLPFSFGIPTCIISDNDINPNSGTKTQDDVTQQIEKLSKKMCLSLTKDFYDIYFLDDGNDFEKELIDHGLRDEIIDAFVLLATTGNKNNEKFRDAKYNEFNQLTDEQLLEKMSKEKASYAGFLADVLLANKRIKSVDDLVPPNVRASFDCIKGWLAC

SEQ ID NO: 66235 - protein, 631 aa, Xenorhabdus nematophila AN6/1; identical to SEQ ID NO: 63411

SEQ ID NO: 66236 - protein, 685 aa, Moritella viscosa
MQLTKIIVSGFKSVSPEHKQSIEFEPDVTAFIGHNGTGKSTLLEALNKLFSLDRSLRNITPADFYMKEGADPSGDRDLFIEAWFNFPQSDGVDPAVPTLINGLTVNSTNGDLIFRVRLDAKVSFDYNPNGDVEDDIWIIDGDMEEPEDHNKHRLSSAQRNAIQVNYIPANRDPIAQLKFSSKAILGRLLKAINWSDSERTSFEAQAQSLNTLATANPALVQISEAINTNWQEIYKGRHLNTASLNFPLSDVDEILRLIQLQFMPDATGNKVDTNKLSDGQKSLVYFALTKALFDIDKHTRNALLASQKSNFDADKMKLPIFSMIALEEPENHLSPHYLGRIIKLIKDYGDSSFCQSVVSTHSASLVGRIEPHQIRHFRLDGETRSTRVAALTLPDKTDEKAKYISEAVKAYPEIYFSKIVVLVEGDSEQVIIPKILELYDTSVDSFAISVVPLGGRHVNHFWRLLDTLKIPYVTLLDFDIDRNGGGFGRIKYAIEQLSKYDESEMYLHKGVLKDIPNWSDTRNPVSFNFTYREEGSPEGKVINLVQRLEEKNVYFSSPLDIDYSMICAFPDIFCEKDTSYNERGPTEGKVDEEDGDTQKRQTALLKSVLKKGNIGLRYQFGSEWEKYFTWYRYRFLSNKSKPASHVRMFAKIEDKYTPTEIQQKIPLELKRLSEKIINLAEEVVE

SEQ ID NO: 66237 - protein, 559 aa, Moritella viscosa
MIDWRPSEGINYTDELKQVITAEGSIAVLASAGSGKTELLAQKADYLFATGKCTWPRRVLSLTFKREAQYNIKKRVVKRCGSNSTRFDSFTFHAFAKSIVDRFKSLLPDEKKPIDTYDIASKSSEADGINKLTMNQIIVLSISIINSNETIKKLLVDSYSHIFIDEFQDTTNEQYELITCIFKGTDAKILSVGDMNQSIMIWAGARKTVFNDYITDFSASYKFLLTNYRSSEDIQRVLSVFQTFMENPANISYNSDESLGCTISIYRDEVHEAAHISNKIVELINSGIAASDICILTKQQSSIYTQIVRDSLSKLGINNLDMSELQDSLKEPVGEIFSLYIKVLICPEPKFTIKLHDLLLTINNIEPNDDKEEALSSSFYRFIHYQKESVTDAITVDELLSKVNAFISYVGFDKIISKWKQYKTESFYHGLWRVLELHLRDVFSKATSSVEAVKLFTADNAVQIMNVHKCKGLEYHAVFFIGLEDQAFWSYSRAQFENNCAIYVAISRAKEHLEITYSLNREHRINQSFNNKASSCNSLSEVYSTFTKHCKIPLKDMTV

SEQ ID NO: 66238 - protein, 699 aa, Candidatus Omnitrophus magneticus
MHLKSLKITNFRKFGQEHNVVEFVGAKDISSKSPSINIAPSTTLIVGKNNSGKTTITEALKKFLGKGGTSFHANDFNFIYLSGLLDEYKSDKFEKLPTIEFEIAVGIDFDSDCDLVTNIAPFMNIENAHTSEKERDFRVVLKYEVKEKTKFEEAVKLAMGKKKNDSVFFRKFLELINNTDFSMNYYDSEGVLLADSKFKINDLIDIAVINANKIIDDKSLSETFNRIIKFRYKLESKPEVKDAVEVEIDKINSTITEKVSAPHAASINAALSRIESSDHLEVNLRPDLTFEQIISSVIKYEYKEGKFHIPEGQFGLGYSNLMTIIGELIEYIEKYPKQECHSKINLICIEEPEAFMHSQMQELFIKHINDAVSFLLNDSKKEINSQLIITTHSPHILNSKIHSGNSFDNISYITIADSFSNVVNLNDRNVMEDKTAAGVQKDSGAPSKQTVDDLKFLKKHIKYKVSELFFSDAVIFVEGVTEETLLSYYIDQDESLSRYYISIFNINGAHGLVYHPLIKLLKVPNLIITDLDIKRTDTEKDDCLQVSDLAGRVTTNKTIAKYNSGKEKLDGISGSFEDGNINVVFQWEKTEGYYATSFEESFILTNYDNNILNKVLASIKPDTYSEIVGTPVAKNKLKDASYKFQSKLSKSKSDFSNELLYEIVICDDVGAIPKTPKYIVDGLTWLKGSLKKQAEEGGK

SEQ ID NO: 66239 - protein, 786 aa, Candidatus Omnitrophus magneticus
MSLSKISPTSKKEEESIQELINSCIDKDESIVFSAGAGAGKTYALTESLKHIIRQHGDRLSRHNQRIICITYTNVATNEIKDRLGNSDIVRVSTIHERLWSLISSYQKELVRVHTAKVQDELVKVKHGLLENQEEKESKQFKAYRELSEQEKDDFKAIMIARKSDFYRFYDKPAKEFKSSLEAHLGSYTGLLSNVANFKKTVSTIYRIENYKECLEKINEGHPKYGEVKYDDRYNFDILHKMIISHDTLLEYALKMIKSYDLLKRVILDTYPYILIDEYQDTNKSVVEIMKFIEDHAKTIKRKIFIGYFGDSAQNIYEDGVGDDLTLVHPGLKVINKQFNRRSHLEIIDVINRIRNDDIKQKSIYDDCAGGSVEFYTGSGDVKNLFIEEYRRKWAVDSGNKLHCLVLLNKSVAEFNGFPDIYNAFSDTSYYKINYDRLNNELLSNDLSKLGDIPHLFYRILKFVNNLNNPHTSIAHIVDKKIYSRMTFFKMRELVVLLKSLSGASLGEYANDIFDKYKNSGNNYYKQVVQNIFELERYSYHDFTNYLLDALFLNIGSGRLNDFKITLTDELSVSDFLKQTDIEFFKQKLEQFLSGEFFSYSDINEVTAFRKRLDIFIGEQNASGIALKDADSLKKRIDGLFEDEILSLIDRDEVETAKTKLDALLSIKLEQWALWFEFINDVRKSDIVYHTYHGTKGAEFDNVIIVMENDFGRMNKDKFSSFFKNLNNPPLSDETEMFKFTNTRNLLYVSCSRAIKNLRILYLDDISDFKEGVEAVFGKTIPYMPS

SEQ ID NO: 66240 - protein, 712 aa, Burkholderia pseudomallei
MHISKFTLVNYRNFPSTTLTFTKGVNTVIGENGSGKTNLFRAIRLLLDDNMLRSAYKLDESDFNRGLSDWRGHWIILSLEFDEIGPDEAIQALFLHGTGVVAGGPIGRATYNLIFRPKKELRLKLAQLAAFDIAGLTAIREAITAADYETLFTGRSEADFCNPAVYKELVGDFDNCIFSPEIDDPRVGARVPVYLSVAKEVSFTFIQALRDVVAEFHNNRTNPLLTLLRAKSGDISPAVMAPIVEKVLDLNTAIEDLEDVQTVRSNIRDTIKDAAGETYSPSSLSIRSELSDEPEKLFQSLRLFVGESEEDHEGAIHELSLGGANMIYLTLKLLEFKYQQAHQAIANFLIIEEPEAHIHTHIQKTLFDRIAYEETQIIYSTHSTHISEISNIQSVNILGRCGRACEAYQPATGLSPDEVGSLQRYLDAVRSNLLFAKSVVLVEGDAEEILIPVLFKKVLGLSLDELGISLINIRSTGFKNVAVLFHESRIRKRCSIITDLDSAFIDTTPVAGEPAARATHKQRCLASQVSGAARKVALDAFAAPNPLLSVCYAEHTFEVDFIAAGNGEVVKRVVPDVYASPATIAAAEAELTSGDKAAFGGRVLTMAASQGKGWFAVLLSKKIDHKTILPGYIKDAIFFARPTLSKELFFDIYEYRIAQALAVGDIPNAVADTARARLAEYRQGTIDLAALKTAMMPCLPGDQIHGILAEVA

SEQ ID NO: 66241 - protein, 597 aa, Burkholderia pseudomallei
MFAWAASELNAEQAEAVREAGSVFLIACPGSGKTRTLTYKTAYELSRLQSERQFVVAITYTHRAADEIQQRIDDLGVDTARLWIGTIHAFCLEWIIKPYGIYEPALAHGYRIIDQHEKEMLLEQLCRPYARERITFFDCEYYFAHDGYHLGCPNPAKHQSLHAILAEYFRTLEANRQIDFELLLWYACKLVERMPDISRLLSQVFSIVLVDEYQDTKEIQYSIVASILRSGAGATRLFMVGDPNQAIYGSLGGYPIELASLRALTNLAITPMQLSLNYRSSARIIEYFGNFNVYNTQIVPGSEDQNYPSLISYNTQVARDDLIEEIARLVRHNIENLGIPPHELCVLAPQWVHLATITRGLAAALPQYQFDGPGMVPFARDTENFWYKLSRIALTEPSPGMYTRRLRWAEEVLRDLRHAGVDTSNFSAKMFLRESNAIYVQEHAGLEYLRRYFDEIFQRLHVQYSEIGQLRDHHAAFFESSARRIARLQNDGVAGIADLQFFRRVFQNREGITVSTIHGVKGAEFDVVLAFALLEGMVPHFNDRNGPESARKLLYVIGSRARKNLHLFSERGRPRGRNDVYFPTQSLTACVFDYDVV

SEQ ID NO: 66242 - protein, 264 aa, Elizabethkingia sp. BM10
MRVKSIRIQNFRKLQSCTVDFSEKETIFVGANNSGKTTAMDTLMAFLKTKSFKTQDFTLCNWKSLNEVGENWIKADELKKEDKSVKLLEQYLPVLDLWIEVENSELHYVSHIIPTLDWRGGLLGIRLRFEPKDMDELIKEFITLYNKSNKLSQEKGKDFKLWPKTFWDFCERKLNAHFTIKTYLLDPDKYDEKQDLLENNIALDGDVLQGLIKIDIINAQRGFGDANSETVESNNSRNLSSQLRAYYDKHLNPTLEPTEKDIDA

SEQ ID NO: 66243 - protein, 183 aa, Elizabethkingia sp. BM10
MHEGNNPTLNEILKKIQETNLFKIPLVLKIVLQRSGIDIENSVDNDEIDEVLIAWEEALKASFSEIVKYNEYIYEDSKFGTHQGVKGLEFEHVMVIIDDEESKGFMFSYDKLFGLKPLTPTDKKNIDEGKETGIDRTMRLFYVACSRAKDSLAIVSYTDLPEELRENVISNGWFSEDEVEVII

SEQ ID NO: 66244 - protein, 670 aa, Elizabethkingia sp. BM10
MKISTIKIKGYKSFGPDEVVIPLQDKLAGFIGLNSAGKTSALETLRKLFGSSLIEREIYRSDFHIGKDEDPEDITQRELSIEVRIDFPTKGEESVPHFFSDMVVDNEDGNPYLRIRLEASWQKSANPQGDIEIKTYFIKVAEGEPEDTDSKRIFPNHLRSLIQILYVPAIRKPAEQLKYASGSILYRVLKKIKWSDGFKNDFDEKIGEINNAFKGLPEFNVIQTSITSFWQKFHKDERYKETTLGFGGSDFDAILKKLEISFSPTGTHKPFGIDELGEGYRSLFYLTLVCSLLDVEEVLAEDEDEETIGITRPLLTILAIEEPENHIAPQLLGRVIKILKTIAKKENSQVLLSSHTPAIVKRLDPEHILHFRITEEYETEVNQILLPDKADEAYKYVKEAVHNYPEIYFARLVVIGEGDSEEVIFNRLMNVMNVDFDDNVITFAPLGHRFVNHIWILLNALHIPYITLLDLDIEREGGGWGRVKYALKQLIQLGINKKELLKTSDGVLSDSDLKEMHTWDLVTKEEIESLNSWVNYLKKHNIFYSNPLDLDFLMLTHYPEFYKKAIPKGGGPRVPDKDEEPKEFEEKLNGAIQATLKSEKASGETYSDEEKELMIWYNYHFLGRGKPSTHIQVLSSMSDDEIKDDLPSIFTEIFKCISSILKADQGDEKS

SEQ ID NO: 66245 - protein, 617 aa, Elizabethkingia sp. BM10
MKRVKPELWVPVDDMQLETTALHIAKSSENHLIVAGPGAGKTELLAQKACYLLQTNSCPFPYKILAISFKRDAAYNLKERVSQRCGDELSKRFDSLTFDSFAKQILDRFKQALPDRYKINNEYKVVLSDQTILDYYRSEDINYFNITHKDTILALHSAQLSQISSTYEENIRKNVWEKMLKSAPSELSFKMIMRLAELIIKVNPKIKQCLQQTYKYVFLDEFQDTTDIQYDLFKSCFLDSDSFFTAVGDDKQRIMIWAGARKTVFDDFIADAEATRVPLTINFRCAPQLVKLLNHLTQHLLGKTDFAIPSPKWRADQGECSVWVFENPNDEMQILFQEVSNWIKMDDLDPRNICILVKQQLSTYAGKLIDYFNLNGIKSRDENRFQDILTQEVCLYIINTLYRIFDKKNNEAKKHVFNFLSNVHTELEDNQLLKLEGTINTFINEIRKEYAGSTLTEENIKELIAKIVAFAGKDRIVAFSQSFSNSSDLDSYIEKVQSELIQNYSTSNDIISSLDMLIGKDTIPVMTIHKSKGLEYHTVIFIGLEDGAFWSFQRQPDEDKCTFFVALSRAKERVIFTFSKQREDRFGRLQAQSFTNIEILFQELENSGVVNIIERKI

SEQ ID NO: 66246 - protein, 527 aa, Listeria monocytogenes; identical to SEQ ID NO: 64370

SEQ ID NO: 66247 - protein, 713 aa, Listeria monocytogenes; identical to SEQ ID NO: 65469

SEQ ID NO: 66248 - protein, 527 aa, Listeria monocytogenes; identical to SEQ ID NO: 64370

SEQ ID NO: 66249 - protein, 713 aa, Listeria monocytogenes; identical to SEQ ID NO: 65469

SEQ ID NO: 66250 - protein, 568 aa, Lechevalieria aerocolonigenes
MRIECIRVTNFRNLADLCVAIQPGTVIVGENRAGKSNLLYALRLVLDPTLSPSDRHLGREDFWDGLSDGSDDWDPMDAREVIEISVDLADFEDDNTVLSTLSDALVQSDPLRARLTYRFAPLDTGVAGPGAKVKYRWTIFGGDDEGNQIDADLRGYLYFAFLGALRDVDADLSTWRRSPLRVLLTAAAKAIGDDDLSRVRSAMREANAQLNDLAEIKRVGTSISDRMMEILGANQALETELAVAAEDPLRLIRTMKLFVDGAARRHLSTTSLGTLNVLYLALLELGLEERLAEQDIAHVVMTIEEPEAHLHPHMQRLAFRRLLADHRTNRSILVTTHSPHIASVASPRSLVVLRDAGGRTEAAAASDAALTDAEWDDIARYLDATRAELVFARRVLLVEGYAEQALLPSMAAAVGMDLDKLGITVCVVHGTHFTSYARFCEALGIRWAVITDGDGDAGPARAGRLLAALSLNGDPGEHGIFVGTSTFEYDLLHAHPSNVKPCFGTLWELSADRARATMETWVSQWPEIGTYLTTIDKAGGKGRFAQRLASQQIWPPDYVHSALRYLAG

SEQ ID NO: 66251 - protein, 588 aa, Lechevalieria aerocolonigenes
MGPLTQSIGELSANERQWQVLNRQGHCVVHAPPGSGKTKLLVTCLAYDLFNRIPEPHGAACITYTTAAAEELRRRLASLGVSARPTLFVGTVHSFAINRIIGPFAALLGKPELVKASIASDEQQEEAYRLAVGSRFGSSCNWKEKRKQIEFHRRRLSTVEEWNRGGEGLLEACSSYESLLRGDGLIDFEGAVAAAVDLVEQHEVVRRVLSARYRRLYVDEYQDLAPGLDRLVRALCLRPDSDVELLAVGDPGQAIFSWNGARPELISELSSLPGVSAVHLEHNYRCGEEIIRVSTRVERVGRKVTAVRGGGEVLAVFCPAGFTEQCRQAAAAVGLAHRRGVPLHEIAVICSMNAQCREVAEVFRGAGLAVAVPGVEYPRAPVTLFVESCAAWAMLGREQSGHRLGAIHRRWRRLLGPTWTRDTDVRLTELLVGYRDKPVTYARRMLADLLGMGLRRAMARPAQSDNANALDRMQHAVELGALADATVVDLASRAMRRDRVNVTTMSSSKGLEFEVVLLLGADEGLMPYWSSANDPAKLEEDRRKFYVSVTRARSTVKIFYSRSVATSAGRAKPAEPSRFLYEIGLLHR

SEQ ID NO: 66252 - protein, 706 aa, Enterobacter aerogenes
MYISQLSIVNYKNFKHEKFKFRKKSVNNIIGENASGKTNVFQAMRLILDDSLPANAKFLSKDDFHRGLGEPFGHWIIISLHFSGLGDTEEQQVLANYILNDGEDQKTSTKGNYTFIFRPKFSYRQELHEISNAHEDLCTRRDKILEFCSSHAISRETYEPVAFVRTKIDLTDESVYRDHVGDFKQYIFPDPNLESEELIGNKKPPYFSLINEVACTYVKALRNVVADLKYYKTNPLYKLLTLKSKQINDEKSIVDDIVNVNQKISSIPEIENLSNDISRSLVNTIGSTYSPKIQVSSQLPEDFIELVQSLGLVVEDSLSYQGTGRIEDLSLGGANLIYLALKLYEYEAIRDSEEHITHFLMIEEPEAHIHTHIQKTLFENFNFKNTQVFVSTHSTQISSVSKISSMSILSRKDTKTEVYAPSSNLEPENIRCIERYLDAIRSDILFAKSVILVEGDAELILIPALVKTTLGVSLEEMGISLIKMDGTVFKHISDLFHEDRIRSYCSILTDLDKAFITRENDSFANAEYIKSQLNAQKSGAERQSALDEYTANNSYVSAFYAENTFETELISYSENVNLFKSVIETTYKRKADREAAIANITSSNTPKKYHHALKFAKKIGKGWLAAEMVDHITIDNIIPEYILKAIKFSLSDRHIDAIALKMMEYNVESMGQEEQDEINASDSFDEKIAIYKTHYDNDTFIRFWEI

SEQ ID NO: 66253 - protein, 582 aa, Enterobacter aerogenes
MPYRNLTDEQMDAVVLDDSMLLSACPGSGKTRTLVSKLYHIIDNSEKLSIGKRKVAAITYTNIAADTIQERLLSYGVESKSLWVGTIHALCLQWIIKPNINMIPRLCGGFVVIDEHEKETKLSELKERYEFRVYDNIDTALNQDYRPKYPAGTREHNLILDYHRYLSENNYIDFDLILNISHRLLQSKPKLCKRLGNLFYHILVDEYQDTSVMQYEILKCIIIQKQTKITLIGDREQAIYTGLGAIVKSKPELESFFELDFPLQEKRLTGCFRSSQRIIDHYLKYQDEGYKIDSKSDLINYPSVVHLERSLHKDNLSDYVADIVTQHLAQGIPEKEIAILCPSWFDVINISNNISKLDKGFNIDGVLISPIPKNQDNLWLTLIRLTLTKPSINNYIKRRRYANELSEKLNNISYDEEAINPKTILSAVNSISIKFDREIDEWIEEVIVRFCERLRIELTKNNLFNEEMKSILNATRDRINKYEMNYRASDLEKFFSSSNGVKITTAHSTKGDEYDVVICTGLLGGKIPHWNDIIDCSDAHQDYVARRLLYVISSRAKKHLYLISELGHRTNRGTPYRPTRQL

SEQ ID NO: 66254 - protein, 594 aa, Enterobacter cloacae
MYLSNLRIANFRNFETVDIPLDGNIVLLGENRVGKSNLLFAIRLVIDPTLPDSARQLKLSDFWDGCDLSTSPQIEIHLEFADFDSDASLSALLTDFRIAENPALARLSYVFRKKEDIAGEPKSSEDCEFIVFGGGQESRTIPSRVRRRIAIDMLDALRDAEAQLASWRNSPLRPLLEDAFGSLSRVDLDRVASALESATGTMEAFTPIKNLEESLRGGILNLAGTAHDLNARLRFAPTDPLRLMRSLSMFIDDGKRGITEASLGSANVALISLKLAEFAWRRAKNERNFSLLCIEEPEAHLHPQLQRAVFDKLFNNADKAQSLIVTSHSPTLASIAPLRSVVRLCRDDCGRTHAFSLAKLPVTTDELDDIERYLTATRAELLFAKGVIFVEGDAEEVLIPGFAEAMGLNLDELGITVCSVAGVNFEPYVKLAGSLGIRIAVITDWDPLDGSKQPLGKARAISIWDAFCAVRPEMHKLSAEEKAWFVDKGFEECSDVWKKAGIFLSPQTFEVSVANTPILKDALLNILDAQGFGSLRSSRIASWRTGQDPEPAQLLAMISDIGKGRLAAKLKKKASGLAPPEYIAAAIQYVVSNV

SEQ ID NO: 66255 - protein, 597 aa, Enterobacter cloacae
MWCPMSDRHALSMALSELSSNKEQYGAATEQGHCVVIAGPGSGKTKTLTTAMARALMDDITDPRGVACITFNNECAAELEERLSCFSIACSERNFIGTVHSFALNQVLIPYSRCIPGLLPNDFRVATRDECRAAVEAAYLAKFGAIGDPHTRWKFAEEKRRRDVNRLLPSWRSNNPELADFIELYEAHLRRSGLIDFDDMPLIAFRMLREHDWICNGIRSRYPVLFVDEYQDLGHALHELVLLLCFDAGIRLFAVGDADQSIYGFNGANPRLLDSLVSRADVKTFRLRFNYRSGAKIIRASMGALGEERNYRGPDGTAEGEIGFHGVEGDYEKQARYIAQDLIPSLTARGFKPERIGVLYRAAWLGDKVADALKAEGIALMRTDTNALIKRNSRLARFIEACSQWVTGGWKEASPAFNLLLGQALSLVYGRRASRTEEQVLTVQLITFLRSGIDQAETAHQWLLRFDKELISGWQIITENPQVEWNVVKELLKRTDPALKQDMALIVFAGKEESTRRITLSTLHSAKGREFDVAIMFGVNKYDFPGKRDLVSDNALREARRLFYVGVTRPRKELHMVYRKGEHSPWIAELYHRSQQT

SEQ ID NO: 66256 - protein, 798 aa, Enterobacter asburiae
MKIEYIDIQNYRKLKTCRIRLTDEETLLVGANNSGKTSAMDALIFFLDQRGRTAASIASGKSPSSRKLGAADFTLSNWHQLNQFGQAWANAEEVGEKISDWQPLCPTLDVWLKVEKNEVHRVRHLIPTLKWDGGLLGIRMIYQPKDLDALKADFIAHFKAAEQLKISAEKNAEKAQGGSASELSDFKFSVWPGSLREYLEREVSKAFEIKSYILDPAKLITDQGSKFLPQVLVEGQLPLDFYPFNGLFKVDIIDATRGFSDPYVATGSQHGASNLASQINQYYNRHLNPTDLPCDEDLDALEAIAYAQHSFDGRLNKVFNKPLKEIETLGYPGFSDPHIRLSSRVNPIDNLDHEAAILFEIQKTSHAAGVPLMSLSEKYNGLGYKNLISMVFTMMSFRDQWMRVGKAGLRKPEEDVFVEPLHLILIEEPEAHLHAQVQQVFIKKAYSVLRNHDDLRTSKRFSSQLVVSTHSSYLAHEVGFEKLRYFKRKPATGPHDVPTADVIDLSCTFGNGKIRSDDVLQTAQFVARYLKTTHCDLFFANGIILVEGAAERILMPHFIRNNPNANTSLDNSYISILEVGGAHAHRLRALIDILGIPTLVVTDTDAQKPPLKLPADVQKVSSGNKPKAIRPEFGKGYITGSHTIKIWLDVEGGLDTVLRMPEHEKIRGKVRIAFQYGIPIKFGKEEEAEAFPYTFEDAIALTNPELFKKVEKPTGMMKKMQDALNLDTLEQCCEKLYLALKDDKAEMALDLLYCADPAELAAPKYIQEGLDWLKKELEVASRDLTPEVPKVTDVWEGE

SEQ ID NO: 66257 - protein, 622 aa, Enterobacter asburiae
METPSTNEPVVEELFSYLDLENPRSFLLFAGAGSGKTRTLVSVLEKMKQRYSSELSRCGKRIGIITFTNAACEEVQRRLFFDANFMVSTIHSFCWDLINPFTSDIKLWLKNELEKSIEQLTRDIEKSRKPDGITAQRNRRSLASKTKRLQYLDKIQKFSYSPTSNRPEKGALNHSEVINVTAYLLQNEALLREILFSRFPVLLIDESQDTNKYLIESLIMTQQEHPTKFCIGLFGDMMQQIFSGGKSDLASPLPPGWESPEIIINHRSPVRIVTLINSIRQFNDAYIQEPRPDAQPGTARLFVVDMNTHKERADIERQVAEYMAEQAADTEWNNKQSVMVLTLEHHMAARRGEFENFFLPLLEVERLGDAAINGDSQEITFLSSQLWPLIDAIRSDDDFKIATIMRKYSPVFSSSRLEYADDPLLLFREAQCQIDKIKVLLGENLAFPILEVCKLIHEGELLILPEAFQLHLALVPHKDDESTEEVDVNKEHEAWSRSLSASVRELENYISYISSTSSYDTHQGVKGLQFPRVMAILDDEEARGFMFSYDKLLGVIPHSKTDQENESAGGDSSPKRSRRLFYVICSRAQESLAVVAYTKAPYLVERTVIESGWFVKEEIMHM

SEQ ID NO: 66258 - protein, 566 aa, Enterobacter sp. 35666; identical to SEQ ID NO: 66010

SEQ ID NO: 66259 - protein, 541 aa, Enterobacter sp. 35666; identical to SEQ ID NO: 66011

SEQ ID NO: 66260 - protein, 712 aa, Enterobacter sp. 35666; identical to SEQ ID NO: 63712

SEQ ID NO: 66261 - protein, 599 aa, Enterobacter sp. 35666; identical to SEQ ID NO: 63713

SEQ ID NO: 66262 - protein, 703 aa, Enterobacter sp. 35669; identical to SEQ ID NO: 65464

SEQ ID NO: 66263 - protein, 583 aa, Enterobacter sp. 35669; identical to SEQ ID NO: 64895

SEQ ID NO: 66264 - protein, 712 aa, Enterobacter asburiae; identical to SEQ ID NO: 63712

SEQ ID NO: 66265 - protein, 599 aa, Enterobacter asburiae
MFMWNKDDLNPEQEAAILKPGSVFLIACPGSGKTRTLTYKIAYELSRLKSNKQFVVAITYTHRAADEIHERIESLGVDTSRLWIGTIHSFCLEWILKPYGIYHEALDRGFRVIDQHEREKILEALCKPYQKPKITFWDCEFYYTETGYVLSCPQDWKHSGLHVILGKYFEILHESRQLDFELILYYAYQLIARHPAISTLLAQLFSFVLIDEYQDTKRIQYSIITAILKAGQGATKAFIVGDPNQAIYQSLGGYPIAFEDFKAMANIDLDELELSRNYRSSERIIEYFGNYNVHNTRIEAASEDKAYPSLISFDDTVSKNDLDAELIRLIRFNIETMGISPHEVCILAPQWTHLASMARRLVASMPEYSFDGPGMVPFARDTENFWYRLSKIALTQASPGMYVRRLRWAGEILNDLEAAGASVSKLTRRSLLRECNAIKIDETDGLTYLSAFFERLFANLAIDFRLFTLLQEHHVAFFDSSQARVNRLKSEGSEFIGDIETFRKVFQHRTGITISTIHGVKGAEFDAVIAYALLEDMVPHFNDPNGQESAMKLLYVIGSRARKNLHLVSERGRVRQYSGEEYQVTRKLASCSFGYDQIP

SEQ ID NO: 66266 - protein, 659 aa, Enterobacter asburiae
MKITQMEIKGFKSFDNVGQTININSFTSLIGGNGTGKTAVLLALTRMFGVKSSDRIIQVDDFYVPPGDEIDTQDERELSVRVKFEFADLEDGEDNTVADFFKHLVSSEAAEIPYCTAKLKAKWTKTNLAEGDIESDLVWEIGEYEKNITAYERSKIHVHYVPAYRDPAQQLKQTAGTIMHRLINAVEWSDQMASTVDEVAVSIGNQFQEEVGVQTITSSLGRNWKTLFTGGYFEKLQIKPVVNGIEDVLKHIDTVFLPSPDTQPLPTERLSDGMKSLFYLSLVKSAFDIEDEIINSDGKQLSISVEALDPPNLTIILIEEPENHLSPQYLGRIVKLCEEISENDRAQVVLTTHAPSLLNRVEPENIRYFRLHDNKNTIVKEILLPREDKDDAENVDTFTYVKEAVKAYPEIYFAKVVILGEGDSEEIVIPKIAQVNGIELDTSLITFAPLGGRYVNHFWKLLNELSIPHVTLLDYDFRRGGGGWGRIKYAIKQLISIGVDKNILLKMSDGVLSDEDLEVMHSWDEDRDEEIAWIESLKEYGVYFSFPYDLDWLMLNEFFEDYKKFVPENGGPRLPKDDDPEYNKKVKAAIASVLKKEEKDIDISKFDDFEKYFWYRYLFLGRGKPLSHNYVLSKMEDDKLRDNSPEVLNDLIETVRGLL

SEQ ID NO: 66267 - protein, 615 aa, Enterobacter asburiae
MPIIKDDDWVLKDIQEVEDEAMKVIRNSTGHNLVLAGPGAGKTELLAQKACFLIETGKCRDKRIIALSFKKDAAQNLQDRVNSRLDLKYRQKFESTTFDAFCKSIVDRFKSTLPVVYRPSDDYEIYFPENKKFVEEVKRDAVGFEGLTAEELKKLKHNNFENNYIVRPYKKGEEHSVDARIKRFVWFRLLEGKSKVSFKMINFLANYIIRNNKFLSNAINSTYEYAFIDEFQDTTYQQYEIFKSIFLDKKIKITAVGDTKQRIMGWAGALHSAFEIFKNDFAIEHHNELLSNRRSLKNLIGYQRMMEAFMNHADNKPEMELIENEGSAKLIQFDESNIEGAYIALCIQKWIEKGVDEREICILFRNPSKHYTDKIISSLQDLDIKCRIENTYQELLNEAIVQLILKMLMFTCDKKSIEGWNSTMELLCNIRGVNKSRDITRLEKELSRFIKSNKDINGNVVDHIYGLISIFGIDEIKSYFPQYINGNGLDYTINSLSQHLENLGIKDNKLAAIDMLLGNKTIPLMTIHKSKGLEFKKVIVVGLEPGAYFGDEEEQIENQKTVFVAFSRAIEEVILTRCAKRANWWDEVCSQNFSEIPLITDMLTYCGLEAEIYKD

SEQ ID NO: 66268 - protein, 712 aa, Enterobacter asburiae; identical to SEQ ID NO: 64890

SEQ ID NO: 66269 - protein, 594 aa, Enterobacter asburiae; identical to SEQ ID NO: 64891

SEQ ID NO: 66270 - protein, 634 aa, Enterobacter asburiae; identical to SEQ ID NO: 65338

SEQ ID NO: 66271 - protein, 554 aa, Enterobacter asburiae; identical to SEQ ID NO: 65339

SEQ ID NO: 66272 - protein, 566 aa, Enterobacter cloacae; identical to SEQ ID NO: 66008

SEQ ID NO: 66273 - protein, 541 aa, Enterobacter cloacae; identical to SEQ ID NO: 66009

SEQ ID NO: 66274 - protein, 659 aa, Enterobacter aerogenes
MKITQMEIKGFKSFDNVGQTININSFTSLIGGNGTGKTAVLLALTRMFGVKSSDRIIQVDDFYVPPGDEIDTQDERELSVRVKFEFADLKDGEDDSVADFFKHLISSAAGEIPFCIAKLKAKWTKTNLAEGDIESDLVWEIGESEKNITAYERSKIHVHYVPAYRDPAQQLKQTAGTIMHRLINAVEWSEQMGATVDEVAVSIGNQFQEEVGVQTITSSLGRNWKSLFTGGYFEELQIKPVVNGIEDVLKHIDTVFLPSPDTQPLPTERLSDGMKSLFYLSLVKSAFDIEDEIISSDGKQLSISVEALDPPNLTIILIEEPENHLSPQYLGRIVKLCEEISENDRAQVVLTTHAPSLLNRVEPENIRYFRLNDNKNTVVKEILLPSKGEGDAENVDTFTYVKEAVKAYPEIYFAKVVILGEGDSEEIVIPKIAQVNGIELDTSLITFAPLGGRYVNHFWKLLNELSIPHVTLLDYDFRRGGGGWGRIKYAVKQLISIGADKNELLRVTSGILSDEDLEEMHTWDENPDNESGWIECLKDYNVYFSYPYDLDWIMLNKFFEDYKTFVPENGGPRLPKDDDPEYNKKVEAAIASVLKKEEKDIDIKKFDDFEKYFWYRYLFLGRGKPLSHNYVLSKMEDDRLRDNSPEVLDELIETVRGLL

SEQ ID NO: 66275 - protein, 615 aa, Enterobacter aerogenes
MPTIKDADWVLKDIQEVEDEAMKVIRNSTEHNLVLAGPGAGKTELLAQKACYLIETGKCSKKKIIALSFKKDAAKNLQDRVNSRLDSKYRHKFESTTFDAFCKSIVDRFKSTIPEAYRPSDDYEIIFPNNKDLVEEIKREAVGFEGLTSEELNKLQPYNFEENYIVTPYDKALEHTVDGRIRRFVWLHLLKPKSRLSFKMINFLANYIISRNQYLSNAINSTYDYAFIDEFQDTTYRQYEIFKSIFLRKKIKITAVGDTKQRIMGWAGAMHNAFDVFKKDFGIEQPNELVSNRRSLKNLINYQRMMEAFMNHADIKPDMMLIENEGSAKLLEFDESSIEGGYIALCIQQWIAEGVNERDICILLRNPAKQYTDDIISALKNSEIQCRIENEYQDLLNEAVVQLILQMLMFVCNRKSIENWGSIMDLLCNIKGVSKRGDVTRLERTLSQFIKSHRVIKGEIVDYLYSLLSIFGIDEIKSYFPQYMSGNSLEYSVESLSRHLEQLDVRDKTSDAIDLLLGNKTIPLMTIHKSKGLEFRKVIVVGLEPGAYFGNEEEQIENQKTVFVAFSRAIEEVLMTRCKIRNNNYGRPFRQSCNEIPLITDMITYCGIEAESYPG

SEQ ID NO: 66276 - protein, 567 aa, Enterobacter cloacae
MYIDNVYLKGFRNYSDSFIKLNHSTLIIGSNDVGKTNLLYSLRILLDKSFSDLDIEPKNSDFHIDEKGNQCDVLEIIINFREVKEDAVLSKLVGYVSEDSQTFIKYKAQRTSLDYKLFIGHTQFDMVEISSRFYLKYLNLRYVNSQRDLAKYISTEKKHLLRLAQEMRNDEQVKKDEDTLNSLSDLLNSVNDKVKEISYVSSATKELNDELKKLSYNNEKISVMLDSGAIGVDQFIEKLELSSNTNGKKVMLGGDGFNNQILLALWKAKSVREHDIENEVVIYCVEEPESHLYPHQQRKLSEYLINKLPGQSLVTTHSPQIAVNYSPDSIIKICSSEGESYAASEGCSNCISEAWQGMGYRISILPAEAFFASVVFLVEGPSEMLFYQALAKECKIDLDFFNISILSVDGVQFEVYRKILDAFEIKWVARTDNDSSKVPRKNEWQYSGLNRALVLCGMNPLENELMEISQEQRLKKYYHYKDELKKRNVFVSVNDLEGDISIELSEQLKEYVGVDDEEKAAEYLRGKKAIRMQDFLKEYSHTLKTISTGELIAPLLAAVMLATEEMK

SEQ ID NO: 66277 - protein, 540 aa, Enterobacter cloacae
MIDFTHEQRVAIDYPSSMVLTACPGSGKTAVIVEKIVLDLSICKEFQGVIAISYTNKASDELKRRCLKALPDSKSSFFGTIDKFYLTEIIHPFINHLWGSVNNLQVVKFNDLDSFAKDSLSIFYNDEYVCENIDTFDFKEIKNLYAKGFLVLEFVPLLAYFILCKSLACRRYLCKKYTSMYIDEYQDAGFIQHLIFLKIFGFGVKAVAVGDIDQSIFLYAGKSSKYLMSLLGEDSGFKPFEITINQRSHSSIVNYASRMLSENCELLVTDDTQVYRTTINGSQQEVAKWIDDNINNVKQTFGISKEREIALLAATNSSVLLMSGLVRTKLRAYIDDDLSKLGGDVSLLIKELLSYRFNVLVTAQEIIDGLSIKVVERNALREMRNVIKCVRKADDLHFIPALRQAVKLLINKDLSAQHIDAVNAVLQNKMMLNNYLPVGDDELQLMTLHKSKGLEFDFVFHLDLYDWILPRREFIEGSFDIVFSNYDQCLNLHYVGVTRAKKAVVLINSTERLNYQHELKRAKPSQFLSLRGVEGLYRNI

SEQ ID NO: 66278 - protein, 566 aa, Enterobacter cloacae; identical to SEQ ID NO: 66008

SEQ ID NO: 66279 - protein, 541 aa, Enterobacter cloacae; identical to SEQ ID NO: 66009

SEQ ID NO: 66280 - protein, 566 aa, Enterobacter sp. 35027; identical to SEQ ID NO: 66010

SEQ ID NO: 66281 - protein, 541 aa, Enterobacter sp. 35027; identical to SEQ ID NO: 66011

SEQ ID NO: 66282 - protein, 712 aa, Enterobacter sp. 35027; identical to SEQ ID NO: 63712

SEQ ID NO: 66283 - protein, 599 aa, Enterobacter sp. 35027; identical to SEQ ID NO: 63713

SEQ ID NO: 66284 - protein, 712 aa, Enterobacter asburiae; identical to SEQ ID NO: 63712

SEQ ID NO: 66285 - protein, 599 aa, Enterobacter asburiae; identical to SEQ ID NO: 66265

SEQ ID NO: 66286 - protein, 659 aa, Enterobacter asburiae; identical to SEQ ID NO: 66266

SEQ ID NO: 66287 - protein, 615 aa, Enterobacter asburiae; identical to SEQ ID NO: 66267

SEQ ID NO: 66288 - protein, 712 aa, Enterobacter asburiae; identical to SEQ ID NO: 64890

SEQ ID NO: 66289 - protein, 594 aa, Enterobacter asburiae; identical to SEQ ID NO: 64891

SEQ ID NO: 66290 - protein, 583 aa, Enterobacter aerogenes; identical to SEQ ID NO: 63878

SEQ ID NO: 66291 - protein, 591 aa, Enterobacter aerogenes; identical to SEQ ID NO: 63879

SEQ ID NO: 66292 - protein, 566 aa, Enterobacter cloacae; identical to SEQ ID NO: 66008

SEQ ID NO: 66293 - protein, 541 aa, Enterobacter cloacae; identical to SEQ ID NO: 66009

SEQ ID NO: 66294 - protein, 769 aa, Enterobacter cloacae
MSAADATTSLSGQISLRFVELCQFRRLGKVQLEIDPKTTILVGANNSGKTSILAALRHFLADGSSFGAFDISVSQWPKLRELGRVWDALEEDPSTSGASEGEWEEQLGTLISAMPTLDLWFDAKAGMFHYVSPFLSKFSWKGGGVGVRLRLEPATNIEDLKQLAWKYHLTRIPVKDMGKDSLAWPIDLLDFWLREPSQLGQVRAYKLDADNNPLDGIKTYVSQVLDADSSPIDRKHLQKLIKVDFVAAQRGLGSEEADSRSASGTHRIGLFSNQLLKFARQHLNVAATGHGHRADLIKAVADAQQELDKKIHEAIGPSVEEVKELGYPGLHDPQEIRFRTRIQTAELLDHGTAVQYSMQKDSLEELLPEYSIGLGYQNLQSLSYQLVSFKAARLNPEKGAPAPVHLVMIEEPEAHLHVQVQRIFSGKAHKLISPNGSDESGLKSQLIISTHSSHLAHAENFDRLRYVRRVAKSEEQNMPTTEVVNLGQVFGDDKTTRQFAERYFRVQHTDLLFANAAIFVEGVAERMLLPLFIERDFATLNSRYLSFLDIGGSHAHRLRALVERLRIPTVIITDIDPVEERPGKPKKNGDPTTTLVAVANTGQPGLQCGNPTLRGWHPKLQQLEDFKNPKNEHLVWKEIAECSVRFAWQLPVVEADGQWPSTFEDSLILRNIPWFKQLIDEKVDGDGKQIKPPKGALGSVARQVAENDNIPELLAALHKLMHGSFNKGDFAASIFEMVAADEPIVCPKYIEDALEWLQTQLEPSKEVMP

SEQ ID NO: 66295 - protein, 649 aa, Enterobacter cloacae
MTNSSALDDNDRDAGVVEEICGYLTDIPPRNYFLFAGAGSGKTRTLVEVLRRLTGVTEHEKGGQLARSLKMYGRSIRVVTYTKNAVSVINRRLGDNNLVSVSTIHSFCWELINGFNDDIRESLIAVKEAQLAKETAEAQAKPRGITAAKQRDLDEITNEIEVLRTTEVFKYHPDRNTYGPGALPHNYVLDATAWLLQNKPTLQSILKDRHPIILIDESQDTMKGVLDSLMVLAKKSERDLTLGLLGDHRQRIYMDGHADLPSIVPESWATPELQMNHRSQRRIVTLINKIWETELEGRTQPTKGSAQHPRTEKAGGTVRLFLGDTSRSPEDKVLSERWCAERMFEISGLADWNQGQYQLLALEHKLVATRGSFLDVYEAMVLLDPNAAAPSGSGDNKGPSTVQILLNELVHLEACVSDEGIVNEFKATEVFRRYGGLDNMPEDSESRVERTDEMLEAIAIFAMACANSESTIAEVLAPVLSANLFEVDHRLLEAYVDKSPAPQAPGRGEDESKQTRMRRGWCALFASPWKQLKCYRNYLAGISELATHQVVKGSEFNHVMVVMDDALAGGTLIKYDKIFGGTQLSPTDRKNAEAGKETTIDRTLRLLYVTCSRAQESLALVLWSSDPAAAMARIEESMWFTKDEIQVIP

SEQ ID NO: 66296 - protein, 712 aa, Enterobacter cloacae; identical to SEQ ID NO: 64890

SEQ ID NO: 66297 - protein, 594 aa, Enterobacter cloacae; identical to SEQ ID NO: 64891

SEQ ID NO: 66298 - protein, 783 aa, Burkholderia pseudomallei 7894
MHIETVWIRNFRRLKDARIDLASDISIFVGSNNSGKTSAGHALQLFTAASRDRFSLHDFSSDCWDDINAFGEGAEGSELPSISIDIWLRVGAIDLHRVVDLLPSLAWEGTRVGIRVEFAAIDAPALRTSFREARNRARRAPAPPNQANALQQAVPRPQAAEAPPEQRQANGEYLPQPRTLCDYLADSIGDHLRRNFELRYYVLDSAQFGPDFRPAAGYTPLRMTHDKGRGGREILSSLIKVDFLHAQRHLSDSGGGARSEDLSRCLSRFYERNLEKHEEDYEAQRALYQSEALLNDHLERVFGPTLERLSHLGYPGLNNPKLLIKTALNPATILSSHDGARVHYAVGPEVGIDTQTTLPDRYNGLGFKNLIYMVVELLDAHARWLDIEENRPPLHLIFIEEPEAHLHAQLQQVFIRKVLDILDIPDEDAPHCTSQIVVSTHSPHVLFERGFQPIRYFRRVREAGVQRSEVLSMASFYETANDPNDPTDRTRDFLERYLRLTHCDLFFADAAILVEGNVERLLMPQMIAKVAPGLLSTYVSILEVGGAFGHRFKGLIEFLGLTTLIVTDIDSVVAPAAADPAAPDDEDDPDADPDLEEAAEDRAAVRGGRKACMVNEPGALTSNQTLIQWLPGRSTIADLLNATVEQRIQARTVASDALIRVSYQTSVNASWRGTTAAMVGRTLEEAFALENLVWCQDAARAEIRLRVRGCNRLSLEQIAQSLHRKIKSANFRKTDFALALLSQDPSAWTVPAYISEGLLWLEHEVVPHPPEIAPPPINAGAVA

SEQ ID NO: 66299 - protein, 631 aa, Burkholderia pseudomallei 7894
MTLRASQPDTPADLELRACLDERPQRSFVMVAGAGSGKTTSLVKALTHLAQTRRRELKMRGQRIACITYTEVATKEISGDVGDDGLFHVSTIHSFMWSVVRPFQIDLKTWVISRIHEQIAEAREHYNRPRTRPATRQRLEREIARHERHLEEVTHRTHFSYGAGRDFARGVLGHPDVIAVAVELIEQSQLLRDLIASHYPVLFVDESQDTRADVVAAFRLIAETTPLEFCLGFFGDPMQKIYADGAGAIDAPATWSQITKPENFRCPQQVLRIVNAIRRAGDGLEQTRGRMMRVDDVLIPVAGTARLFLLLADERRSAKLSRVREWLRRTNNDELWVSEDRAADVRTLVVVHRMAASRLNFPNLYAALNDNSPQNFKEGLKDGSAWPLRPFLTYLLPLAMAVRDRRDFDAMTLLRSQCLLLSSVGLAGNDAPEVLRNLRAATEGLTTLMHSNDATLRTALIFASNTGLLQLDEAWSKYLDDDAEALAADDDPEVPSIIAFLNCQVSELRGYRHYLEDLSPFATQQGVKGAEFERVLVLIDDDEGRGQRLFSYEKYFNIAPLSETDQENIDAGDDNVIDRTRRLFYVCCSRAKRDLAVVMFVGDLAAARGKIEESGIFMPDDIVDEAALELD

SEQ ID NO: 66300 - protein, 594 aa, Burkholderia pseudomallei; identical to SEQ ID NO: 62560

SEQ ID NO: 66301 - protein, 599 aa, Burkholderia pseudomallei; identical to SEQ ID NO: 62561

SEQ ID NO: 66302 - protein, 783 aa, Burkholderia pseudomallei PB08298010
MHIDTVWIRNFRRLKDARIDLASDISIFVGSNNSGKTSAGHALQLFTAASRDRFSLHDFSSDCWDDINAFGEGAEGSELPSISIDIWLRVGAIDLHRVVDLLPSLTWEGTRVGIRVEFAAIDAPALRTSFQEARNRARRAPAPPNQANALQQVVPCPQAAEAVPEQRQANGEYLPQPRTLCDYLADSIGDHLRRSFELRYYVLDSAQFGPDFRPAAGYTPLRMTHDKGRGSREILSSLIKVDFLHAQRHLSDSGGGARSEDLSRCLSRFYERNLEKHEEDYDAQRALYQSEALLNDHLERVFGPTLERLSHLGYPGLNNPKLLIKTALNPATILSSHDGARVHYAVGPEVGIDTQTTLPDRYNGLGFKNLIYMVVELLDAHARWLDIEENRPPLHLIFIEEPEAHLHAQLQQVFIRKVLDILDIPDEDAPHCTTQIVVSTHSPHVLFERGFQPIRYFRRVREAGVQRSEVLSMASFYETANDPNDPTDRTRDFLERYLRLTHCDLFFADAAILVEGNVERLLMPQMIAKVAPGLLSTYVSILEVGGAFGHRFKGLIEFLGLTTLIVTDIDSVMAPAAADPVAPDDEDDPDADPDLEEAAEDRAAVRGGRKACMANEPGALTSNQTLIQWLPGRSTIADLLNATVEQRIQARTVASDALIRVSYQTSVNASWRGTTAAMVGRTLEEAFALENLAWCQDAARAEIRLRVRGCNKLSLEQIAQSLHRKIKSANFRKTDFALALLSQDPSAWTVPAYISEGLLWLEHEVVPHPPEIAAPPINAGAVA

SEQ ID NO: 66303 - protein, 631 aa, Burkholderia pseudomallei PB08298010; identical to SEQ ID NO: 62563

SEQ ID NO: 66304 - protein, 784 aa, Burkholderia thailandensis 2002721643; identical to SEQ ID NO: 62512

SEQ ID NO: 66305 - protein, 639 aa, Burkholderia thailandensis 2002721643; identical to SEQ ID NO: 62513

SEQ ID NO: 66306 - protein, 567 aa, Vibrio sp. S512-13
MEITSLYLKGFRNFSNALINFNKSTLVLGSNDVGKSNMLHALRVMLDKSLSEVDIEPSELDFHIGNEGIAEQAEIMITLSQITEDAVLSILKGNVSDEGTTILKYVAQRADLSYKIFVGHSLEELQEVSSRFYLKYVNLKYIQSQRDLERFISKEKKQLLRIAQQLLNENDAKNDEALLANISNDLSALNTKISQLKYVKSATNDVNKELKKLAHHHSNYEVQLDTGAIEVNDFIDKLQLGAITNGSSVMLGGDGRNNQILLALWKAKSIIEHDTDHEVVFYVIEEPEAHLHPHQQRKLASYLMDELPGQTIISSHSPQIAVNFKPDSIIRLFSKNGATVAASNGCSNCIAEGWEDMSYRMSILPAEAFFSNGVFLVEGPSEILFYNELAEQLNIELDYENLSILSVDGISFKVYVSILNALEIPWVMRTDNDISKVPRKNEWQYAGINRCLELAGSLKYANSYISLSPQDSVDYGYWHLVSSHTADQGIFLSKVDLETDLINELSQKVLAALELTENSKAIEYLQKKKALRMRELLRNLKTSLSLLNSGDLAKPLHKLLAISKAVS

SEQ ID NO: 66307 - protein, 540 aa, Vibrio sp. S512-13
MSGFQPTPQQQVAIDFDGSMVITACPGSGKTTVMTEKIRKVTPCLPDHKGVIAITFTKKASQELKQRCKHNAYDMKQSFFGTIDSFCLKELILPFVSRLWGGQPLECKVIKRLQEPYSLFLNKQYRSPTADNILNDDGFKRLYESGFLWMNSFSALALHVLNQSIAAQRYIKAKYSHVFIDEYQDSSEAQHQLFMKLFELGLTATAVGDTSQSVYEFRGGNPDLLNSLVYDKNNFEHYEININHRCHPSIVNYASRLLNPNFQLVQCEQMYIFRRTITGNLTNAAQEITGWISDWISKNEWGITKPSDIAILAKQERSLRLLTHGLNIDYRIYSDNPLDEIGSDCSDFYSHLLAFKYGAIPNIQELIDNQFDLFITEDKNLYSIRRAVKAIREIDQVEKLVIKFHELASLVGIDDTETSDNAVREILQKQELIKQFTPLNDSEIQVMTLHKSKGLEFKVVFHFDLEEWSLPFQQVENNDWDNPIYPSLRQDINLHYVGITRAENCCILINVTQRQNRNGGFSQSNPSYFLRLPQLEGLYA

SEQ ID NO: 66308 - protein, 527 aa, Listeria monocytogenes; identical to SEQ ID NO: 64370

SEQ ID NO: 66309 - protein, 713 aa, Listeria monocytogenes; identical to SEQ ID NO: 65469

SEQ ID NO: 66310 - protein, 527 aa, Listeria monocytogenes; identical to SEQ ID NO: 64370

SEQ ID NO: 66311 - protein, 713 aa, Listeria monocytogenes; identical to SEQ ID NO: 65469

SEQ ID NO: 66312 - protein, 567 aa, Vibrio sp. S457-15; identical to SEQ ID NO: 66306

SEQ ID NO: 66313 - protein, 540 aa, Vibrio sp. S457-15; identical to SEQ ID NO: 66307

SEQ ID NO: 66314 - protein, 650 aa, Vibrio parahaemolyticus
MHIERINLQNFRSFGPEGQNITVEPDLTTLVGANGAGKTVLMQALQRMFGISNEQRTIRRQDFHIPSSEENIPSKRTLTLEAIVAFPELDDEDGDHSVIPDFFHHMSVTDEDGKLKCRLRLDAEWEDDGSIDGYITSQFRAVTTWGEPEDADFHNVRPADRSRIQLIYVPATRCAVSQVSAFLKGRLWKAINWSEQVRSTFTQKATELNESFEGENAISTVTGKLTDRWQELHSAGTDSTPKFRPVDLRFEEFVRKVEVLLHPDESGRDRSIEELSDGQSSLFHIAMTSATLDVETEILAQPESEDFLGTDLPLPSLTILALEEPENNLAPYYLSRIISQISSLVHGLRAQAVLSSHSPSILARIQPTQVRHFRLATESNTTVVRQLTLPDEENEAAKYIQQAVRAYPELYFAKVVVLGEGASEEVILPSISEAMGIPIDKSFVAMVPLGGRHVNHMWRLLTDLQIPFITLLDLDWGRHGGGWGRIKNAVAKLIEYGVDPSKIFGHYLNPLGYQHNLTAFDTYSVADLTNISSWTNALRHYGVYFSSPLDIDYSMLKAFPDQYRVAPDESSNGPSMRGEPGNAVMGDEGNPEFYSGDELDLRWYRYLFLGRGKPSTHIRVLGTIPPAQLAQNAPEELRALVQSIHATLQS

SEQ ID NO: 66315 - protein, 631 aa, Vibrio parahaemolyticus
MKFIQPEHWQPKGIENLEPNAWQALRRRESTSVIAGPGAGKTEFLAQKAAYLLETGLCPTNKKILAISFKTDAAKNLADRVEERCPEELGSRFVSMTFDAFSKNIVDRFRMALPPQWRPTKPYDVTFATRQQITSFLGRERQKNSHISGLLNAIARINPITFESTFVGSRRLGLASNDIGERTLYDNWLAEQVSCGDEVPSKLTFMTINRLAEYIIRTNDHVRRALRATYPYVFVDEFQDTTYGQYDFLLSAFGYSETTVTVVGDYKQRIMGWAGARGDAFHQFEADFSAQRYPLLLNHRSSPELVRIQHVIAQAIDHEVREVQTSNHSQVSGDAAWICFSRNVDHEASYLAQWIANDMRSRSLNPRDYSVLVRQRPEDYEEQLSSYLTQYGLRLRNESVKIGKTTLQDLLAEELTILFSNLLRLGLGHRNAQVWNQLSADVQLLRNTTPEDEKALRQVERRLALFISELKELMRQSLTPDNARLVFERIIAFIDLNDLRKTFARYATGDLLEINLAALEEFFTNCVDTQSSWGNFLEEFEGKNQIPLMTIHKSKGLEFDTTIFMGIDDNAWWSYRPGDSEGLSTFFVALSRAKQRAIFSYCQQRGQRTKVADFYALLTTAGVQEYVIPPS

SEQ ID NO: 66316 - protein, 527 aa, Listeria monocytogenes; identical to SEQ ID NO: 64370

SEQ ID NO: 66317 - protein, 713 aa, Listeria monocytogenes; identical to SEQ ID NO: 65469

SEQ ID NO: 66318 - protein, 527 aa, Listeria innocua
MNHIKRMHIKGLKKFKDIDIEFNEKINILVGENESGKSTILEAINIVLNQQYRSIDKYILKDLMNINSMKDFHKNPQVNNLPSITIEIELELDNQANVDTIYFRGINDKDKGQFEKFGILFECEFDKEFEDELRSEIEDGVIPFEYYKLTWSTFQGSSYNIMKKPLRTISIDNSITDSNSSFNYFNKSLFDNKYSSSDKMKARNSFRNEVDLIFNALNLEGLGNNRQFGINSKKTILDNVLTVYEESISLENKGKGMENLIKTEIALNKSKNKLDVVLLEEPENHLCHSNLLKMLDEIKKNTNEAQLILTTHSNMIASRLDLRNILWIGSDEAISLNKIDQEDAIFFEKADQNGILNLLLSKKVILVEGPTEYMLLPIMYKKIIGRSMEEDFITVISCNGIAYKRYLAIAESAKKKVAVITDNDGKQNVIDSKEEYNKDKVLQRIFTDDNLSNWTWEVCMYELNTNYFEEHVIVNNTSAYLFNQKDYGKVLGKMLNNKAEIAYSVLKDVDDLKIPEYVEGAFIWINE

SEQ ID NO: 66319 - protein, 710 aa, Listeria innocua
MSNTNNFASDVVRMEDEDANIFHHLVSLNGGNEFNKEQVNAIRFDMRTHLRIIAGAGSGKTQTICAKAAYLVLKEKIQERNIVMCTFSKKASQEMKERVNEFLGGNSRIEVLTFHGWFQKEYNVLIKKYPYLEKYGIAGEVPGKGSGKDSHDRILMNLIKQYHLYNFDKYEEKPINERLSYWRNMGYNDEVIVAFIARHFDDKEILKDQLLSEVFSEMLKELERIKRREKVINFDDMLINLKCVLENDSNALSLIQTRYQYIFIDEFQDINPLQKQIIELICPPDYEKSVINSAKLIIVGDDDQSIYFFRGAEPRYIKEFDRQYRQTSIELMTNYRSIAPVVHIGNTLISNNQHDRIKKSMIPHKLNVGDCYANVFQNEQQEASWIAMQILSLSSDEKPFQDQIGKPNYTETIVLYPNKNQLKSMIIALQEKGIPFVTKSDDDLLGIFGINFFKQSFNLLMDIIDAETIEIKKHLYKQLIKNICLYYYIPFAKSTNLVSDETNYTSEKLTDFISNEKNISKEEMAVIKSIFQDINEFTKTEELDIKAFVNWLVKTPKVKKELIDEEKDWLLKEVSNVKTLKELILKYKAARTLKEEMADKLREYDNNNYNAVYLLTIHSSKGLGYKNVFVKGIYKNSLPDYRSVDKESIELQPLIEQASPPTTMEEQRRLMYVALTRAKENLYVTYPREVNEKPTLVSPFIKESNIMFRV

SEQ ID NO: 66320 - protein, 768 aa, Vibrio parahaemolyticus
MPDIPRETEVSKGIKLRFVELSNFRRLGKVQMNIDQKTTILVGANNSGKTSILAALRHFLTEGARFSAFDISISHWSKLRAIGKVWEELTEDPLTVTEPEEKWKDQLQILLETMPVLDLWFDADVGMYHYVAPFLSKFSWKGGAVGVRLRLEPVTNIEELKQLAWAYRTVRLPVKDMGEDSLAWPIDLLDFWLREPLKLGHVRAYKLDTDNNPITGLVPYETQKLDVHTSPIDRKHLSRLIRVDFISAQRGLGSEESESRPSSGLHRVGMFSNQLIKFAQQHLNVASSGHSQRVDLVKAVALAQKDLDSKIHEAIADSVKEVKELGYPGLHDPQEIRFRTRIQTADLLDHSTAVQYSMQKDSIEELLPEYSIGLGYQNLQSLSYQLVSFRAARLKPEKGSPVPVHIVMIEEPEAHLHVQVQRIFPNKAHKLISPTEKETSSLNSQLLISTHSSHLAHSENFDRLRYVRRVAKSNATPMPTTEVVHLADVFGDDKKTRQFAERYFRVQHTDLLFANAAIFVEGVAERMLVPLFIERYFKELNSRYVSFVDIGGSHAHRLKPLIEKLRIPTVIITDIDPCEEREGKPKRSGEPTKKLVAVANTGQSGLQSGNPTLRCWHPKLQQLDDFKTPTKEQLVWNEIQDCHVYFAWQLPIDSANNCWPSTFEDSLVLTNISWFKGLMDEKFDENGEEIEVPKGALGSVSKRVVEAQNHDQLLSDLHTLMHGSFNKGDFSASIFELVSSGKDIECPRYIADALTWLQKQLEPRGLME

SEQ ID NO: 66321 - protein, 651 aa, Vibrio parahaemolyticus
MSKKNIITDNDRDAGVVEEICGYLTEVPPRNYFLFAGAGSGKTRTLVEVLRRMTGVVAHEKGDLLARSLHTYGRSIRVITYTKNAVSVINGRLGDNDLVNVSTIHAFCWELISGFNDDIRAALIAIKEAQLEKEIEEARAKPRGITPAKQRDLDKIRKDIEGFRNTDLFIYHPDRMTYGPGALAHNHVLDVTAWLLKNRPTLARILKDRHPIVLIDESQDTMKGMLDALIAIAESRGCGLTIGLIGDHRQRIYMDGHDDLPSLVPDSWAKPELKMNHRSQRRIVDLINTIWEAKLKGRTQPANGIRQHSRTEKADGFVRIYIGDTRLSPEDKALSELWCADRMWSASGVEAWSKRDFQLLALEHKLVATRGAFLDVFSAMVLLDPNAAAPSGSGENKGPAVVQTLLNELTDLEGCINSDGTIDEFKVTEVFRRYDCLERIPEDTAARAMRVEEILAAIETFAIACANPLATVGDVLEPILSAKLFNFDNRLAAEYVDKSPPPSAPARGEEESIQDRLRRGLCALFSAPWNQLKKYRSYLSGNSILATHQVVKGSEFPHVMVVMDDKLAGGTLFCYDKVFGGVELSKKDNENREKGKETTIDRTLRLLYVTCSRAEDSLALVLWSSNPTAALERVKNSGWFLGKEVEVIPPP

SEQ ID NO: 66322 - protein, 527 aa, Listeria monocytogenes; identical to SEQ ID NO: 64370

SEQ ID NO: 66323 - protein, 713 aa, Listeria monocytogenes; identical to SEQ ID NO: 65469

SEQ ID NO: 66324 - protein, 607 aa, Martelella endophytica
MYLSRIRIENFRNFRDLDVALGGNIVIVGENRVGKSNLLFGLRLVFDPSLPDSGRQLGLADFWDGLEEITADTTITISVEIKDFEDDLDVLAVLTDYRLNSDPNTVCLTYQLRAQPGLGHAPASDDDFSFVCFGGEDEAKRFGHDLRRRITMDLLQALRDAEGDLAAWRRSPLRPLVEDAFIGIDKDALKEIGEKIAGASAAAIDFDEVKTLEVNISELFLAMAGSKQDVHPSLGFSSTDATRINRQIRLLIDEGRRGIADASLGSANLIFLTLKLLDLQRLITANKRDHSLLAIEEPEAHLHPHLQRLVYKHLFETIVDGGDGVDADNDEDAAGPLSVILTTHSPHIASVAPLESLLLLRASLNEGTVGYSTAAADFTKAETEDLQRYLDVTRAEMVFARGVILVEGEAERFLIPAFAEGMGISLDEHGVSVCSVAGTNFQPYVKLLCALGIPFSVITDYDEVDEMPRANNRALKLIRIIDEAAEEGDTDAVIKAIEDKGTWKETFAEIEKFGIFVNGSTLETELFEGDYAQEMIDTLREQKFGAGRKAFLDAWEAQPEDFDADELLKMIEQMGKGRFAQRLATRSAGKPVPDYIKDAINHVIRLV

SEQ ID NO: 66325 - protein, 598 aa, Martelella endophytica
MSSVSSNRALFLKAAEDLRSNDKQWQAYEAAGHCVLLAGPGSGKTKTLTVKLARMLSEDVDEPRGIACITYNNECARELESRLETLGIAPGGRVFIGTVHSFSLTQILLPYAKVAGLGLPDEFKVATRQEARAALAAAHAQVIGGPENPQNWDMRLGRHRRRFLNRELPEWRTLDPELTELVEAYEAELRARRLIDFDDMPLLAVRALAANEWLRTAMVAKYPILAVDEYQDLGRALHGMVMGLCFSAGMRLFAVGDIDQSIYGFTGATPELLRRLSERDDVETVRLGLNYRCGSRIVSASEYALGENRGYKAPDGAHEGTIYFHPCTGGHAGHARYLVEELISEIRERRPGTNLGEIAVLYPAAFLGDEVANAAAKHGYSVIRTDGNALYPRGSRLMRWLEQCAMWCCGGWRSGRPRLSRVVSEGARLFHETIIDEDERLTFQRDVTAALWDRRDETLSLSDWLAALRDEIIRPRVDLARSLADELGILNDFLNRIGPDGDVDDFPLGEFAGIGSGLDRLNLSTLHSAKGREFDVVILFGVDEGRLPRNNATENDVREARRLFYVGFTRARHEIHLVYAQHNPSRFVTEVQERLEGE

SEQ ID NO: 66326 - protein, 704 aa, Paenibacillus beijingensis
MYISSLKLRNFRNFQKANFKFNEGVNTIIGANGTGKTNALYAIRLLIDENLPRSSVNLSETDFNRGLTRWQGHWIIISLHFGGLSDDDSSQALIYQGTHSDSEKGSLTLFFRPKYEVRKRLFELSDPSNPQRMQAIQTFLETIKINLYEAVLYGRGNGNICDDFIYTSIVGDFVGGMFPDPDLDDSSVLGTLANQYVFKNDFACTYAKALRDVIGDLKNTRKSPLLRLLQNLNINESTSETVSNTIKDLNSHITNLQEIRELATGVTQSLHKTVGHTYAPRIEINSNLSDDFNQTLRALTIRASEVSGEAYLGDLYELSLGGANLLYLALKLEEYNRLDHARNKAAHFLLIEEPEAHLHNHIQKTLFQKYHNHENTQIILTTHSSHISSSCALNAVNILYIDNISSEVAQPSTGMSPGEITKIERYLDATRSTLLFARSVILVEGDAEMIIIPELVKKVLGITLDEIGVSLINVGSTQFTNIANLFSTDRIKRRCAIITDNDLSIVPVETGAYDDVEYQKKCIDSQTSGEARKVKLDSYCNDNEFVTAFYAENTFEVEFIKHGNKSYVIDVICNEIYSRKHDQISSIEKINSLELSVFGKEILRLAEKEGKGWLALAISSRLDKHAFIPDYILDALCFVSGLRSNHLISMIKHNLESEYENFIHTVNHAFNGDPTDNDIIESFCSLHPETVITTLIKKRGENSD

SEQ ID NO: 66327 - protein, 585 aa, Paenibacillus beijingensis
MLIEFLNSEQREIVEYENNSLVIACPGSGKTRTLVAKLIYEGAKLKKNEKIAAITYTNLAADEIGLRVNENCFDDSFYWGGTIHSLCTNWILKPFSLFIDELRFGYKLIDEDDAMEILDEIKQKHNFRENVNTRRGADGNFVEITTGSEGVLKEYDNRLKEAKLIDFDLVLFYSFKILLERKSVARNLSQIFKWILVDEYQDTQELQYLIIGEIIKARNNHTKILFVGDPNQGIYNTLGGVAKTKHELESSIGGYNIEEKSLNGNYRTTQEIIDKYRDFQLFGENIIARGSNKNNPSEISFRSDISVESLPEHILKVIMEIHNKRVPYSEIAVIAPRWFDLINVARRIKQIEPDVPLNAMGLSPLCRDDNNIFFHLSRLLLSSPSPDQILVRLKWAQILFDLLVERLPNSFESSFNNKSILKVINSFKSNNQVGIEFLKEGFNFFGSKIGVDFSTSLVFKDSLEEFERKCLKKQARNGTGDSISVYKSGFAKAGGVSFISTYKCKGLEYHSVIAFGMLWGYLPHWNEIFSSNIDENEVSKKLLYVISSRAKNNLYMIAESGRRTTRGTPLFPNRHLVEVFSERSV

SEQ ID NO: 66328 - protein, 520 aa, Xanthomonas citri subsp. citri; identical to SEQ ID NO: 66020

SEQ ID NO: 66329 - protein, 598 aa, Xanthomonas citri subsp. citri; identical to SEQ ID NO: 66021

SEQ ID NO: 66330 - protein, 520 aa, Xanthomonas citri subsp. citri; identical to SEQ ID NO: 66020

SEQ ID NO: 66331 - protein, 598 aa, Xanthomonas citri subsp. citri; identical to SEQ ID NO: 66021

SEQ ID NO: 66332 - protein, 520 aa, Xanthomonas citri subsp. citri; identical to SEQ ID NO: 66020

SEQ ID NO: 66333 - protein, 598 aa, Xanthomonas citri subsp. citri; identical to SEQ ID NO: 66021

SEQ ID NO: 66334 - protein, 520 aa, Xanthomonas citri subsp. citri; identical to SEQ ID NO: 66020

SEQ ID NO: 66335 - protein, 598 aa, Xanthomonas citri subsp. citri; identical to SEQ ID NO: 66021

SEQ ID NO: 66336 - protein, 520 aa, Xanthomonas citri subsp. citri; identical to SEQ ID NO: 66020

SEQ ID NO: 66337 - protein, 598 aa, Xanthomonas citri subsp. citri; identical to SEQ ID NO: 66021

SEQ ID NO: 66338 - protein, 681 aa, Paraburkholderia fungorum
MKIVSLEIENFRGIRSAKILLDGHTLLIGANNVGKSTICEALDLVLGADRLNRQSPIDEFDFYNAKYMERQAADEPPKLIEIRIEATLVEFGDEIGDRCGGHTEFWHVKERRLLGAGEIDLANSPEAVRCLRVVTIGRYDPEEDEFRADTYFSHSPERAEGELTSLPRPIKRTFGFLYLRTLRTGARALSLERGSLLDIILRTKGEGARAQLWEETIEQLRKLDVESSAAEIAPILRKVEKRLGRYVALESPGSATKLHVSDLTREHLRKTLSFFLALSSDQSHVPFPHAGTGTISTLILAMLSLIADLKPSTVIFAMEEPEIAVPPHTQRRIASYLMTKSTQAFVTSHSPFVIEQFDPSQTILLSRDNGIVSGKRVSEATGLKENEFKRFARWGLSECMLGKIAIVVEGITEFHALPVVARRMEEHDANLQPLDIAGAAFFNADGDGNGPKFGQFFKTLGLRSVAFHDTNPKHSDAKVAEYAQAFDIDYKHKEKGFEQLMVNEVPADRLWDFLQEIKGSGESGNVGIPADKPDEKTIRDTALKAFRSGKGAGWAARLFEMCAFEELPPTAIDFLNQVYDLSPTREALDADDEADAGFAGAQSPESQAVPNPAPPGAENSASQAKPSWAEILSLVKPLSPAEVEENSGAQSSQPPQASPAQKAVPPQTPPPWESGFDGDKE

SEQ ID NO: 66339 - protein, 588 aa, Paraburkholderia fungorum
MNQPDLRQVVLDCESHALVLGGPGSGKTTIALRKSIKRIKEGLRPGQRVLFLSFSRAAVARITGAATVEANEEERSKLLIQTFHSFFWEVLRANAYLLGAPKKLKILLPQDEKAMSGGLDKDDEGWAEWDAERQRLFHSEGLMAFDLFAPAAADLIRRSALLRESIASRYPLFIVDEAQDTGLHAWECVKLLAPLTQIICLADLDQQLFDYLPGVGPERIAEIRVALQPQEIDFGSENHRSPSTQILEFGNDIMFSRLRPEQYTGVSCIGYNPTTANWNHLLRRALAAIYKAVKDHTGERAETIAILVSNNRTALRLSNALNALGTFAEKGKAVSHRLMFDEAEALLCARLAAFLLQPKVPAQMDSDIATAIEMLARAKSATGKSQQIVMKLREQAVKIRQGKSLSINIAKAFRAVLEALRATPFSGDPAKDWTRVKKALRDSQQEELTRAASQLDYIVALRRGHRISTALADEWLRDGAYTHAIDALDAAFAQEQLLDGVDAPTGIQIMNVHKAKGKQFDGVIVVREGRRDQNGFSSSFVWRNDSPPYSKSRRIVRVAITRAQTHALILDPMWPRCPIIGNHRLARV

SEQ ID NO: 66340 - protein, 777 aa, Desulfatitalea sp. BRH_c12
MRIDFVEIQNFRRLAKIRIDFSDKTTLFVGANNSGKTSAIIGLSYFLTRQKDFSTYEIPLALWSCIEELGRAFENDQDKELPYSWHELLPSLDVWLNVSGDEIHHVAHLIPTLDWSPDQGVGVRLQLEPKNPDELLQSYQISKTAACDTLKARPDNSDVKLLDKTEAKEPTTGDGTCKGFSLWPENLMDYLKKDMSSLLTVNAYLLDPAKKTAPISGIAQPQLLPEGAVPLEEDPFKGLIKIDEVPAHRGLSDYSGGPEEEWHEQGERGGKHLLTSQLSAYYTKHLDPLKAPEPSDIQALEAIYEAQTVFDKRLKVCFKNPLCELEGLGYPGVANPRLTISTIISPVEGLKHKSAVQYDLTPAQDTSRYRLPEQYNGLGYQNLISMVFKLISCRDDWMKVGKAARPEKAGTQKTSPPPLHLVLIEEPEAHLHVQVQQVFIRKAYEVLCNHPALQGKSSLSTQLVVSTHSSHIAHEVDFAHMRYFRRHPACKPGETPFSSIVNLSEVFGKPDETARFVSRYLQATHADLFFADGAIIVEGAAERMLIPHFIRNNYPTLHSCYVTLLEVGGSHAHRLAPLIEHLGLNTLIITDIDAVDKKTRSKVTPKIGGDLISSNNVLKSWHPKKEGFDDLVDLSEDEKELSYDGFFSIRVAYQTSLKVEMKGKPFDAYPSTFEDALVFENIDHFRSANGGGLIKQFRQAIEDNDDIYKLQASMMNALKTGTKAEFALDMLFSQDPASVKVPTYIHNGLKWLEDQLLQRQQEVALPQREPVSEAVEA

SEQ ID NO: 66341 - protein, 623 aa, Desulfatitalea sp. BRH_c12
MSHPDDLFDKQADELIAKCVTDVPPTSFFLFAGAGSGKTRSLVECLEVIKEKSGPQFWLDGRRVGVITYTNKACNEIRSRLKYDELFTVSTIHSFAWSLIKNLNHDIRDWLQINLQEEISELEEKERKGRAGTKASIDRINAIKSKKERLAGLSQIKRFIYNPDGDNPERNALNHSEVIYITADFLTGKPMMQNLLVNQFPILLIDESQDTIKELIEAFLFVQSKLKDRFALGVIGDLMQRIYLAGKIDLDQNLPADWATPAKRMNHRSCHRIIKLINRIREPVDTQEQRPRSDKGVGCVQFFILPADAEDKLAAEQACCRRMAQITNDDGWLEPDINVKTLILEHRMAARRLGFLDMWDALRDVKRLQTGLRDGSLPALRFFSNLILPLIIASEKKDSFAVASIVRMHSPLLERNTLISCSSGQKCQVESAKAAFDSLVALWGHGKSPTFMQVLNSVHETKLFRIPEILLPFAQSAEGITEEPREEDKYDELVAWRKFLETQFSQIEMYSRYIQGEAQYDTHQGIKGLEFPRVCVLMDDLEAGGFLFSYEKLFGAKQDTKSKNPDQETSIDRTRRLFYVTCSRAENSLALVAYTTAPEAVRRHVIDEGWFKEDEVVMVSPES

SEQ ID NO: 66342 - protein, 675 aa, Desulfatitalea sp. BRH_c12
MYVAKILITNLRCFRQTTVKFKPGINVILGENNAGKTALLCALRLVFDRSGRLRPDLPDFYQGIVDFTKAPTISVTATMRSSMADTIDDKALVATWLTKLDAPWEAQVSYEFFLPDGEVPAFTAALGVAPDRNQFFRVLEQFIPKYVARIFGGLPENRLVAEPDTLAKFDCHTVDAIRDVESELFAGTNPLLRTMLRQVLDHDADEAETLNRRRHFRTLTQDALSNLTGRMNLDALFQLAKDTGAADGGSPILRDAIDEDDFIAALRLYIDRAPFTIPATHNGLGYNNLLYISLLLASLQFKASVPRRGQNAVLFPMLLIEEPEAHLHPSLQYKLLKFIQKRLSPEKTSRQVFLTTHSTHISAAAGLEPIICLSLSEADGGVHVAYPARVFGESPGGKASRNYVERYLDATKSNMLFAKGVIFVEGIAEQLLVPCLSQCIGRPIETHHVAVIAVGGLTFKHFLPLFGAGEDELLRRYALRRPVACMVDADPARKSKIKGARRQKCWPYVLNRDCATYDYFPVSGVVTNLQTMRGRSPGNIKICVCSKTLEYDLALANAKLPLLVTPSCEHEADLCALAETPAKLPVPLQSLLAGDESDTLDALTAHPDEATHRFATCYLLCAEDAKGEHALVLERQLRENLSKPEADRKTFVCPDYIKDAIHWTCVFDTPEPPHA

SEQ ID NO: 66343 - protein, 596 aa, Desulfatitalea sp. BRH_c12
MPEKLDIDSGTLLSDIERHFRVVAGPGAGKTHWLVNHIKHVVSRSKRLSPASRVACISYTNVAVNEIVTRLGSSATQVDASTIHSFLYRNVVRPYLHLLREGDGKPLVAFASVDGHDEHHPSYTIIDEWLRSIGQAKILQRAFKEQRDILKDKLCQLVWQRSGGGVWTLEPRKRDRMGKMLNTICTSANLIDYKRRYWSLGIVDHEDILYFAHRILEGHPLVCQCLSARYRYLFIDEFQDTLPIQTNVVQWLADAGTVVGVIGDAEQSIFGFLDAHPQHFLSFSLPDYLDMTMHHNRRSTRRIISILDRMRSDGLRQHCFRELDGQPVTVYIGDVDRSLAAIRTDLPPDAVLHVLTRKNRDAHRVRSAIAPGTVEPWESFYGADAERARFMEHVIAGTVLAKRGQISLAHREAARIIGRKGRVRKPLKCDTVLSDVHWKGIAVTVLQEFLTNHAAVFAGTLLEAYVRCGTCVTAAYPAVTLTAVKAGKFKAFAEATPYSHLAESVRLREEVRHVRTIHQAKGSEGDNIAVYFEDADRVRHITHSSTAPADEEKRLTYVALSRARNRLFLCIPMDVVINADELNALNLRVIDLRETQ

SEQ ID NO: 66344 - protein, 685 aa, Desulfobulbaceae bacterium BRH_c16a
MKIDSIIIRGFRCFDDQGQTIKLDDLSCFVGPNASGKTAAMIALTRLFGETNAQRQVISNDFHLSSGEELKSQSQRILLIECRLVFSELDEPGAALNSIPEIFNQMIVDEPGGSPYCRIRLEAIWRNDGTLEGDVTQTISWILTSSDDEAIIQDGNRKRVQPGDRGKIRVIYVPATRDPKQQIKATTATSFGRLLDALEWGGVEENIKTKLAELQAELTGLTGIKTMNRRVQRSWQKLYDGPVARTVSFQALENEATALVKLLVPTFNPGENGRTMSVEDLSDGMRSLFSLSLSLGLFRVEELLRNRANTSGFKAEVREELPLLTVFTVEEPENHLSPHYLGRIVAELDAISKDSRAQVIISSHSASILGRVVPDNVRYFFGHEHSSATSVKPIPLPSNETNESFKYVREAVRSYPELYFSRLVILGEGASEEIVLRRLMEASGRPVDTHFISVVPLGGRHVNHFWRLLHDLGIPFITLLDLDREKEGAGWGRVQYVRNQLIKLYGAGHQKLNFTSDTGNTVNLADSQFDTLKDGSDLNVAQMDNWISYFRTYFAVYFSSPLDLDLAMLEAFPIVYKGLAPAGGGPRLPAPGSPTYRGVIRQRMRQVLASDATTAPATLGDSYTQEQVESFAWYKYLFVDGSKPVMHMRALLAINNETLVTEAPVVLKQLIEGAKALLAQQESVE

SEQ ID NO: 66345 - protein, 627 aa, Desulfobulbaceae bacterium BRH_c16a
MLYIAPDQWLPVGVASLEFTANHVVRSNQNTLVVAGPGAGKTELLAQRASYLLDTGTCPTPHRILAISFKRDAAKNLGERVKERCGDGAQRFDSYTLDAFAKSLVDRFLPALVEEWRPPIGYEVLTGGLHVNAKQLWLDSAGVPQGQQPITFMALQPNQINRIFDKMAHGCELPYSSSEIDDRIRYWGHRWWREQLNRPAGSQSLSFPMLNRLAAYLLRSNPKITMALQETYQYVFLDEFQDTTAAQYDLIRSAFFESDTIMTAVGDNKQRIMVWAGAMPKVFETYQNDFGAERKDLVSNYRSAPELVAMQQIIAQTLETGTPIVNAVNIDTSGSCVILEFSNPEDEALHLAQLIERRIREDSLKPRDFCILVRQRAGDMILQLKEALALYGIPLRDETLLQDLLTEPAVRFMLVILRLATRQRDAEAWNILVNEVIILLGLDEHDDAIKVEQECVRLLKHARAALQAGNAIATLPAELIGMIGEGTFKSVYRQYRSGTYLADVINNFTNALQNSAEDYSNPCDAVNDFMGTDVIPAMTIHKSKGLEFHSVIFLGLEDSQWWAFSNQSDEEKRGFFVAFSRAKAHVYFTFSDVRDERWGRRGQQRSQIGDLYTTLQQAAVPVENHRM

SEQ ID NO: 66346 - protein, 691 aa, Desulfobulbaceae bacterium BRH_c16a
MKIKHVKVENFRLLRDVELGLEDRTTLIVGRNNSGKTSIAEIFRRLLSDKALNFRLEDFSLGCHEKFWTAFEAVHAGISAPDVLGLLPYIRITLDIAYDVDAPDLGPLSDCIIDLNPDCSFARVVLNYGPRSTAADVLFADLPAPEADIAAVRAALFRVLGNRIPAAYCSSLEAVDPNDGTNRKAMELKILTALVQGGFINAQRGLDDDTKRERDVLGKVVEVLFQSALNDPVDHEKRTIAEQLKVAVEDIQSDLHADFNTKLTSLLPTFDLFGYPGLPDPGLITETSFDVEKLLSDHTKVRYAGKNGVTLPETYNGLGVRNLVYMLFQLLRFFREYQATPTAAGVHLIFIEEPEAHLHPQMQEVFIRQLDQITNVFAAQLNENRPWPVQFVVTTHSPHMANEARFETLRYFLSVADGDGLRRSEIKDLRKGMGDAPVPDRDFLHQYLTLTRCDLFFADKAVLIEGTSERLLLPAMIRETDTAAVGEPKLGSQYLTVMEVGGAYAHRFFDLLTFLELRTLIITDIDAVRPNDKKKRVAVPVADGQFTSNGCLKAWFGEDVSPADLLIKTPDDKIANGRRLAYQIPEVDGGACGRSFEDAFILANPALFELGEGDQAALAYDLAAGQKKSTFALELAIEKTVWNVPRYIDEGLRWLAHDNPAPAAQPETIAVEIVAEAVDVDIDVDEVLDHA

SEQ ID NO: 66347 - protein, 591 aa, Desulfobulbaceae bacterium BRH_c16a
MPDREESPADAAGRVALERMFACLDEGRCFRLEAGAGAGKTYSLEKALRRLIDRRGRELLRQRQQVGCITYTNVAKDEIISRIHAHPAVRPETVHGFCWSILQDFQTTLRELVPSLPSWAERLEEAGGIGNRRVHYELGYPGVTDEQVTLRHEDVLTLMIQALALPKFRRVLTARYPVLLIDEYQDTDAAFVGALKTCFLDHGEGPLIGLFGDHWQKIYGEGCGLVEHATLEVIDKNANFRSVDAIVHVLNRMRPALPQMVSTPDAPGEARVFHTNNWPGVRRTGQGGGHWTGDTSPEAARAYFQHVKSRLTSEGWDFAVEKTKILMLSHSVLAREQGYASIPPIYGQYNDPWLKKDDPHIKFLSDHLEPACAAFEAQRYGEMFECFGASMPRIRRHQDKVAWSDTMNELIALRQTGSIGNVTDFIAAQQHMRLPAALVEREQKLAEVGAEPVEGESRRVTQLRKLRAVPYTELISLDKFIDGHTPFATKHGVKGAEFENVLVIVGRGWNKYNFAQTLEWMDSGPPANKQEFFENNRNLFYVACSRPKVRLALLFTQVLSTNAMEKITQWFGADNIVALPADPLQASAICE

SEQ ID NO: 66348 - protein, 764 aa, Pseudomonas sp. BRH_c35
MRIQHVEISNFRKLLSVRIDFANETTLLVGANNSGKSSAMLALRRFLVSKGSAFRLQDLTLCHFAKLDEIGKEWENPPANFEIPTAKDWADWLPSLDIWVSADQGEFHFIRDLIPSFAWRGGLVGMRFLLEPDDMNMLYTDYRKERARVAELEDALGKEDPPGSPLTLWPQSLHDYLNRRLGDKFKVRWYRLDPQQLKKPDKSTRMAQMQQLSPTSLPLESNPLNGLIRVHEINAQRGFGDYSDDNQGDNTKPSGARKLSEQLRSYYSRHLDPGDSPDISDLEALRAIEAAQSAFDTRLCSSFESAIREVEGLGYPGRNDPRIKVASRLAATDGMNHEAAVLFELDSIQGAPGAPPLHLPETANGLGYQNLISMIFRLMAFRDEWLRKTRAASAEVIDRVEPIHLVFIEEPEAHLHVQVQQVFVRHAYQVLCRDALLERYPNLKTQLLVSTHSSHVTHEVEYQNLRYFRRLPAGMYGIGVPVSTVSNLSNVFGDGTKTKEFVTRYLRAQHADIFFADAVILVEGSAERMMLPHFLRNKFPFLDRCYITTLDIGGSHAHRLRPLIDALGILTLVITDLDAGFNKAAKPVQRNADQITNNPTLRSWMKLMHLGNTVDELLELPANQKEHQIDDLYSVRIAYQTPISTHLPATGEAIQALPNTFEDSFVLSNAGHFADKTNGTGLMKAFVKVLNEAQTSEAVGEGFFNELREGKKAEFVLLVLGDKNFPNLEIPEYISEGLNWLESKLRSKQKELLVIPPEGAEVTP

SEQ ID NO: 66349 - protein, 615 aa, Pseudomonas sp. BRH_c35
MSEAAVADADALMQACLNLADPKSFFLYAGAGSGKTHSLVEAIRELKSRERERLTFEGRRIAVITYTNAACDEVLRRLEFDPLVEVSTIHAFAWRLIQGFDNEIREWLRVKLAQDIEKIEGELARSRGDNKTSRANRRKLQSKIRRLETLDEITKFIYSPTGDNRERQALNHDEVIKLTAAFAPERPLLDVLVDRYPVVLIDESQDTHAPVMEAFLKVQQLAQARFCLGLLGDTMQQIYGHGVTRLDKAIPDDWLKPEKIVNRRCPRRVVDLINVIRSAADTHQQTPKPDAIEGVVRMYCISQSQEQAPILEEGIAQSMAAITDDGEWATGPEGRKTLILEHKMAGRRMGFEKLFTPLYAIEHLQTGLLDGTLPALRVFSEGVLPILTAKDDHFLLLEAVRSRSPLLRKDAIQSTEDQSTHMQRVEDATHALLSLFEKNDPTLSEVATLLLQTQLLDVPDNLVGAMVLGAPSEAPDPEDTNAMTNYAYQLFLERPFSELAAFASYADGLSPYGTHQGVKGLEFPRVMVVINDEEAGGFLFSYDKLLGVKEPTKTDRDNERDGKDNALARTRRLLYVTCSRAEKSLAIVVYTPQPTLAKRNVVAAGWLQESEVEIL

SEQ ID NO: 66350 - protein, 565 aa, Vibrio cholerae; identical to SEQ ID NO: 62564

SEQ ID NO: 66351 - protein, 458 aa, Vibrio cholerae; identical to SEQ ID NO: 62565

SEQ ID NO: 66352 - protein, 703 aa, Klebsiella michiganensis
MYINKLAIRNYKNFRSSNFYFVKGSVNTIIGENASGKTNLFNAMRLILDDSLPMNSRILSNEDFYRGLSEPFGHWIIITLYFDDLSESEEEQVLANYTVNDGNDKSIKEGNYTFIYRPKFHIRQKLYELTLEDDNVEARSASFTEFVSNHIISKETYEAVAFVRTKVDLNNDEIYKQVVGDFDSYSFSNPNDDDATVLGVKKPPYFALGSEVACTYVKALRNVVADLKYYKTNPLYKLLTLKSKQIDDRKDIVEDVKEINGKISAIPEIERLSNKISASLLNTVGSTYSPKILVSSQLPEDFTELIQSLGLVVEDSLDYNGSGKIDDLSLGGANLIYLALKLYEYEEIRDSEEHITHFLLIEEPEAHIHNHIQKTLFDNFNFKNTQVFVSTHSTQISSVSKISSMNILSRQNGFTDVYHPSFGLTPKEISSVERYLDAIRSDLLFAKSVILVEGDAELILIPAMVKETLGISLDELGISLIKVDGTVFKHISNLFHEKRLKRKCAILTDLDSAYVKVADDIFNADFVESLVDAEDDGLRRKEELDKYIEGNEFITVYYAENTFETELVRYDENNNLFLEVMKTEYKKEAYFKKAESDVKSSDLRVRYKRVLKFAKKIGKGWLATEMVEHLSVNNRVPDYILQAIQFVLRDRNVEHIYQKMLDYNMSLMGVKAFDCINAEKDFSSKMIEYKKHINDSFVRLLEL

SEQ ID NO: 66353 - protein, 583 aa, Klebsiella michiganensis
MPYRNLTSEQMDAVKFNGNLLLTACPGSGKTKTLVSKLCFILENKELFCIGKKKIIALTYTNIAADTILERIMSFGISSESLWIGTIHSFCLNWIIKPNLDKIPRLCRGFSVIDEHEKEFLINELKEKHGLSANDKVFTNLDFNLGQFYSRGTKEHLIVKEYHNHLYEKKLIDFDLILNLTCRVLTKYNALCERLSLLLRCILVDEYQDTSLIQYEILRQIVLKKNTMITFIGDKEQAIYTGLGAVVKNRDELIDCFQLDNLTEMKLTGCFRSSQSIVDFYSKYKDEDYEINSLSDNKDFNSVIFKESEVDVSQLPIYVSGIIRTHLAQGVLPNEIAILCPGWFDVIKLSNDIVTLNPDIEIDGVMISPIPKNNENIWLALVKLFLIRRVPSNFNTRQKLLRDFLQELNVAAPYTESLSPKKILKIINKISLSVDYNCEIDVWLREVITRFCHSINLSISNDSYYYQEMELLINATLKRMLKYNMAYKANELHLFFNFRSGVKITTCHSTKGDEYEVVICTGLLNGKIPNWNDIINCSSEHQNYVARRLLYVVSSRAKKHLYMISERGYKTKRGYPYQTTPQL

SEQ ID NO: 66354 - protein, 597 aa, Acinetobacter baumannii; identical to SEQ ID NO: 62720

SEQ ID NO: 66355 - protein, 593 aa, Acinetobacter baumannii; identical to SEQ ID NO: 62631

SEQ ID NO: 66356 - protein, 712 aa, Acetobacter aceti NBRC 14818
MKLQKVTISNFRRLEKVTIDIEEKETLFVGPNNSGKTSATAIFRAFLGGREFKIHDFSVSCLTDFEQFSKTGNSADLPEIGLDLWFEIDPNTIAFGRVFTLLPKLSDFTQVGFRLRFGIDDAKKLREEYFAAYPAGEDGRHARSLSQYLATDTNLNRHAATRYASLEEVAADDGETTIVATPLEPDEGKRLVRQLVRAEFVDAQRNINDDDNSRSNRLSAAFASFYRKNLDQAAYAVEAHQVIDENNAALTRHYEKQFAPLIDLIKGLGVPSVNDRELKIISSLSPESALRGNTELLYVDPHRQHELPELYNGLGFKNLIYMAIQARHFHTQWLATPENRPLCLLIFIEEPEVHLHAQVQQSFIANIWSVIEDSAKAAGQSALMPQIIITTHSSHILDAINFEKVRYFQRCHLTGEAAKDGIRNASDVRSLRTFQPEADVIEGVAISPEDTLTFLKRYLRLTHCDLFFADAVILVEGAAEKLLLPSMIETSAARLRACYLTILEVGGAYAHRFEGLLDFLRIPYLVVTDLDSVEPTGYPSTCRADVANARTSNASLKKLCGKGTVAELVAMSHSDKISASKDRCIAFEYGVLVSEGGAQFEMIPRTLEEAIAYENFALLRTGTLSIGKVIPAPLPDAYTVIYERIGSKDFKKTDFAMDLLAAKSSWTVPTYIAEGLRWLELRLCGEPAPQPSQDGKAGTANTGGNTDAGTTA

SEQ ID NO: 66357 - protein, 613 aa, Acetobacter aceti NBRC 14818
MSGKVETQADADVRACIDGHRSFALVAGAGSGKTTSLIEALTRVRTREGQQLRQNGQRIACITFTKRAVEVIKARLGFDELYLVSTLHSFLWNQMSRFHDDIREALREARLPALIRKERDKDNGGNSRTAKDARAKALRYEQNLVDLNTVPVFSYADAKWGDYLAGRLGHDDIIEIAAYLFAHNTTFRRITGLRFPYIFVDEAQDTFPGIIAGLNLIGRSEGLPIVGYFGDPWQQIYDGSAGDFAPPVGGMPITKTENFRCSKSVIRLLNAFRTDVKQYAAGENANREGSVLFRLVQAEKPELPRNRYSEAQITRALARMDTAMAEWGWAERDDVIKLFLANQMIARRLGFAELNRLFNGPYASTRAEEAFEAGEYFLLKPFTDIIYPLIAAHTADDSRAIIDILRRNSPAFAVNGINAEATLKAMVETSVSLVEQLNVLWASGSVGELLRFCVAKEIIPTSDKLNEQLNRAPRDEDYVEELHGLDKGDWLADALFAMKPMEIVPYASFIAENTAYSTQHGVKGEEYAKVLIVYDDVEAAWNIYNFSKTLTPATAGQPTDGQRGRGQRLAYVSFSRALEDLRVLFFTTDPDGACQELIERKLVAAEQIEIVRA

SEQ ID NO: 66358 - protein, 716 aa, Acetobacter orleanensis JCM 7639
MSGGCMHISKLQLVNYRNFARATVKFEKGVNTIIGENGSGKTNLFRAIRLLLDDNLLRMAHRLDDRDFHRGLGEWRGHWIIISLEFTDVSQDETIQSLFLHGVGTITGATIDKATYNLIFRPKAAIRQRLSQLAAGDETALSELRREISLADYETVFTGKSSADFTDPAVYQALVGDFDAVTFPDELTPAEIGNIVPGMFSIAREIGFTFIQALRDVVAEFQNNRTNPLLTLLKGKSGEIDPAKFAPISGLVTDLNTAIEGLDDVRAIRTDIRDTITDAAGETYSPKSLSIKSDLSDEADRLFQSLKLFVGEAEAGYEGGIHELSLGGANLIYLTLKLLEFKYQKVKQTFANFLVVEEPEAHIHTHIQKTLFDRLNYDDTQIIYSTHSTYISEVSNVENINILGRDGGVCEVYQPAAGLDPKQIGNIQRYLDAVRSNLLFAKSVLLVEGDAEEILIPILIKQVFGLSLDELGISLINIRSTGFENVAILFHDQRIRKNCAIITDLDQAFIDLTTNPADTPAQKKAKDKATGSQTSGAARAGRLNTLCTGNSWLSTHLAHYTFEVDFIRAGNAAAVVSILGEVYSDGATIALAKTELESGDIVQYGTRVLTMAKHVGKGWFAIILGKAITPDVHIPDYILDALFMVHRPVSDEILASIIDHRLKVQLKTVGVLPAQVAAMRVYLDLFRSGDIDFPFVRTEMLTAFPGDRINTILARL

SEQ ID NO: 66359 - protein, 583 aa, Acetobacter orleanensis JCM 7639
MKAIEQPGSVFLTACPGSGKTRTLTYKIARELSLLTSDKERIVAITYTHRAADEIQERIEQLGVDTSQLWIGTIHSFCLEWILRPYAIYHPELKNGFRVINAHDTERAHEALCRTHGSKLSVFDCGHYFTPSGYVINCDDWKLGKVDALLQQYWQDLRTSRQVDFELILVYAYQLIRDVPSISILLGSIFATILVDEYQDTKEIQYAILGAILKASNGKAKAFIVGDPNQAIYGSLGGYAITPAEFSKLSGVTFKELDLSKNYRSSGRIVGYFENFNQLTSKITADGEFKDFASLISFDSSTDRNALEAEIVRLIRYNIETMGISPSEVCIVGPQWPPLASMTRQLVAALPDYSFSGPGMVPFARDIDNFWYKLSRIILTEASPQLYVRRSRWAGEVIAGLDLAGVNTSAITRKSLLRASNGITSTKTDGLEYLCECFDALFAALGIDRATSPMLVEHYDAFVEGSQLRIDKLTATGGTAIAEIAMFRKVFAEKTGITVSTIHGVKGAEYEAVIAFGLLEGMVPHFKEADKIAAANKLLYVICSRAKKNLHLISEVGRRRGQNNVYQPTDILLACSFGYDQIP

SEQ ID NO: 66360 - protein, 642 aa, Komagataeibacter intermedius TF2
MSLQEQVTAFVGGNGAGKTTLFQALSRLFGVMRTDRTVTKKDFHIAQNEEELPDGRCLEIECMLGFPELDDEEDEDASSVPDFFNQMAASEPDGPLKVRIRLVARWMEDGTLDGTVEEDIRWITTLDDEFDWDACPKVSAVDRASIQVIYVPALRNATDRVTELLKGRLWRAALWSTDLGARATEGAELIQKQFEQEAPADFIIKRLTHRWQQVYEGDTDTTPNLRLIESRIEELVRRAEFVFHPDEAGRNRVLADLSDGQRSLFHIALTAATLETEQAALTLAATESPFDREKLRRTHLTLLAIEEPENSLSPFFLSRIMTQAREIGEMDTAQALISSHSASILSRIEADEVRYFRLDRQTRCASVKQLTLPEGDTEASTYVRLAVRSYPELYFARFVILAEGDSEQIVLPRLAEVRGVQLDPSFVPIVPLGGRYVSHFWRLFTDLGIPYATLLDFDLGRAHGGANMIRSAFAALKQIGRDFTANPLIVDGTIDLDDLDDLVDEDVLDVWEDNNWLQALRHEAVFFSDPIDLDFAMLEAFPAAYQHPNPGGRGPRTTEEAIAEKKTVVLKTNGKPGIYKGDQWDDSFAWYPYLFLSRSKPETHLAALSRITRQDLARGAPPELRALIDHVRDVLFPKPDEV

SEQ ID NO: 66361 - protein, 620 aa, Komagataeibacter intermedius TF2
MPVAPEDWRPQGVDDLEPGAWDALREATHSVCVTAGAGAGKTEFLAQKAAYLLQTGLCPEPKRILAISFKRDAAQNLAARVRQRCPANQARRFHSMTFDAFTKHMLDHFRLAIPNAYRPPIDYSIAFPTRRDFDLFLKRHGRPDVSSDRFEQAIARTPLPFEKTVEKLCTRELLRAYWDDQYAMPDGALVSFAMINRLVDYMLRSNSRIKRALRLTYPFVFLDEFQDTTYAQYSLVNTAFRGSRSIFTAVGDDKQRIMGWAGAMNNAFDEFVDGFNAVRHALLRNWRSHEALVGIQQVIARQIDPDVEEVEARGQLEVDGATAAIWRFDNREQETQMIARWIRREVDEGRVAPHNVAILVRMRANSVEDELAPVLRDHGLTLRNLARNVGEIAIQDLLVEPLTEVILPLLRLGASARAPEAWSAAQDRLQALANVSSDDETVQERLQREIGEFSRNLRQIMRDEPLDTAVANRLFAQTLDFVGVERLRQAYPEYRRDADFQRVHNGFRILLRDCVENAVNWNDVLDRFEGKNQIPLMTIHKSKGLEFHTVIFFGLDAQTWWSLSPERNEELNSFFVAFTRAMQRAFFACCSERGKPIGWLEKLLLPAGVKQVDGVDIITP

SEQ ID NO: 66362 - protein, 706 aa, Enterobacter cloacae
MYINKLAIRNYKNFRSSNFCFVKNSVNTIIGENASGKTNLFNAMRLILDDSLPMNSRVLSGEDFYRGLNDPFGHWIIITMYFDDLSESEEEQVIANYTINNGNEEALKEGNYTFIYRPRFHIRQKLYELTVDNKDLESRLEAFTELKSTCIISKETYEAVAFVRTKVDFNNDEVYKQVVGDFENYIFSNPNEDDATVIGVKKPPYFALGSEVACTYVKALRNVVADLKYYKTNPLYKLLTLKSKQIDDRKDISENVKNINEQISAIPEIARLSNKISTSLLNTVGSTYSPKILVSSQLPEDFTELIQSLGLVVEDSLDYDGSGRIDDLSLGGANLIYLALKLYEYEEIRDAEEHITHFLLIEEPEAHIHNHIQKTLFDNFNFQNTQVFVSTHSTQISSVSKISSMNILARQRGYTDIYQPSNGLQPKEISSIERYLDAIRSDVLFAKSVILVEGDAELIIIPELIKVTLGISLDELGISLIKLDGTVFKHISNLFHSNRLKRYCAILTDKDLAYVQEPDELFDADFVESLKNAETDGLRRERELAEYVEGNQFVSVFYAENTFETELVRYDENSDLFNSVIRTTYKRSGDIERVVAGINSDDLRVRFRTALFFANKIGKGWLATEMVEYLHNENRVPDYILKAIHFALKDRELNAVLTKMLAYNMSLMGTHWDDVCNKINSEPDFDKKMQEYRKHFNDSFSRFWEL

SEQ ID NO: 66363 - protein, 583 aa, Enterobacter cloacae
MPYRNLTSEQLDAVKFDGNLLLTACPGSGKTKTLVSKLCFILENKELFDIGKKKIVALTYTNVAADTILERIISYGINSDSLWIGTIHSFCLNWIIKPNIDRIPRLSKGFNVIDEYEKEFILNDLRERYNLSPYDKIDTLLDLSFTPVYSRNTAEYSVVKAYHSYLYENRLIDFDLILNLTCNLLLKNDVLCERLSLIMRYILVDEYQDTSHIQYEILRLIVSKRNSLVTFIGDKEQAIYTGLGAVVKNREELFDYFNLEELEEMRLTGCFRSSQSIIDFYSKYKDDAYYINSLSELKTFPSVILKENSVDITQLSVYVSGIIRTHLEQGISPGEIAVLCPSWFDVIKLSNEIISLNSDLDIDGIMVSPIPKNNENLWLNLVKLALIEKNPSNYLVRKKLLRDLLKELNDLESYTKFLSPKQIIKEINKIEFALDYNCEIDIWIKNLITNFCSSLGLDVNNQSYAYKEMICLIDATKKRMAKYSMNYRANDLHSFFNFKSGVKITTCHSTKGDEYDVIICTGLLNGKIPNWNDIIDCSPAHQNYVARRLLYVIGSRAKKHLYLISESGHKTQKGYPYQVTPQL

SEQ ID NO: 66364 - protein, 712 aa, Enterobacter cloacae; identical to SEQ ID NO: 64890

SEQ ID NO: 66365 - protein, 594 aa, Enterobacter cloacae; identical to SEQ ID NO: 64891

SEQ ID NO: 66366 - protein, 566 aa, Enterobacter cloacae; identical to SEQ ID NO: 66008

SEQ ID NO: 66367 - protein, 541 aa, Enterobacter cloacae; identical to SEQ ID NO: 66009

SEQ ID NO: 66368 - protein, 706 aa, Enterobacter cloacae; identical to SEQ ID NO: 66362

SEQ ID NO: 66369 - protein, 583 aa, Enterobacter cloacae; identical to SEQ ID NO: 66363

SEQ ID NO: 66370 - protein, 712 aa, Enterobacter cloacae; identical to SEQ ID NO: 64890

SEQ ID NO: 66371 - protein, 594 aa, Enterobacter cloacae; identical to SEQ ID NO: 64891

SEQ ID NO: 66372 - protein, 577 aa, Agrobacterium tumefaciens; identical to SEQ ID NO: 62728

SEQ ID NO: 66373 - protein, 580 aa, Agrobacterium tumefaciens; identical to SEQ ID NO: 65623

SEQ ID NO: 66374 - protein, 594 aa, Achromobacter xylosoxidans NH44784-1996; identical to SEQ ID NO: 62698

SEQ ID NO: 66375 - protein, 604 aa, Achromobacter xylosoxidans NH44784-1996; identical to SEQ ID NO: 64631

SEQ ID NO: 66376 - protein, 678 aa, Achromobacter xylosoxidans NH44784-1996
MKLSEIAITNFRLLQDARMRLDTADITTILVGPNNSGKTSAIEVMLTFLQRPIKHLSINDFSLGCRHAFKSFEQHVLTSPAAPAGGEATADPAPVAPPLPALPAMSLRLKFDYDDTGPDLAIAGELLMDLDDTSNSVVLEIRFAAVDPELLAQAYLKDRDHDQSLVDYLAFTLHDHYKMDQFKLSPDGSQAERLPDRGILQRLIRIDVVSAQRHIDDREEGSKATRLSTLLHAHYERRYKVDSPNDFKALEKTLRDQSTALGPQYVKAFDGLMKGLAKFGHPESPKLTVRAELSADGLFKDTTRVYYAAVSATSTPGEGAVAAIDQAFELPERYNGLGFKNLIYIVLCLKSFREDVESDPEHRPRVHLVVVEEPEVHMHPQMQAVFVQKVSEFLKPSAGETAVQLLLTTHSSHMAANCGFAPIRYFRRNKGSVEIKDLLSFESSATTAPEKAAMEFLRKYLTTTRCDMFFADKLVFIEGQVERMLLPRLITALDVELRDKLTSTYVCTVEVGGAYAHLFRRLIEFLQLPALIITDLDSIDGTSKKKASVANGHASSNATLSQWLPGSSDLPTLMAAGEAQKTSGRVRVAYQVPEAAGQPCARSFEEAFVYANAAWLITNKGKLLGTGGMFTHADAAALVADAYNVSLPKVDFALDLLANEGWVTPMYIREGLEWLAKQ

SEQ ID NO: 66377 - protein, 585 aa, Achromobacter xylosoxidans NH44784-1996
MVGETIAAGVADKTADERIAECLVEGRSFVLDAGAGAGKTYSLVEGLKKLCAPPIADRLRRDGQQIACITYTNVAKDQVIERIQGNPLVRVSTIHDFLWSTLQPHQQALRQALLELNAALPAGSTRRVNPAELEARVAARFEVKYSDRGSKFLEGRIHHDDLLSIARIAYTRYDKLSRIVASRYPFIFIDEYQDTSEAVVDVLLRRMLPLVGDSLVLGFFGDKMQNIYHQGEHKGIGELPAKLAAPLEVIVKRENRRCSLRVMDVLNKIRTDITQIPGNNNPEGDVAYIRVATGADEAGFQRARDLLANTLNWDLTGPETRELYLTHRLIARKAGFADLLQAFTDRGAFAKDALTDGSDRRISFFLDKVEPLALAWEKGQIGETLGRLHSAGHRLASRAAKSGVREALRTLMAKRAAGTVREVLETILDRQLFPLTDDLALRLANTQPILTADMDDAAKEREQLDATLYAAFFELPYQQVAAFARFYMTSTPFSTKHGVKGDEFDTVLVVLDDAGAAWNFYSFDKYLSGVDETANPGRAKRSRNVFYVCCSRARKRLAVIDLAGASAAKAERMRALFGADRCHEV

SEQ ID NO: 66378 - protein, 744 aa, Vibrio neptunius
MKINFVQIQNFRKLKNCRVKLSGNETLLVGANNSGKTSATDALICFLDKSRKITVTDFTLSNWSVLNQYAESWLSTDPKELKGKDISDWIPYCPSLDVWLDAGVEDVHRVAHLIPTLKWRGEPLGIRLTYEPKDIEKLRENFLQDFEAIDDLRTDETKLSFWPRDLKDYLNRKLSDSFVIRAYILDPKKISNTQDLPKDATPLEKDPFKGLFKVDTIEAQRGFTDPNSEQVNAGSTLSSQLHEYYIRHLNPTDLPDEEDLPALKAIEEAQTEFDKKLDKSFKGALGEIQALGYPGFSDPEIKLSSRVNPIDGLEHDAAVIFDIQKQGFDNHTYSLPEKYNGLGYKNLIHIVFKLITFRDRWQRIGKAQKRRTEDDVAIEPIHLVLVEEPEAHLHAQVQQVFIRKAYEVLRKGISKQFTTQMVLSTHSSYIAHEAGFEKLRYFKRKAAVSISDVPEAEVVDLSSVFGSGKKKANEDEQVLNTQKFVSRYLKTTHCDFFFANGIILVEGTAERMLLPHFINYNYPELRSSYLSILEVGGAHAQRLKPLIDTLALPTLVITDTDAKGLDGKKVQPERNNDYKYGSDTLREWFELKDLSLDDVLDLSNDKKVKGNVRAAYQYGFKVKYHTDAEEEEAIPYTFEDAIALSNIQLFRDLTSSTGMVKKMHEATMKDSLEECAATLYRALDSKKAKMALDLLYDVDPKKLKVPTYIDEGLQWLENELSNTYQEFVFAEPEEVEEPVPLEDL

SEQ ID NO: 66379 - protein, 616 aa, Vibrio neptunius
MVDTHSLKEVDKEIYQYLNIDDPTSFLLFAGAGSGKTRTLVNVLQAVRDNGLHRFIKAGQRIAVITYTNAACEEIKHRLQYDPIFAVSTIHSFVWELIKPFTSDIKTWLDADLKASIFELQEKIDKARDKSAKTAVKNARSRDSKLKRLEKLDIVQNFTYSPTSTRLTTGALTHAEVIKIATEFLTEQPLFQKVLVNKFPILLIDESQDTNKGLMDAFIQTQQNHSGCFSLGLFGDLMQRIYSGGKEDLATSLPENWKTPEKKTNFRSPKRVIRLINKIRHEDDGKQQTEKPDAEEGIVRLFIAQTPNENKSEVEAHIREQMRAITDDENWKDASQVKTLTLEHAMAARRGKFDEFFTPLSAEDSLRDSLLNGTSSTFKFCTHQVLPLAHAIRKQNDFEVMRIIKKYSHLIGGENKEFLADPIALLASVEDAVSKVRTLLENDISLRELLLLIEKHQLLEIPDILNDLLVEGIADLAEDVESPSNQKAWDTALDARLSHVENYAKYVAGELGFTTHQGVKGLEFDRVLAVIDDKDSKGFLFKYEKFFGAENLSATDKKNEENGIDSVLSRTRRLFYVICSRAEKSLAVVAYSQDPLAVKNRAIDAEWFDKDEIILI

SEQ ID NO: 66380 - protein, 584 aa, Marinomonas sp. S3726
MHISRVKIENFRNFQNFEIITNRNMVVVGENKVGKSNFLFALRLILDPSLSELERFLNVDDFWDGLGVNKIGNTIKVSIDIDNINSSETMLSVLADGLVNVATHTARITYEFKPRGGVENLTINDYEYITYLGNNTENLIPRTFRRCLQMELFHALRDCERELKNSNRSPIRAFLDDVSKNLTEQQKVSIAAGFEQTQGALDGVPSIDNIAVNINNMLETIVGTNHVTQVSLKLAPQDINKLVRSLQLLIDAGLRTVSQASTGSSNILFLTLKLLKLQHSIQQGEQEFTFLAIEEPEAHLHPHIQRLLFDYFYNSEANLNTILTTHSPHIASSAPLQSLIVFKEHTTGAQRSTAGYSLANSTLSPNDIEDMSRYLTVTKGEMLFARGVILVEGDAEEFLIPELANKLGYELDKKGISICSVAGTNFAPYVKFLNSIGTPFTIITDRDPLNLPVPLGITRIDKLLELILPTYREGVNPEATIISIGQAQGIFTNIQTLETELISSPVLKTIICDILLEEHGERQRVGPIIESWKNNQTTVDMPALLRYIQEIGKGRFAKRLSHRLPDGQCPQYIISSFEYITNAT

SEQ ID NO: 66381 - protein, 609 aa, Marinomonas sp. S3726
MQRNVASLYKTEALQLNELGQKAAYDSNTNCAVIAGPGSGKTKTLVLKVAKILDEEINDYQKVACITYSRQCCRELQQRFKKIGISSNENLYVGTVHSFCLSQIVSPLAHLIESELPVSYSIANEKQRNDSFESAKAYIGDAAKYCSFATMTNYRMSYLERDESFDSNDILYANLVTNYEQFLRSAGLVDFDDLILISRKMIKDYAWIRDILKAKFPIIVIDEYQDLGKPLHEIVLLLVDHGVKVIAVGDVDQSIYGFTGAHPELLLSLSERSDFDKVEMKLNYRSAQNIVNLSDGFVGTNKGVVAHNQNRVATIDYHLCPNGLEEQVEQALEKALDCVDVLEERTLSDVAILYPDAKIGDIVAQKASEKGLFYNRVDNNAPYRKNPMTNFIEDCASWITFDWKEQGKSICLNDLIKSYTLLTRNFIDDIDSATLNFVKFLWSSKNISHLITPGAFVCKMISDHFSVFIGEPRTKDDFNEVLKMQSSLKDNGALHNINLQMLGDNRNQSDKLNLITYHSSKGCEYDVVIAIGLDNGVFPRLVYNPREKAWYYPEDKELQEKRRLFFVALTRAKYDVHFFKSEHFYTRSRYKMNYGQSIFLDELDKKLNS

SEQ ID NO: 66382 - protein, 662 aa, Pseudoalteromonas sp. S2292; identical to SEQ ID NO: 63772

SEQ ID NO: 66383 - protein, 675 aa, Pseudoalteromonas sp. S2292; identical to SEQ ID NO: 65329

SEQ ID NO: 66384 - protein, 609 aa, Flavobacterium sp. 316
MYLQNIKLWNFRKFGSDGEFNIEKPNLNLNFSKGLNVIIGENDSGKTAIIDAIKLALKTHSYDYIRVEDKDFFSNSNRFRIELIFSGLIPDEAKNFTEWLGWNGSGDDTEPYLKLNYDVKRQEKKILPSDLKAGADEDGYQLTAEAREYLKATYLKPLRDAENELIAKRNSRLSQILLGDSAFKGKETDHELVIIFENLSREIDKYFKGQFEISTANDEGEEVTISPQEGKVIKDKIDGYIKGFYSNEYEAEFKASSNDIKSILEKLTLFLKDELNPGLGTLNRLFMAAELLHLNKSNWSGLRLGLVEELEAHLHPQAQMQVIESLQKQNAIQLILTTHSPNLASKLKLENLIICNNGNAFPMGSDYTKLDPDDYKFLEKFLDTTKANLFFAKGIILVEGWAEEILIPSISKNIGINLTEKGISIVNVGSLAYNRYANIFLRKEDPLMDIPIAILTDSDIREYEKVQTGGESVYQKRDLATIKTETDQKIADLEAKSENNVQYFIAPNWTLEYSLFKSNSLTNTFKINAKSIHTGTDWDTDFEKSLAEKLINKGLKKTEIAYKIANAIDEDLKNYEEKKIDVKTINIVTDDGADSINYLVKAINYVTGN

SEQ ID NO: 66385 - protein, 659 aa, Flavobacterium sp. 316
MLQEINITDEDILYSEKILLPEGKTFDDERKEFIRNFNTLDLQAVPGSGKTTTLLAKLLILENKLPFSDGAGVLVLSHTNAAIDEIKHKIQKHCPKLFSYPNFIGTIQSFVDEFLAIPFYSSKFKKKPIRIDSEIFDEIASSYFHNLPNSGARNWLYQQHDPENFFKNLRFDVNLNLLKGMNGEVCLRRQNDSPTYKTFTTIKTNILKSGFLNYDDAYFLAERYLIQFPEIKNILQKRFSYVFVDEMQDMDTHQYDLLEKLFFDEGNSISNFQRIGDKNQAIYNSVKVNEIWNDRQEILRLSGSQRLSKVIADIVCGFALHTDVDFEIVGLNECGIKPHILVFENSSIKDIIPHFTQLVKNFKEDGSLIDFDKYPTKVVAWNTEWKTQTEKDNIAKLRLVDYYNTFKKNKQKPKQDYNCLKSYLLFYDKNKLTLEPIRKNILNAFLKILRLENINNEDGRTFTKKKLIDFIKQKDFAFHEQFSLNIYNWSIVIIKGKINEIWDEIKGYIPVFLSVFPDAQISSSSNFISTDVEDILIENIEEPETTNIYKEGELEIEVTSVHAVKGQTHCATLYLESFFDRGYGNYESERLRNQFLGTQTISQTLAFVPNSHDKIIQSAKMAYVGFSRPTNFLCVAVHKDRFNSRLSDIDRNKWEVIEI

SEQ ID NO: 66386 - protein, 615 aa, Flavobacterium sp. 316
MYISELKLWNFRKYGNASNDLDLEAPSLTVPFEKGMNILIGENDSGKTAIIDAIKLVLKTHAYEWIKIEKSDFNSITEKLRIEIHFKGITDDEAKHFIEWLGWDDEKKPKLILIYQAEYRDNRIIPSDVKAGMDGTGFLLNAEAREYLKCTYLKALRDADSELMAKKNSRLSQILQEHKLFKKRKGDNSKHELEHIFEDANGLIKNYFNNDKEKDDGQKSNKKQIAEPINTFLKDFIDDNYISKFDITEAEIKSILEKISLGIDGKDNLGLGTMNRLFMAAELLHLKKDNYDGLKLCMIEELEAHLHPQAQMKIIETLDRESKNGIQFILTTHSPNIASKVDLKSLIICKNNNVFPLGEDYTYLGEKTKESKYENSYKYLKRFLDVTKSNLFFAKGVILVEGWSEELLIPEIAKKLDCDLTKKEISIVNVGSTAYLDFAKVFLRKDGNNELNIPVSIITDLDEREYEREAITEVGKQKKISGKKQYTFIKQNISNHDKLVKDKENQILDKKSDYVKPFVSKKWTFEWCLLKSYILGDSFKEVLKTVHSDTFNNIDSEDGYEKGLAKLLLSKSLNKTELAYQLSEKIKEFNSFDFNGDDTFYYVVDAIKHACKDGN

SEQ ID NO: 66387 - protein, 683 aa, Flavobacterium sp. 316
MEIEKYIPQAEKIFLGEGTFKDDRNERIDFIKNLKTCDLLAVPGSGKTTALIAKLYCIAQNMPFEDGSGILVLAHTNNAVDEIEKKLKRHCPQLFEYPNFVGTIQSFVNKFLAIPNYISHFKQRPITFDVKRYEHQINKFYLNIKNQNLKNWLDKKQNPIKFLFNLRFDNDYNLINGLNSNKEDFELKDQSKPTYKGLKSFKENLIKNGYLHFDDGYFLANKYLLKFETIKLILQKRFKYVFIDEMQDLEEYQINIIDDIFFSKDSKTVIQRIGDKNQSIYNIVKENCDWKTRQEYDSKYTDLSFQNSLRLNSNVANLVDKLVLERPKNYKVVGAFNGSELNPHLIVINNKTTGIQIQNRFIELIKKYNLHHCDKNVKNGFKIISWNTVWNNDEENIDKKTNLKKLRLIDFYENYEKESINRKDDHSNLKDYLYHYDKEKKTLEAIRKSILNSFTRILDLEEIKDENGRRYRKSTLMQFIKNQSEEYYNDFKAKLYSWCFRIVVHQQNEKVYKEIVSFVKSNDFIGLNWHNIENYQPKNISKSNQFIISSDFQLKKEPKEGLKKKEEIQIDLASVHAVKGQTHCATMYIETAYRLPIYETQKIIISKGKDKSNPLLLEDHKCSGTNGKQALKMMYVGFSRPTHLLCFVVLEENVKDYLDSLCHTKGGSWEIDKKLIQVKALNL

SEQ ID NO: 66388 - protein, 642 aa, Oleispira antarctica RB-8
MYLSNLKVTGFRCFDEAFDISFGDGLNVIVGENGAGKTAIISAIRQLFQDSESGRYSISSDDFFCAFQSGAVAATDFVIKADFEGLKLKEKVALLPWTGGTDRATLNLQAENKEKRGRYKKTMWGGTAKGSQFDPELVELIQCIYLPPLRDAESKLTNGRQSRLSKLLKAINRNELKECRKNEEAHPLEEKFKSFNETLATDEQLSIKKANALISEHLGKAIGHHFGQSTRIQFAESDFTKIVESLTLLFFPDMSEQDQGLFRSLSQNSLGYNNLLYIASILAELTLDDIDEEEGLLFKLLLIEEPEAHLHPQLQIRLLDHLKSVANDDNNVQVVVTSHSTVLASSVDIDSIIHLSRSTPPIATPLRLCDVLDTSKQFINRWLDVTKSNLLFASGVILVEGIAEQMLIPVLAKEILKNQVIGKRSLEDQGISTINLNGIYFKHFMRFYCNLTGLEDEDDQDGINIPIRCSGITDLDPPKKVSVTDGEGNEVLTPLKPFDGNIPDGENHALRLVETISASNNTRLFVSKYKTLEYDLAMEGNNAAVMAEILASLWPKPKTGSSLVFDELTRIASIDWLEKSSEEKSHAAYEILKRVDDANVGKGVFAQVLTDKIANGDCLIKIPEYIQKAIFWASSIECEAVE

SEQ ID NO: 66389 - protein, 586 aa, Oleispira antarctica RB-8
MTVFTDEQQTYIQSSINEHVYLEACPGSGKTEVVAAKVAREADGWDKYPGGMAILSFANSSTEELKRRIFKYLPSSSSLFPHFLGTIDSFIYKNIVNPLASQFTDYRDADGDCSIRIVEASSIIGFRTTWGIAGRGNVYAHHYSIDIGNGGVVFNTGDNITDRALNAVELEDWQQKDLIDTKERMLKGGYATYKDVESLALKALCQKDFEHYLKLLALKYPLIIIDECQDLSAEQLMILKQLSGGGVRLHFIGDLHQSIYGFRDVDPNAVKQFTLENSFTNVELTRNFRSCQKIINLCGTLIGRHNIVGQLTRLEPSCYLAQYETSPTELVSIFEELSADYNNAVIVARGHSVLQKFRTSATNLKPIHKLALAIKLFNYDDMEAIDESITLYSEFIRYYISESVKPNSFNCPQIIESNLTWRRFLFLSLEYISDETLRDMDVNWSSWTKKAKENIRSLPEESFVFDEVKAVIKVMETINLRAPSGEASDLVCDSLGQVMSVKVGRRKTTIHGAKGETHDVTMLVSAASASGQPGSHWKSWLKDENSEAARFAYVASSRPKHRLIWGVKKLKLVERKKFEELGFHII

SEQ ID NO: 66390 - protein, 634 aa, Pseudomonas fluorescens
MYLRALDINGFKCFGELFTIEFHDGLNVLVGENGAGKTGIVSAIRQLFNDSESGKRIISERDFYRGFEAGAVASEQIRIQATFSGLDEKDVIAFDDWCGNHDEAKLTFTALNQESRGRFKHHTYGGHEYTKAFETETLDYIHCVYLPPLRDAETKLREGRQSRLARLLKALCRKDLETARKAGKPHPLEQHVGDFNRELSESDEFAIKLANQRIGDNLKAALGLNLSQGTMIQFSEVSFSRIVEGLRLLYFPDLTKADATQFRSLEENSLGYNNLLYIASILAELILEADEDRGEETYLRLLLIEEPEAHLHPQLQLRLLRHLKTVAEERGIQVIITTHSTVISAAVSIDHIIHLSNEGKPTAVPLRNAGLPEQSRRFVDRWLDVTKSNLLFSKGAILVEGIAEAIVVPELARIVLRPYGKGKDCLDDYGVSVINLGGIYFKHFMQLFCDVNGEQPGENVPVRCAGLTDNDPPKSIETIVDAEGKVVAVPFRPHADDHRAGNNPALALMDTINQSQFARLFAGTYKTFEYDIALEGENLKPMLTVAARLWPVPDGLVVRGLEKNAKLDFKAMSSADKAVLAGALLDRLDSDEIGKGMYAQGFADALEKLEGDFVVPEYIHLAILWACGLEQRVP

SEQ ID NO: 66391 - protein, 598 aa, Pseudomonas fluorescens
MAAIAEGQEPVIAGNKRFTREQQDYIAAPLDRHVYLKACPGSGKTEVVAAMVSKTVREWSRVPSGIAVLTFSNSATEELRGRVHKYLGEPIGLPHCISTFDSFVLTRLVANIASELTGYPGKDGDFRIRILEKTADIYRTRNSICDRWISACKYNYDVETARFVFSTGERGLDNQLNAAAINKDTLEDLVGTKRRLWRGGFGTFGDIDMLALMALREKKFKAYFSRVARRFPLVIVDECQDLSAEQLRIVEKLSEFGVTFHFVGDLNQSIYGFRKSNPANVNVLMEKLKVQPYELSANWRSGQAIVDLCSNILGAGRVTGNPEIASVQPKILEYEHCPSELLPAIRAITQGYTKVVLVARGHTTLQRLRNGATFEGVELLAVACIGAGSGNLKDIKERLRTFAKWLAGKLELQVTKAGPYCPVAMESKLAWRKFIHESLKFMVSNGAGNPDQSWSAWVRAAKLALRQLPDQAFIPAEIREDLEGLRGLNLVARKGQGNKPVSVRLVSQEIQDGQSDTLRYETIHQVKGETHDVTVVVSSLKSGKYHSHWQDWLRDRESEATRFAYVASSRPQHMLIWAVKKLKAEDRPVLAQLGFELP

SEQ ID NO: 66392 - protein, 764 aa, Pseudomonas fluorescens
MRIQHVEISNFRKLLSVRIDFANETTLLVGANNSGKSSAMLALRRFLVSKASAFRLQDLTLCHLAKLDEIGKEWENPPANFEIPTAKDWADWLPSLDIWVSADQGEFHFIRDLIPSFAWRGGLVGMRFLLEPDDMNTLYTDYRKERARVAELEDALGREDPPGSPLTLWPQSLHDYLNRRLGDKFKVRWYRLDPQQLRKPDKSTRMAQRQQLSLTALPLESNPLSGLIRVHEINAQRGFGDHSDDNQGDNTRPSGARKLSEQLRSYYSRHLDPGDSPDISDLEALRAIEAAQSAFDTKLGSSFEPAIREVEGLGYPGRNDPRIKVASRLATTDGMNHEAAVLFELDSIQGAPGAPPLHLPETANGLGYQNLISMIFRLMGFRDEWLRKTRAANTEVIDRVEPIHLVLIEEPEAHLHVQVQQVFVRHAYQVLCRDALLERYPNLKTQLLVSTHSSHVTHEVEYQNLRYFRRLPAGMYGIGVPVSTVSNLSNVFGEGTKTKEFVTRYLRAQHADIFFADAVILVEGSAERMMLPHFLRNKFPFLDRCYITTLDIGGSHAHRLRPLIDALGILTLVITDLDAGLNKAAKPVQRNADQITNNPTLRSWMKLMQLGSTVDELLELPADQKEHQIDDLYSVRIAYQTPISTHLPATGEAIQALPNTFEDSFVLSNAGHFAEKAGSTGLMKAFVKVLNESQSSEAVGEGFFNELREGKKAEFVLLVLGDKNFSNLEIPVYISEGLNWLESKLRSKQKELLVIPPEGAEVTP

SEQ ID NO: 66393 - protein, 615 aa, Pseudomonas fluorescens
MSEAAVADADTIMQACLNLADPKSFFLYAGAGSGKTHSLVEAIRELKSRERERLTFEGRRIAVITYTNAACDEILRRLEFDPLVEVSTIHAFAWRLIQGFDNEIREWLRIKLAQDIEKIEGELARSKGDNKTSRANRRKLQSKTRRLDTLDEITKFIYSPTGDNRERQALNHDEVIKLTAAFAPERPLLDVLVDRYPVVLIDESQDTHAPVMEAFLKVQQSAQTRFCLGLLGDTMQQIYGHGVTRLDKAIPGDWQKPEKVVNRRCPRRVVDLINVIRSTADTHQQTPKPDAIEGVVRMYCISQSQEQAPNLEERIAHSMAAITDDGEWAIGPEGRKTLILEHKMAGRRMGFEKLFTPLYAVEHLQTGLLDGTLPALRIFSEGVLPILTAKNDHFLLLEAVRSRSPLFSKDVLQSTGDQLAHMQRVKDATHALLSLFERSDPTLCEVATLLLQTQLLDVPDNLIGAMVLGAPGEAPDPEDTNAMTNYAYQLFLERPFSELAAFASYADGLSPYGTHQGVKGLEFPRVMVVINDEEAGGFLFSYDKLLGVKEPTKTDRDNERDGKDNALARTRRLLYVTCSRAEKSLAIVVYTPQPTLAKRNVVAAGWLQESEVEIL

SEQ ID NO: 66394 - protein, 722 aa, Clostridium sp. IBUN62F
MVYLKYLQIVNYKNLRNTKFEFNEGVNAIIGENDSGKSNAMTALRILLDDSYYYNTKRLKESDFSESLGDWKGHWIILSAIFNNITDKDKYEEVCNELIPEEENADFLKSYIKCSDKDIGVITLYIRPQKSIRKKLSEVTDIDEFNTIRNEIKISDYEFYYTSRAQTDFIDCEVYKNIVGDIEHGKYIDLDNDDESILGNKLNITDVQDHISVIFIDALRDVVHELNKPSNPIKRILETIESKITEEERNEIKDKVIALNKSISDVEQVGVIGEKINDKLIDMIGMVYSPEIELQSEMKNDLSTIAKYLSMKPANENDIELLGLGHLNMIYMALKIVEYEVNKTRELINIMIIEEPEAHIHTHIQRALFDKLNITKNYTQILMTTHSTHISEASKINNVNIIKCNKDISVVMNPNSGLDKFGEEKLKLKSVSLSKCIERYLDAKRSTLLFSKGVLLVEGDGEEILIPNMVKKAFGISLDELGIGLINVGSTAFEYIASIFSDDRINRYCSIITDRDKQIVDKASSHYSSYAQILGESRHEKLTNLFDDNKWVEGFYAESTLEVEFIKLDDNIDYVKNIIEQVYTSQDTISNHKLALDNDDIGKKAETILILASHIGKGWYATLLSEKIDNLVNIPEYILDAIAFASQEVIDINTIIKIIDYTLSFYDTDEAKKIKKSIEVDKDITKRIDIIKKFEINFKDDIVNKLLIKVKQYVSWCDNCDK

SEQ ID NO: 66395 - protein, 577 aa, Clostridium sp. IBUN62F
MFLNKLNEKQRDVCLSDENIILTACPGSGKTRTLTYRIAYLCLKNRPSRRLNIAITYTNRAADEIKKRLQKVDDSIENAWAGTIHQFCLEYIIKPYSMYFSRLSHGFHIIDEYVQREYENEIVEELGIRNEIGFNDPLNYKEVKEKYIKKLYDNKEIDFNDILDISYELLNKNKFIRENIANIIRSIHVDEYQDTNDLQYKILGEIVHENKSINILFVGDLDQAIYSGIGGIAKDKIEIEKEFEVKFIEKKLDGCYRSSQRVINYYKKFQQNEQEIFSFAENKDTDGIIYVNKSIHKSELISRIAYIVKKQLKEGTKENEICIIAPQWYLLYPLSKELRKLLPDVNFDAPDITPIKYDPLSLFYNISVLFFTKAGRDVFIRKRCASTVMNILSDEYRIDISRYIDNLLLLKYINSFTSNSSNGIEYLKEGIEYLFFHLHIDINKELALKKSYNDFFDRIDNRIERYNLSCNIKDIAKSFMVKKGVVINTFHGVKGEEYKTVIAFGLLHGYIPHWNIIFNTSRDNCEKETKKLLYVICSRAKENIFLFAEKGRITQRGIEYEMTHELQEYKYNYDKIY

SEQ ID NO: 66396 - protein, 722 aa, Clostridium sp. IBUN22A; identical to SEQ ID NO: 66394

SEQ ID NO: 66397 - protein, 577 aa, Clostridium sp. IBUN22A; identical to SEQ ID NO: 66395

SEQ ID NO: 66398 - protein, 722 aa, Clostridium sp. IBUN125C; identical to SEQ ID NO: 66394

SEQ ID NO: 66399 - protein, 577 aa, Clostridium sp. IBUN125C; identical to SEQ ID NO: 66395

SEQ ID NO: 66400 - protein, 722 aa, Clostridium sp. IBUN13A; identical to SEQ ID NO: 66394

SEQ ID NO: 66401 - protein, 577 aa, Clostridium sp. IBUN13A; identical to SEQ ID NO: 66395

SEQ ID NO: 66402 - protein, 628 aa, Pseudomonas fluorescens
MYLAELTIRNFRKLRDTKLKFQPGLNVLVGPNNVGKSAVVDALRTLLAGHDEPFPRLDISDRHRPREGEPAGDITFHFVFKGLSHEDEADFIAALKPCKDKTMEAHIHVRYTEADSTGRFRVKRWCGDHQEVALSSDMMENLRGVYLQPLRDAAQGLRPGRNSQMARLLHLLTDDDGRKKINDALKTLDDELQLNESIKSTHAAISLRHGLMMGEQLAQALAIGLTATDFQRLSARLSITAEALEIEQNGLGFNNLIFMAVVLSELAKNPDAAYRSLIVEEPEAHLHPQLQRVLLRYLAGVPTGEGEKSVQLFVTSHSPNFASNSELESLVCLVENDAGVETFFPRDVTFKKGKREKLERYLDVTRAELFFARRVIFVEGAAELMLIDALARLIKLDLREYGVSLISVEGLNFDSFLPLFGETGLRIPVSVITDSDPFEEIEIPSDVQGQLNEETIEDLLSEASYLEETDAPEDEGPVEVVAANKKVKRKEVYPALGDEVRISSNTAKMKGMEDAFVKVFYGLKTLEYDLALLEPNRKVMLAALSDPHPQIAKTLGKIVDVQPDNAAKAKALFCGMFERKESSSNVQKGRYAQALAERIAKEPGFMVPEYLKLAIRHVCKGVDEDEAV

SEQ ID NO: 66403 - protein, 321 aa, Pseudomonas fluorescens
MRLSDEQKNVIGAELGPISVTACAGSGKTATAIRRLIEIRQKMKKSRGRVVLLSFSNVAVNTFNKGFQKLASVLPDDANRKLVEVDTLDGFFTQHVLRPHAYRTMEATKAAYLVAGSEPFLSNYHYWPGGDARPLPIKDVKVGVENGNLFFFVDTHTGPARLITWKALDSVERLGCIGAYTHELGRYWVYRTLVEQPSLLRALTARYPQILVDESQDLGTLHQAILELLIDAGVTVSLIGDVNQGIFAFAGADGMFLNTYEGRHGVKPFKLTRNYRSLPPIIDIANRLCGRNDEADRTPEPGGAYFVGYGDSMTIRTLIPR

SEQ ID NO: 66404 - protein, 566 aa, Escherichia coli VR50
MRIETVYIKGFRNYCDAVINFNETNLIIGANDVGKTNLLYAIRLLLDKSLSELDLEPKSNDFHVNSAGEQVENIEITIKFTDVSEDAVISKLGGYVSDEGETYIKYLASSLTMDYKILLSHEHNNFDEVPNRFYLKCLSLRYINSQRDLEKYIKIEKKHLLRLAQEVRSEKDTENDGAVFTELNKLLTEVNEKVKGISYVASATEELNEELRKLSYTHDRLTVQLDTGAIGIDQFIEKLELSANTNGKKLMLGGDGFNNQILLALWKTKSVREHDVDSEVVIYCIEEPEAHLFPHQQRKLAAYLIDKLPGQAIVTSHSPQIAVNFKPDSIIKLYYDDGETLAASNGCSDCISSAWDGMGYRMSIIPAEAFFANVVFLVEGPSEVIFYTELAKALSIDLDYYNISILSVDGIQFEVYRKILTALNINWIVRTDNDASKVPHKNEWQYAGVNRALALCGENKEPNSSIPIDSKALHAKWGTISPIINPNGVYISFFDLEGDLANDFSKHVLDYASKDNLDDAADYLRGKKAIRMRELIKEKKAFLTELKSKDIARPLIHALKIARGEL

SEQ ID NO: 66405 - protein, 540 aa, Escherichia coli VR50
MKLTKEQLDAIDYEGNLVITACPGSGKTTILVHKIAACLSHSKDYQGVVALSYTNKSSEELKARCRKLGAELNSSFFGTIDKFFINEIILPFVRQVWGGNESALEVVKYIDLSQELKDKTNKYFDRVDFYSNTSFEGMGSLRDIYLKGMLILDFLPHLAFYIVRTSYSCQRYLMAKYIGFFVDEYQDTGYFTHQVFKFIPTLGMPLIIVGDLDQSIYLYSHRSSDSLKDFMNDSGFCHKEITVNHRCHPSIVNYANRIKDFECQLAPCDEIFVYRKCVDGNQIDIAKWIGEVLDNVKNKFSISDNKEIAILVRSNACAELVSDNLVVSNRAYLDNDLTKAGGKVSGLVNDLLCYRYNLNKTAQSILEGVLGSSVKRSEATRIRKAIKQVRSVTDAFLIDVINKIVVTLLGTEIEQHHKSALSEILVTPRMQNNYLDVRSDEVQIMTLHKSKGLEFDFVFHLDLYDWILPKRVFIEGSYDVVFENEQQCINLHYVGITRARKGIMLMHSTKRYNGSGDLKNGAPSQFLLKPGLDGLYKKIN

SEQ ID NO: 66406 - protein, 634 aa, Pantoea anthophila
MKLETIRLSGFQSFGQEPTELSLEDITYLIGPNGSGKTAVLQALCRLFAFDPSLRRIQRSDFHVHFEEEEVPPERELWLEADFLFPELAGDEDNSTVAPHFGHMRLDEPEGIPRLRFRLTATMGLDGDIEENFVYVLDINADGSPQNTAQVPRAERNHIQVHYLPARRDPADHIAYGANALLGRLLRAVRWDAERDTIKELTDQISDSLAANPSVNAFSESLKTTWATLHKGKFFADPKITFVASEIEALLRHLSVSFTPGHDGSLVDFSRLSDGQKSMLYLSLVLSSQAIGRAVLAEEDVSFDPDKLRPPVFTLVALEEPENSLSPHYLGRIVSALNTMTKNVDAQALIATHAPTMLRRVAPELIRYLRLTEARNTRVTCIKLPEKSDDAHKFVREAVQAFPEIYFSRLVVLGEGDSEEIVLPRLLQAKGAPVDESAVTIAPLGGRHVNHFWRLLSALQIPYLTLLDLDVARYAAGWGRIKYVNDQLIVHEPENKLPEDQGIPIWNSDTYKVRNYPHYFNLLEERGVFFSYPMDLDFAMLLSYPEAYKVVEEEPDTSTLKAVLGKSHYDSSQYSENELKLFSTYHQRFKLGSKPASHIDALARLSDEELLVKMPESLNRLADAVITKLMELPE

SEQ ID NO: 66407 - protein, 556 aa, Pantoea anthophila
MIAVEEWQPADGLTLEPNAKRAAKARKRCLALTAGPGAGKTEMLAQRADFLLRTGTCRYPKRILAISFKVDASRNLKERVERRCGSDLASRFDSYTFHAFAKRIIDRFRPVLTGKDALDAGYTIVDKKNGPSRTQIEFGDLVPLAIQILQSSKIARNAIRQTYSDIFLDEFQDCTNLQYDLVKLAFQGTSIRLTAVGDTKQKIMAWAGALDGIFQTFANDFNAVSLNMYRNFRSKPQLLRVQNEIIRTLDPDSVMADEQLDGDEGEVYAWRFEDSCKEAVYLADLINGWINTEQLPPAEIAVLVSKQLDLYVDHLMTELEARGIPYRNEQQLQDITIEPVARLIVDYLSCLYGKREPKAWIRLMNQLIPFADEEIQSSARKDLDQLIKKQRKRVSDAKHTDSPFSDWAQLAIEFLKYIGSKMLVALSPDYETRERLNDVIRETFARIKELLKSEPDLPKALGRFADDQAVRILTIHKSKGLEFDSVIIMAVENEIFFGKQDENRCAFFVGVSRAKRRLILTHADQRERPASAKRWNVSRTAQTEYISYVTPFVRPQ

SEQ ID NO: 66408 - protein, 681 aa, Parabacteroides goldsteinii DSM 19448 = WAL 12034
MYIKEIKISNFRNFRDASVPFHEGVNVIIGHNNTGKSNLLRAIGLVLGYSDGRRLGTCDLFYETDVVTLQQQSPRIKITLIFHRSQGEALDSAEMGLFSGMMTDPALSEEAKLRYEFKLADDQEDNYKADVAGVTTAKEIWKIIDRDYIRLYRSSRSGGNQAAGISVNDALGQMDFQFLDAIRDVSHDLYAGYNPLLRDVLNFFIDYSVKNDATKTEDEIKEQLKALRNDFVQQSSPLMQTLQDRLHNGKNVFLKYALDTGATFNGAVPDFDGEVTENEMFAVLRMIIKYTVGIEVPATYNGLGYNNLIYMSLLLAKMQADSSITYMKRNAKVISFLAVEECEAHLHPAMQYKFLQFLQDNKANGHVRQIFMTSHSTQIASAVKLDDLICLTSPVLGQINVGYPRVIYKEDNDDDVVSKQYVQRFIDATKADMFFANKLIFVEGVAEELLLPVFARYLNKNLTDEHVLVVNMGGRYFNHFLKLFDTNNPYTINKKIVCLTDIDPCRKKNEPDEDYEACYPYEYNIDTANYNYKHHADTEVAQYAAHPNIRFYRQDVTYGKTLEYDIMRENPDCELLLTNSVSNLKEIKAMMAEQDMNKMMSKMRNSEANTRIKTSIGASKWTDEEKRKALLASRYLNSVSKGSNALELNVVLMANLDKPVADRKEFHVPQYIVNALTWLLS

SEQ ID NO: 66409 - protein, 553 aa, Parabacteroides goldsteinii DSM 19448 = WAL 12034; identical to SEQ ID NO: 62921

SEQ ID NO: 66410 - protein, 623 aa, Methanosarcina barkeri str. Wiesmoor
MYLKKIHVKNFRCINDINLELNSGLNVIIGANNSGKTSLLDSLRLALSIGNYSRSIYVSSEDFFVDEFGKKSQTIEIDLTFSELTPEDMGVFIEMLKVNDDGNHELELHVRYKRERKNGIEKIRVRYWGGEKEANTIPIEVMELFYIVYLEALRDSENYLKPNRGNKLGQLFLKLVPDETAQEKHAQQIYESITSNEDWNELITDARKKINEHLENTTLEHDTLRIDIDFAPVDFTKIAERLKIYIPILKKIKRELIENIFEEEGWEKYFEYPHSDKLILKTDIKELLKNEVNSELKFKISKLEKFIQKFEIYQNGLGYNNLIYIATIIGDLIERVNRKSENYIALLIEEPEAHLHPQLQNILFNYFKNIESKNIQIFLTSHSPTITAKTDIDTVILMENSFKVDILPLKDIEFEDETDKKYLQRFLDVTKSQLFFANGVIFVEGISEAMLLHIFSKILGIDLEKNGIEVVNIGGVAFKPFAKLFNSEHMDKKIKVRAAILSDDDESDGKISRRASNLNKLNSENLKVFLGTKTFEYELFLLNGDLLTNLYKKLHPNFPQSNPQENTEKNADYLVKRLKSNKDKGEFSQLLMMELIENEDTRNKFKVPRYIEKCVKWVVGAED

SEQ ID NO: 66411 - protein, 260 aa, Methanosarcina barkeri str. Wiesmoor; identical to SEQ ID NO: 63139

SEQ ID NO: 66412 - protein, 634 aa, Methanosarcina siciliae C2J
MDESPHRIRFFEDDFYFDKSSNKRSTEIAIELSFDELDENDKTAFVWSGIDISNNQLSVRLEAKWEEENNDASVELFFVRKDDPENPKGENFKLTHKRYIPFYYIDAYRDIWKETNSSNGDLKQIFKDHNKHYLKPLNAQIASCIKNIELYLNEYWEDEDSSISEILFEIDGNLEDFAFDNSMPLVDCLTEFNIKLADCDRRLDKCISETEPQDKELIKKIQQSVQNICQKTSIQQTIEELQAKMNGLHGIQEIKSILNENLSLFVPESQIEIDLAKIEESSLLDENHVSLEDVSIFKQGSGFQGSFVIALKLSRLFTHMKFSDDELTNLIVSIEEPEAHMHPHLQRSLIKKLKAKQKVFAEMGYNVQLIITTHSPSILSQIEKSDICLLSKKNDECKIVKLDQDFEHQIISELGAKEKLKHFDFVFRQYPEIFLSRGVIIVEGQSEFGAIPEFARIMNVDLDNLGISVINSGGKGSAKPMYLIIKKFTNCVAIKDNDNDLSDPLIEDQNEPFFTTDYIDFEEEIITHIEELNLIRIFLDVDSQLFGDYYLGQIRRYIEETRRMDVSELLSKWEELDFSIFLENTNSVLENELTETLKKHKSSLFSSMICSHLSENEIPECYKKIILKAKEMVM

SEQ ID NO: 66413 - protein, 591 aa, Methanosarcina siciliae C2J
MIDDPSQDIAINYPVESSLFVTAPPGYGKTYVMTKRVEYLISRECIIPPQKLLVLTFSNAAADEMKKRLVKNIPNVERYVDVMNFHTFAYKLLRCYGNYIGISRFFTIVDESKKREYKSNYYRTYIESSSSKWGREADFVSEYNTWYNKKFLQGTDYIDVENEMTFENLRSSMNEDLINKENLDFDHLLFKAIDLLQQNGYVKNLFLNKYPILLADEFQDTNYIQYKLFKEIGIDSNGTKKAVYVMGDKKQTIMRFQGANPDNIAFLIQDFNCNMHQLNKNHRADSEHILHITKKLRDPSFFVSEAKHEIYIHNTVKEEIKKIIEVIMKLLQNGVNLHNICILFPQKRTSNCIKKVFEENSIEYVDISDFKMDSITEEYSALIEGIRNQIEEKCAKKSVRRIIDELIDENYSGESKNTILLTTIRKFSSSFDRGHFSSMEVWKRLQEFYNCIQMEIDWVQLVKSNVRNKVYLSTIHGSKGLEFDYIFMIGIVNFKMPHSTLCFPCSNFRNPQQVDISESKDLFYVGVSRAIKEIIFFYSKQDEQNLAIRSRKISCVFKDIAECLKFIDIENNTYDFGNERINELLCFNNCR

SEQ ID NO: 66414 - protein, 691 aa, Methanosarcina mazei SarPi
MIIKKLKIKNFRCFGSKETVIEFENLTTIIGANSSGKTAILDALLKLFGRNGEERDIKISDFHVPKDKRPEEIVENELYIEAIIHFPELVNDKDWAEKTIPDLFNRMVVDKASGDPYVRIRLEALWKKSNLPEGDIECDLLFITNSEEDEITDEKRYPAKVSEIRSNIQMIYVPAIREPSYQLRNASGTILWRMFNGINWPEDINKKISEKTEPINSIFDNQAGIKQIQEIIGTQWSSFHRDQRYTQAKIKFISNDLDDILDRASIEFSPTEIPKSYSINTLGEGLRSLFYFSLVNSLLEVEYLSQKGLRKKDNGAVEEEKIFNLSPPVLTILAVEEPENHIAPQLLGRVIDNIDQIARKNNAQVILTSHSPSIVKRVETESIRYVRLNKENLCTHISKILLPKEQDEIYKYIKEAVTSYPEIYFARLVVLGEGDSEEIIIPKAIGVLDSKFDSCGISIVPLGGRFVNHFWKLLTDLDIPFITLLDLDSEREGGGWGRIKYVIEQLLENGYNLEEIFNFEEAKHLKRLNLESMHKWPLETLEDRVKLMKWVEYLEDYGVFFSDPLDLDFSMLKAFTNNYQNTAPINGGPRIPDKVTDPTKYKIKMETCIRYTLKESGGDGNTFDNSEKELMLWYPYLFLDRGKPGTHILAMTELDNELFKSNMPTSLIKLVQAINTKLKDDPFSSSDGLNI

SEQ ID NO: 66415 - protein, 634 aa, Methanosarcina mazei SarPi
MDSIYKVIKLRVTPIDWKPSDGLTLEDKALETVKSSTNFYVIAGPGAGKTELLAQRACFLLQTDTCREPRKILAISFKKDAARNIEERVKRRCGDELARRFISKTYDSFAKSLLDHFRKALPNDYKLSPNYEIISDEKIIDRYFGLIRSLDNLNVSREQMNNLKKYLAINKLPLNSGSSGDINELIYDIWMYSLQGEDNQSEITFPMVSRLSEFLIRSNPKIRSSIVATYSHIFLDEFQDTTNNQYDLIKTCFYNTENILTAVGDNKQRIMTWAGADVEVFNKFKIDFKAKKCELLMNYRSAPRLVEIQKILIKKLSDNEGNVSTNEKWNKNDGICEVWNFNNHLEEAKILASEITQLINSEKLNPNDICIIAKQQLDQYCTCVIEELNELGIRARNETMFQDLISEEFVHLVLDIIKCSISEKSRDEWANSREMTRYIHGISVEDDLNFTKLRMFDKNFKFALKEIKKKFSGVKSKEDLKTALDEVINYLGKEKLIDFFPQYSQHNYFEQIYNKLHEYLWNEYSSCGDWVYAIESLKGLRSIPIMTIHKSKGLEYDTVVFIGLEDDAFWTFKKQTEEDMCAFFVALSRAKKRVIFTFSETRINNGCTRKQRRKNINSLYQMLEQSGVVDVRNF

SEQ ID NO: 66416 - protein, 670 aa, Methanosarcina lacustris Z-7289
MYLSELKISNFRKFGEGENNSPGLYVKFNSGLNLLVGENDSGKTAIIDAIKMVLFTQSYEYYKLEDEDFHIPYNADEGERAKELRIECIFRGFQSSEAKNFLEWISIEKDSEGESHYYLRVFLIGRRENGRVYRDLKAGSDEQGTSLDGKARDLLRIVYLRPLRDAEFELSPRRNSRLSQILYSHSDFADKEKHPIIEVVKKANGEIESFFEEKKDTESEGSEEGTEPEKGEETESGQKGETESKENGTKIVTHINDYLRNFSSENNQLKSSISIADMNLKSILEQLSLNLSINKAGLGSDNLLFIASELLLLKREKYTGLKLTLIEEIEAHLHPQAQLRLIEYLQQESKTQESDEKVQLILTTHSPNLASKVNLENLIICKNGKVFNMGREYTNLEKGDYLFLERFLDVTKANLFFAEGVILVEGDAENLLIPTIAKIIGLPLSKHGVSIINVGSTAFLRYSRIFQRSKPEEFIDTYVAVITDCDARPDYFYTAENKNRKEEVKKQPELGYSQRVEKAIKDKESHYNGHPVKAFISNDWTLEYAIALSDLKKDFCRAVLQGKKIKNSNAITLTKEKKKEVDEEVESNFKNWNDEEWVNEKIAFEIYNNIQLKGGISKAIVAQCFSEILEEYSDQNELKEKLISDSNFKYIIDAINYTISGKVEKEASDD

SEQ ID NO: 66417 - protein, 637 aa, Methanosarcina lacustris Z-7289
MIEISDGDIEYAEKIFLPEGCSFDSERKTVIKCMESKDIQACPGSGKTTTLLAKLAILAKKMPLEDNKGVCVLTHTNVAINEIKGKLGKKGDILFSYPNYFGTIQSFVDRYLAIPSCLYYYGTRPSKIDSSSYDFEMNNIYNKVPYQSPLKKWLYASSKYKGIKPHELFLRIRIDFVNGKIKDDINATKALLSDTKNEKYVELFSIKESLFKQGILHYDDAYSLAFRYLNEFGEFITKPLSERFAFVFIDEMQDTDEHQNRLITQIFDESKVVIQRFGDTNQSIYDNYVRENSVWEIGEDSLQINGSKRFSNKIADIVKRLCLHEQDLLGNSLVQEIQPKILVFNDETIGSVIPFFGRIINECNLCEEKKEFKAIGWVAKEKEGKRTLPSYFPEFQKKSHHNKIESDFLCEYLQRIDDNTIKIYGANYYRQLMVNSLLKTLRLLEIKNPDNLHNFTEKSLIEYFEKEDKTFMDNFEAKVVKWCLKIHSGTNISEEFANVIRTDFCSNFDGVNIDKLRDFFNNSIHGREEQSRETNIYGGADFNIEVATVHSIKGETHTATLYLETYYRDYDVGRLIKYLAEGNGNPNSVHNMSLKVAYVGMTRPTCLLCVAAHENSISGYEEFLREAGWEIREVRNE

SEQ ID NO: 66418 - protein, 256 aa, Pseudomonas sp. 10B238
QVLHSVFAAAKFLHQYMTLTRCDLFFSDKAILVEGLSERLLLPAIIEKLETAEPDRPKLSSQYVTTMEVGGAYAHLFFGLLRFLELPTLILTDLDSVEKPGGSACEVHKGTYSSNACLKAWFSDDNPFTLNGLLTKDESEKAKHGNCIAYQCAEKENGPCGRTFEDAFILANRALFGLNGATREELEAGARSQASKIKKSEFALKYAIEEKAWTTPKYILDGIRRLAAGIEPAIPDPALALAAEAMIANEEDAADA

SEQ ID NO: 66419 - protein, 579 aa, Pseudomonas sp. 10B238; identical to SEQ ID NO: 62643

SEQ ID NO: 66420 - protein, 512 aa, Burkholderia pseudomallei MSHR1328
MGVDGDIEETLVYVLDLNSDGSPMTTAQVPRVERNHVQVHYLPARRDPAEHIAYGTNALLGRMLRAVNWEDEREEVKGFTDQISGSLAANRSVAALSESLKATWSTLHKGSFFADPHITFVASEIEALLRHLSVSFSPGHDEELVDFSRLSDGQKSMLYLSLVLSAQSIGRAVLAGEDDSFDPDKLRPPVFTIVALEEPENSLSPHYLGRIVNALVAMTGNEDAQALIATHAPSMLRRVDPKHIRYLRLTDERTTKITRIRMPKKTDEAHKFVREAVQAYPEIYFSRLVVLGEGDSEEIVLPRILRAKGIPVDESAVTIAPLGGRHVNHFWRLLSALEIPHLTLLDLDVARYQGGWGRIKYVNDQLGEYAPSKTLPPDHSVPDWNSAEHKVRDYDNYLDKLESRDVFFSYPMDLDFAMLLSYPGKYGVESKPPSETTIKAVLGDSYHDAKQYTADELGLFGTYHKRFKLGSKPAAHIEALAQLTDKQLLEDMPESLSRLADAVIAKLEELPE

SEQ ID NO: 66421 - protein, 555 aa, Burkholderia pseudomallei MSHR1328; identical to SEQ ID NO: 65875

SEQ ID NO: 66422 - protein, 655 aa, Sphingomonas sp. SRS2
MFIERLILTNFRCFGPEPGSIDLASGLTAFVGVNGAGKTAVMQALQRLFGVTGDQRRLRRQDFHVPVAEAAPARQRAFVIEAILAFPELDAEGGDNAAVPEFFHQMAADDAGRLKCRLRLQATWTEDGSLDGAIEQKFWAIRTFGDFTETDCIELKAIDRARVQMIYVPAARDGASQVTAFLRGRLWRAIDWSQEVRDVFAEAGATLNGAFGGEAAVDLVAAAVKRRWQEVHSAGTDTTPVFRPLDLRFQEFIRKVEVVFHPDEAGRERSLDDLSDGQRSLFHLAMTAAILDVEARIAADPAGIGFQADGVSLPALTLIAVEEPENNLAPFYLSRIIRQIEDLTRGRRAQAVVSSHSPSILARIDPTQVRHFRLDPADRTAKVRPIRLPEGQEAASKFVREAVRTYPELYFARFAVLGEGASEEVVLPRLADALGFAIDRSFVAVVPLGGRHVNHLWRLLTDLDIPYATLLDLDWGRAGGGWGRVKTACTQLLENGVTPRALFGEHLQADGPAANLAAFDRLAADDSNNLDAWAKWLRQFGVFFCAPLDLDYSMLRAFPAAYQVAEPNRQGPSNRGDPRTAVLGDDGLPALYPADQDGLLRWYRYLFLGRGKPSTHVRVLSGMAAADLAAGAPEELRALLTAIVARLEPPAPVEA

SEQ ID NO: 66423 - protein, 627 aa, Sphingomonas sp. SRS2
MPRVRPDDWRPRGIEDLEPQAWRALRQAGCTCVVAGPGAGKTEFLAQRAVYLLETGACPPPYRVLAISFKTDAADNLAARVRQRCPPELAGRFVSLTFDAFTKGLVDRFTTAIPPDWRPGRPYDIAFPTRRQVEGFLDQTRLGAPPQWQSAIAGFGVGDFESRHVGGHRLPVIRAEPASGEEYAVDRWWHGQIRGRARASLTFVSLNRLAELLLRANPQIRHALRATYPFVFVDEFQDTTYAQYDFLLSAFADGRTTVTAVGDDKQRIMAWAGARLDAFQRFEADFGAVRIPLAFNFRSSPGLVRIQHVVARALDANAIAGVAQAAQLVDGDVAQVWNSQTRDGEAEYLTRWLAEDMARRGRSPRDYALLVRQKSDDYEAELSAPLAQAGLRLRNESHALGRTTLQDLLADELARIAIALLRLGALRRAPDAWRLASNALQSLRAVDPDDELACHRVEAELTVFLGDLRAEMARAAPTVENSQTITGRLFGFLDLGAVARTFLEYGTGELLAIMVEAFGLHLAASVAGAASWSACLDSFEGVAQIPLMTVHKSKGLEYDTVIFVGLDDQAWWSHTPGNPEGLATFFVALSRAKQRAIFAFCQGRGQRRRVADLFQLLTDAGVPEIAI

SEQ ID NO: 66424 - protein, 681 aa, Porphyromonas gulae
MYIKEIKISNFRNFKDASIPFHEGVNVIIGHNNTGKSNLLRAMGLVLGYSNGHRLGTSDLFYETNVAMLQQQSPRIQITLVLRRSEDEALDSAEMGLFSSMMTDPALSEEAELRYEFKLTDAQEDNYKADVANANTAKEIWKIIDHDYIRLYRSSRSGGNQAAGISVNDALGQIDFQFLDAIRDVSHDLYAGYNPLLRDVLNFFIDYSVKNDATKTEDEIKEELKARRDKFVQQSSPLMQTLQERLQDGKNVFLKYALDTGATFNGAVPDFDGEVTEDEMFAVLRMIIKYAVGIEVPATYNGLGYNNLIYMSLLLAKMQADGSVTYMKRNAKVLSFLAVEECEAHLHPAMQYKFLKFLQDNKSNGHVRQIFMTSHSTQIASAVKLDDLICLTSPELGQINVGYPRVIYQKDNIDDVVSRQYVQRFLDATKADMFFANRLIFVEGIAEELLLPVFARYLNKNLTDEHVLVVNMGGRYFNHFLKLFDTNKLYTINKKIVCLTDIDSCRKKKGPDEEYEACYPYEYNIDTDNYDYKHHADTEVAQYANHPNIRFYRQDATYGKTLEYDIMRENPDCELLLTHSVSNLKEIKAMMAEQDINRMMTKMRNSEANTRIKSSIEASEWTDEEKRKALLASRYLNSVSKGSNALELNVALMANLEKPEADRKEFHVPQYIVDALTWLLS

SEQ ID NO: 66425 - protein, 554 aa, Porphyromonas gulae
MATIITSEETIPINEPFKVTAGPGAGKTHWLINHIKNVVSNSHKLDVVRKVACITYTNVGIDTITSRLNMGNDVVEVCTIHSFLYANVVKPYVHLVAEDFGLKLDELVVIDDSNFKSEGIAALVLRRIGKSWLDPQKYLGGLKNATWRYGNHEYNDYKPNHPIKVGKWHVGNDCYMEFKRWLWSEGYMSFDDILYFSYILLSRYPNIYKLIKARYPYIFVDEFQDTIPFVVDLLTQLGNDGVIVGVVGDKAQSIYDFLGATVQQFDNFSVPGIQEYEIRGNRRSTKQIIDLLNIIRTDFSQDWLNGSEGMMPELLVGDMLNCYQQCIEKSGTDEIQSLAFQNILANSMRKKNGMREVENILEMDFDSNAGRQMVIKALIKAVEYTRMNDLRNAWHQLDIINRDRTITIVVLRRLLDGYKDYKDGSLMDFYNFLVNNLHVEMTKIKGTAIRDFYQNHTYADAALGVKYGDSNGKHKTIHKSKGEEYDNVFVVLKEEKDLEFLLSPNLNDNNSHRVYYVAASRAIKRLFINVPTLNAENRIKFEGKPIDISFIRTS

SEQ ID NO: 66426 - protein, 698 aa, Flavobacterium psychrophilum; identical to SEQ ID NO: 62716

SEQ ID NO: 66427 - protein, 633 aa, Flavobacterium psychrophilum; identical to SEQ ID NO: 62717

SEQ ID NO: 66428 - protein, 387 aa, Flavobacterium psychrophilum
MYNHNESSLPEHYNGLGYMNLISMIFEIEILIQDFKNSKDEKPSDINLLFIEEPEAHTHPQMQYVFIKNIKELLKQGIKRDDGQSGELQSIISTHSSHIVSESNFDDIKYLKKNDNNSVIAKNLKELKEEYKANTKQYEFLKQYLTINRAEIFFADKVILIEGDTERILFPTLMKKYDIDEEKKYKNLGTVDDSLPLLSQNISIIEVGAYSQIFEKFIEFIGIKTLIITDLDTVGLDDKKCEPSIGVSYSNDALSFFFNDPTLTDLKGFTIQNKIFSNTNGLWNVDANGKLCVVYQILENGFNSRSFEDSFIHLNREFITPLKDEFKGLQNRTNFDNTANNAYLLAEHCIKKKTHFALDILYNSNDDFSNWQIPGYINEGLLWLKQD

SEQ ID NO: 66429 - protein, 633 aa, Flavobacterium psychrophilum; identical to SEQ ID NO: 62717

SEQ ID NO: 66430 - protein, 698 aa, Flavobacterium psychrophilum; identical to SEQ ID NO: 62716

SEQ ID NO: 66431 - protein, 633 aa, Flavobacterium psychrophilum; identical to SEQ ID NO: 62717

SEQ ID NO: 66432 - protein, 698 aa, Flavobacterium psychrophilum; identical to SEQ ID NO: 62716

SEQ ID NO: 66433 - protein, 633 aa, Flavobacterium psychrophilum; identical to SEQ ID NO: 62717

SEQ ID NO: 66434 - protein, 698 aa, Flavobacterium psychrophilum; identical to SEQ ID NO: 62716

SEQ ID NO: 66435 - protein, 633 aa, Flavobacterium psychrophilum; identical to SEQ ID NO: 62717

SEQ ID NO: 66436 - protein, 672 aa, Xanthomonas campestris
MHLKQIDVKNFRLLHDARLLLENRTTVIVGRNNSGKTSLTEVMKRLLSDASPSFSLEDFSFCCYDQFWDSHLQKSENEDEAEIRKILPAIEVRLRFSYEKGEHLGLLSEFIVDLDPECTGALAVVRYALKDGKLTELFGDFAETDEDARPDFFRLLRDRIPSLYETTFVAIDPNDETNVKGIERSTLRKLCVGGFISAQRGLDDASQKERVVIGKVLENLFSTAKSNTDDRDSHVIAQELEVAVKSIQDKIGDDFNEKLDRLLPALSLFGYPGLNDPKLLTETTLDVAKLLTNHTKVRYTGSNGIHLPEAYSGLGTRNIILILLQLREFFKLYLAMEPRPSVHLVFIEEPEVHLHPQMQEVFIRKMADIASAFNKETGESWPVQFVVSTHSSHVANEAHFETIRYFLASADKNGTVSTKVKDLREGLAGKPEPDRTFLHQYMTITRCDLFFADKAVLIEGTTERLLLPRIIQTLDKDLAEGKKLGSQYLSVIEVGGAYAHIFFDLVKFLELRTLVITDLDSVKANSAGKLVACQVSQGHKTSNACLKSWYDNNDITPAELLAADDAARTKGRLRLAHQCPETEAGPCGRSFEDAFMLANPELFPLPGPGEQEKETQAWEEAKEVKKSKFALEHALSDGDWNIPRYIWNGLVWLAEGDLPPAPAPPAEAEVAA

SEQ ID NO: 66437 - protein, 584 aa, Xanthomonas campestris
MNAVPEASPALIAAREAEALVAQCLQDHHSFLLEAGAGAGKTYSLVEALKSLIEHEGPQLRRDHQRIACITYTNAATSVINSRIDSDPLVFVDTIHAFCWSLIRKFQPALRLLVAAMPEWEEKLAEVDGIGSRTVEYELGYRRVTADTVTLHHDDVLGLMVSLLPNAKFQALLGQQYPFVLIDEYQDTDIAVMTSMSEHLLGRAAGPMIGLFGDHWQRIYDKTCGHVAHESLTEIGKKANFRSAAKIVDVLNRMRPNLPQALKDEGVVGSAIAFHTNAWQGERRSGAGGGHWKADLPAEMAHAYLATLIKKLESDGWDLAPQRTKILMLTHNVLASEQGYDSITKIFSYTDQFIKKEDPLIAFFCDVLEPACAAFQHKRFGEMFSLLGGSAPAVTSYADKVAWSSSMEGLVKIRLDGTIGKVLDYILEHVQPRLPEAVLGTLRQAAEWHGEEGEEPPRRVQQLRLLRDVFYKEVIALDSFIDGHTPFATKHSVKGDEFENVLIVIGRGWNKYNFDQFLQWSAEGVPEGKREAYERNRNLFYVCCSRPTTRLALLFTQELSDTSLALLHNWFGGAIGPAPAPPEG

SEQ ID NO: 66438 - protein, 619 aa, Alicycliphilus sp. B1
MRVARIEIENFRGIKQARLLFPKHGVLIGDNNTGKTTILEALDLVLGPDRLNRQPSIDEHDFFGGIYVQMPDSSPGNVGAEGGAPPEPSAEVAEDTAPKIVIEATIADLSDEQKGKFGDYIEFWDSASDKFYDAPNPAGVDAASIVEALRVTFHGWYDKEEDDFEGATYFTRSLTEGDKPDPFSRKHKQLCGFLYLRSIRTGSRALSLERGSLLDIILRLKEVRPQMWEDTLTTLSDISVASDPALGISPVLESINTALKKYVPKEWGVEPHLKVSTLTREHLRKVITAFIATGDGTHAAPFYRQGTGTINMLVLAMLSQIAETKQNVIFAMEEPETAIPPYAQKRIIHEVRKLASQALFTSHSPYVLEEFATEETVVLARDAEGRLGQRAIALPDNVKPKRYRQEFRTRFCEGLLARRVLLAEGPTEYSAFPVVCRRLAELNSENYLSLEALGICTVDADGEKNVPGMAQLYKELGKRTFAICDKQEEANKALIEAQVELVLMHDEKGFENLVLKGTTEEALKRFAKQLDWPPHLAQKFPDAEAQAEAALGEYFAWSKGNLGIADFLAQCSEAEIPEWLRDAARKLKSACMPAPVAGGGGAAPAHTEANPEASADGTD

SEQ ID NO: 66439 - protein, 605 aa, Alicycliphilus sp. B1
MELTKGQLDVMEADGHLLVTGGPGSGKTTVSIIKAAQIAGQDILPGQRILFLSFARATVSRVVEAIEYEQKIPSATKRLIDVDTYHAFFWRVLKTHGYLIGLPRRLTLLTPPNEAIALSGVRSGFPARNLSDELKAAKKAAEAAERTRLATEEGRICFDLFAPYVGDILHGSERIRRLVATMYPVIILDEFQDTNDAQWRVVQALGEFCRLIALADPEQRIYDWIGADPARLDHFRKAFTPTEIDLSTDNHRSAGTDIAIFGNDILTGRFRQQEYTGIAFDMFDPFPDPAMTKLVTTIYAARQRLIAQGIEDWSLAILVPTKRMTRLVSDALRHPPAGMAEVVHTATIEMEAAILGAEVIGLLMQPSEDERHFAQFIDLLCNYFQGKDGNEPTQGALKEAASIRSAYEELLANRANGKAIRKNSILVNVLAVYEQVHALVFTGDPDKDWRAVRRVLEDGACKRLKEIAEEVRNIRLLDRGTQLRQQLSQDWRDNGYRNALTIIRQAFVQEHFSTRAKPESGVVLMNMHKAKGKQFDEVIIFEGWPKRVKREIVANPDRIVRFNSREQINDQARQNFRVSVTRGKRQTTILTPIGDPCVLLLGEGD

SEQ ID NO: 66440 - protein, 594 aa, Methylobacterium sp. ME121
MLLSNFSIRNFRNFLQVDIPLSGNIVILGENRIGKSNLLFAIRLVLDPTLPDSARQLKMSDFWDGAAPDYGSPIEIHLDFAEFTTDFGLLALLTEYRVAGDPTIARLSYIFRKKADVAGIPQSSDDFEFVVFGGGEESRPVPSKVRRRIAIDVLDALRDAEGHLGTWRGSPLRPLLEDAISSVTREDLAAVAADLDKATKTLEAFPTIKVLENELRAGILHLSGEAHDIDPRLGFAPSDPLRLFRAIAMFIDGGKRGIAEASLGSANVALLALKLAEFAWRRRKNERNFSLLCIEEPEAHLHPQLQRSVFKKLFASADAAQALIVTSHSPTLAAVTPLRSIIQLKGRNRSTQAFSLANLPVTSDELDDLENYLDATRAELLFARGVIFVEGDAEEALVPVFASALGQVLDDLGITVCNVAGTNFGPYVKLAEALGMPYAVITDWDPLDGAKQPLGKKRVIDLWSDVLKVRGQPPIHPAQRTAWEALQFVSFASTWAGAGIFLNEQTFEVSVANTPSLLKPLLDILDEQGFGSTRSTRIANWRAGSAPVDASQLLAMVADIGKGRLSAKLAKKAVGLAPPDYITDAIRFVAGRVQ

SEQ ID NO: 66441 - protein, 596 aa, Methylobacterium sp. ME121
MLLQALEELAANPEQSAAVRETGHCVVLAGPGSGKTKTLTTAMARALAEDVVEPRGVACITYNNECAIELEMRLARLGMEAGDRVFVGTVHGFALSQVIAPYARCVPIGLPADFRVAKRAEMRASVEAAYAVAIAGTDDPHRRWSFASEKRRRDVDRTRPEWRGRNPELAMFIEAYEFKLRQQGLIDFDDMPLLAYRMIKEHDWIRDALRARFPILFVDEYQDLGHALHELVLLSCFGGGIRLFAVGDADQSIYGFTGANPELLEGLTERPDVRTIRLRFNYRSGRKIVRASLGALGEERDYRERAGAPEGELTFWSTTQGLDMQARAIAETVVPKLVEKGIPLDEIAVLYRAAYLGDKVADALKQADIPFVRTDGNALVRRSSRLARFIEDCARWVVGGWRDADPRYSRLIYRASLLVFGRHATADEERFLSEQLIGFLQSTIGHVDGTHAWLQRFDRELISSWRSIGRNSEQEWDVCVEMIANTDPASSLDMPLGHFAGRVGGTGRVNLSTLHSVKGREFDAVVMYGVNARDFPSERDKRTAGALRETRRLFYVGVTRPRKELGLIFQENQQSPWVNELYQRSKADDSDAGVGL

SEQ ID NO: 66442 - protein, 684 aa, Streptococcus uberis Ab71
MKLKKVKINNFRSFGERQIIEINNQTVLIGNNSSGKTTVLDALRKLFSDKQNDRIIRKSDFHLRKGMKPGQNSKSLFIETIFEFDELQGQSYSPAIPTFFEHFTVSEGYDNPFLRIRLESSWEDDGTVEGSIDTQIYFISSGDENFSEKDKHHAPRRDLDKIRLLYVPASRNPDKELGNSSGSMLSRLVNSINWTSDEINMITEKIDELNDIFLSETSALKQINQGIQKAWEIYHQDNRFSQANLTINSSEMSGALRQIALKFSPSTTEEAFRVSDLGDGLRSIFYFSLVDSILDLENKITKDYGEKPDYPRFKLLPPLLTILAIEEPENHIAPHHIGKLVKRFKELSNNDNCQLILTSHSPAIVKRIDPEDLRHLRIENTDKVLQTVVSEIQLPEAIDESYKYVKEAVQSYPELYFAKLIILGEGDSEELLIPKFFDLLGKEIDSSQISVVPLGGRHVNHFWKLLNSLKIPYITLLDFDNERYGGGWGRIKYISQHLNKLNLEFQKWFNTNKLDFNEIGLRECESIESQRLKNWFNKFEEFNVYFSSPLDIDFLMLKHYKTHYLKTLSSKEGPVVSYIDLEGNSAKVKLTELDCYDKSQVEGANNRKYEAIQATLKDKSGSGDSFTDEEKRLMIWYQYFFLGRGKPTTHMKFLSLISDEELILNLPPVFNKIVESAEILLGDK

SEQ ID NO: 66443 - protein, 605 aa, Streptococcus uberis Ab71
MVKCDEWFPKGEITLEGAALEAVKNVTNCLVIAGPGSGKTELLAQKLDYLFSTNTCVYPKKILALSFKKDAASNLKERVKNRYGDDYASRFTSLTYSAFEKRILDQFGDALPENIRPSKDYLIEDWNVIKQTFSINKFFDEKEFRKPQLRSCAENIILSDKTNHKIKNDLLKGTEYNNPVLLYKQITKLSTQIIKDNEFIRKALQKTYEFVFLDEFQDTTDDQYNLLKTSFLGSSCKLTAVGDDMQAIMRWAGANPNIFPNFIQDFNAMEYQLMMNHRSVPKLVEFQKEVHKILDSDNSSIQTKNYPRFNDGEIKLFEFKNESEEVETISQDIKLKMESGLRASQICILTRQHVDKYTSELIPKLSSNGIKARIEDEYQEILKDPFCNFLLDLILCSQRNRNPQIWENINNIFGRINGIDEFTDGITLESYYRKLDDLIREIDNLLTNFIYNEEYMLNLVSRIIDRVNPDKIISNLSIYNGQNDMDVRVTKFSKLLYKEYLQSGNNWTLIVSNFKGENSIPIMTIHKSKGLEFDAVYFIGLEDDAFWNFNREPEEEKRTFFVALSRAKRYLIFTKCKLRKNHHQTNIKINQIYSLITESSLVDKI

SEQ ID NO: 66444 - protein, 684 aa, Streptococcus uberis EF20/0145
MKLKKVKINNFRSFGESQIIEINNQTVLIGNNSSGKTTVLDALRKLFSDKQNDRIIRKSDFHLRKGMKPGQNSKSLFIETIFEFDELQGQSYSPAIPTFFEHFTVSEGYDNPFLRIRLESSWEDDGTVEGSIDTQIYFISSGDENFSEKDKHHAPRRDLDKIRLLYVPASRNPDKELGNSSGSMLSRLVNSINWTSDEINMITEKIDELNDIFLSETSALKQINQGIQKAWEIYHQDNRFSQANLTINSSEMSGALRQIALKFSPSTTEEAFRVSDLGDGLRSIFYFSLVDSILDLENKITKDYGEKPDYPRFKLLPPLLTILAIEEPENHIAPHHIGKLVKRFKELSNNDNCQLILTSHSPAIVKRIDPEDLRHLRIENTDKVLQTVVSEIQLPEAIDESYKYVKEAVQSYPELYFAKLIILGEGDSEELLIPKFFDLLGKEIDSSQISVVPLGGRHVNHFWKLLNSLKIPYITLLDFDNERYGGGWGRIKYISQHLNKFNLEFQKWFNTNKLDFNEIGLRECESIESQRLKNWFNKFEEFNVYFSSPLDIDFLMLKHYKTHYLKTLSSKEGPVVSYIDLEGNSAKVKLTELDCYDKSQVEGANNRKYEAIQATLKDKSGSGDSFTDEEKRLMIWYQYFFLGRGKPTTHMKFLSLISDEELILNLPPVFNKIVESAEILLGDK

SEQ ID NO: 66445 - protein, 605 aa, Streptococcus uberis EF20/0145
MVKCDEWFPKGEITLEGAALEAVKNVTNCLVIAGPGSGKTELLAQKLDYLFSTNTCVYPKKILALSFKKDAASNLKERVKNRYGDDYASRFTSLTYSAFEKRILDQFGDALPENIRPSKDYLIEDWNVIKQTFSINKFFDEKEFRKPQLRSCAENIILSDKTNHKIKNDLLKGTEYNNPVLLYKQITKLSTQIIKDNEFIRKALQKTYEFVFLDEFQDTTDDQYNLLKTSFLGSSCKLTAVGDNMQAIMRWAGANPNIFPNFIQDFNAMEYQLMMNHRSVPKLVEFQKEVHKILDSDNSSIQTKNYPRFNDGEIKLFEFKNESEEVETISQDIKLKMESGLRASQICILTRQQVDKYTSELIPKLSSNGIKARIEDEYQEILKDPFCNFLLDLILCSQRNRNPQIWENINNIFGRINGIDEFTDGITLESYYRKLDDLIREIDNLLTNFIYNEEYMLNLVSRIIDRVNPDKIISNLSIYNGQNDMDVRVTKFSKLLYKEYLQSGNNWTLIVSNFKGENSIPIMTIHKSKGLEFDAVYFIGLEDDAFWNFNREPEEEKRTFFVALSRAKRYLIFTKCKLRKNHHQTNIKINQIYSLITESSLVDKI

SEQ ID NO: 66446 - protein, 684 aa, Streptococcus uberis C5072; identical to SEQ ID NO: 66442

SEQ ID NO: 66447 - protein, 605 aa, Streptococcus uberis C5072; identical to SEQ ID NO: 66443

SEQ ID NO: 66448 - protein, 611 aa, Methanosarcina mazei
MYISKLNIKGFRFFNDNFTLPLNKGLTVLVGENGSGKSTVIDSIRLLLGEDEYNRSGISLNDFHRPFSVESARPVANIRIDCIFDELEGPEQIAYLPWLKPSNVNQAELHLEAINKEDARGRIRKNMWGGTSRRGIFEWELVNSINCVYLPPLRDAEEKLNSYRGSRLARLLTSLNGSGDEDKRLEEKVKEQNNELLSDPLIKSANGLIKKCLIDSVGEILGQDVSIQFSEINFNKIIHQLRLLFFPEIKEGEIPREAFRDLSENSLGYNNLLYLATIIAEMEAKNYVSTTSLKVLLIEEPEAHLHPQLQTRLLQYLQGAAEENNIQVIITTHSPTIAAAVGLDPVVVMSSSPLSQERKAIALTNCGLDRKTKFFLERWLDITKSVLLFSKGVILVEGISEAILFSEFVKRVLEQETLEDYGISVVNIDGIYFKYFMQLFCGYKIVEENFESCDNIPIRCVGITDCDPEGSNIGEGDGNNIDGCKNPQRFLVHDLRNHTSNCRLSINSKTFEFDLALEGNNLAIMNLALENITETDGDIKKRARIAKSMDWRSTTSCEKIVEALLLLKRIEKKKGEFAQELAMLLKSEDEPDFEVPSYIRDAILYVTGKSN

SEQ ID NO: 66449 - protein, 625 aa, Methanosarcina mazei
MSQENPTDEERKRQELLEQLYKRLEHDEYIEKLSLEQLEFIVNPIANSSFLNSCPGSGKTEVVGFKAAYEASSWDSPYSGMAILSFTKNAAAEIWKRANKYSEQKAVQFPHFVGTLDSWLHQYIFQPFCYSVMDHEGKDGDTSVNIIDSDSNAPFLENYKSVISSQPSYQEVKVNGYYIDSNNSIKFNRNRESNLNSYQRGILIENKLKFAKSGFATYQDAEYWSYRLLNENETILDLISKRFPYIIIDECQDLAPSRLDVIEILQDKGVIFHFVGDINQSIYDFIDVDPFQIQDFITASGMHEMKLTKNFRSNQDITNLCARLVGIQCPPEGRVPIADAVSCVLWECPSDQLCRLPSLFEWYLNSKNIECGNCSISVRGRSLLNKVRQTNPLESISYDITKAFFLWNSESKKTEYITEALELLGRSMCNLAYEGRGNHQNQYCPESFEHIDWRMFLSNILNSSKELATFRNGDRLQTWSQWCRSLKGFLETYFLNLPDTYVKWDEAKRKIKAPSGKANELVASSLFSSSASKRIRMTTIHDIKGETLDALMLISNPDRHSKGGHFEHWLEDPTSEYARFAYVACSRPKDLLIVAVPPLNRIQRMKLEGIGLVSQGLPGTLSQWF

SEQ ID NO: 66450 - protein, 684 aa, Methanosarcina sp. 2.H.A.1B.4
MYLSELKISNFRKFGEGENGNSGLHIKFNSGLNLLVGENDSGKTAIIDAIKMVLFTQSYEYYRLEDEDFYIHPNASEEERAKELRIECIFRGFQPSEAKNFLEWIGIESDSEGTPNYYLRVFLIGRRENGRIYRDLKAGSDEQGTSLDGKARDLLRIVYLRPLRDAEFELSPRRNSRLSQILYSHGDFADKEKHPIIEVIKKANGEIESFFEEKKDPESEGSEEGTESEKGKEIESGQKGETESKENGTKIVTHINDYLRNFSSKNNQLKSSISIADMNLKSILEQLSLNLSINKAGLGSDNLLFIASELLLLKREKYTGLKLTLIEEIEAHLHPQAQLRLIEYLQQESKTQESDEKVQLILTTHSPNLASKVNLENLIICKNGKVFNMGHENTKLEKGDYLFLERFLDVTKANLFFAEGVILVEGDAENLLIPTIAKIIGLPLSKHGVSIINVGSTAFLRYSRIFQRSNPEEFIDTYVAVITDCDSRPDYYYTSENKNKKSDKEQTDEELDEEEQDEEEQTELDYLQRVEKAIKEKKAHYNGLPVKAFVSKDWTLEYAIALSDLKTEFYRAVLQGGKIKNSNVLTLTEDKKIQVNKKVNSDINKWNERKWDNGRIAFEIYNNTQLKGKISKAIVAQCFAEILNEYPDQKELQDKLITDPNFEYIIDAIIYATSGKLKKGASDD

SEQ ID NO: 66451 - protein, 636 aa, Methanosarcina sp. 2.H.A.1B.4
MIEISEMDIEYAEKIFLPEGCSFDLERRDVIKCMESKNIQACPGSGKTTALLAKLAILVQRMPFEDNKGICVLTHTNVAINEIKGKLGRKGDILFSYPNYFGTIQSFVDRYLAIPACICYYNTRPSKIDSDSYDFEIIKRYQKLPRSGGLRGWMYNRFKQRPGFELEYLKGIRFDFISECFFDIKGNKLNIGKASSSYQQLFEIKMSVLKEGILHYEDAYSLAFKYLNDFSIVLKKAFSERFTFVFIDEMQDTDSNQNSILEQIFDASNVIIQKFGDRNQAIYDGFLEEQDTLEIDDCLCINGSKRFSSSIAKITQKLCVHEQNIVGDSSVQDIQPKFLVFDDDTIDSVLPFFVKIIKEHNLYDEHSDFKAIGWIGKENENKITLSSYYINYQNRSRRRKIELNFLNDYLQKVDDNTIKIEGAGYYRQLMINALLKVLKLLEVKDPNNSHQFTERTLIQYLENKDTNFEDMFNSKAADWCLKIHVGEDVSEPFKYFILNDFCRYFEDVDIRKLNNFLINSNTERREQLPEFNIYNEFDINIKVATVHSVKGETHTATLYLETWYKNSTDIKRIINYLISKKKKIKPILETSLKVAYVGMTRPTCLLCVAAHKDTISGNERYLQEAGWEIREVKNEN

SEQ ID NO: 66452 - protein, 611 aa, Methanosarcina sp. 2.H.T.1A.15
MYISILNIKGFRFFNDGFRLSLNKGLTVLVGENGSGKSTVIDAIRLLLGEDEYNRSGISLNDFHRPFSIESATPVANILIDCIFDELEGPEQIAYLPWLKPSNVNQAELHLEAINKEDARGRIRKNMWGGTSRRGIFEWELVNSINCVYLPPLRDAEEKLNSYRGSRLARLLTSLNGSGDEDKRLEEKVKEQNNELLSDPLIQNANGLIKKCLIDSVGEILGQDVSIQFSEVNFNKIIHQLRLLFFPEIKEGEIPRESFRDISENSLGYNNLLYMATIIAEMEAKSDVSTTSLKVLLIEEPEAHLHPQLQTRLLQYLQSAAEKNNIQVIITTHSPTIAAAVGLDPVVVMSLSPLSREREAIALTNCCLDRKTKFFLERWIDITKSVLLFSKGVILVEGISEAILFPEFVKKILGQKTLEDYGISVINIEGIYFKYFMQLFCGYKISEGNFEPCDNIPIRCVGITDCDPEGDNLGTSDSQSTEDCNNPQRYLVCELREHTTNCRLYINSKTFEYDLALEGNNLAIMSSVLENITETNGPIKKRAGQSKNIDWRTKEKKQKTDEALWFLNHVDQKKGEFAQELAMLLKSDDKPDFEVPSYIRDAILYVTGKSN

SEQ ID NO: 66453 - protein, 624 aa, Methanosarcina sp. 2.H.T.1A.15
MSQENLTEEERKRQELLEQLYKRLEHDEHIEKLSLEQLEFIVNPIANSSFLNSCPGSGKTEVVGFKAAYEASSWDSPYAGMAILSFTKNAASEIWKRANKYSKQKAVQFPHFVGTLDSWLHQYIFQPFCYSVMDYKGKDGDTSVNIIDSDSNAPFLENYKSVISSQPSYQEVKVNEYYIDCNNSIKFNRNRERNLNSYQRRILIENKLKFAKSGFATYQDAEFWSYRLLNQNETILDLISKRFPYIIIDECQDLAPSRLDVVEILQEKGVIFHFVGDINQSIYDFIDVDPFKIQDFIAVSGMHEMELTKNFRSNQDITNLCAKLVGIQCPPEGRIPREDASCVLWECPSDELHRLPSLFEWYLNSKNIECGNCSIVVRGKALINKVKKTNPLESISYDIAKAFFLWNSEFKKTESIIEALELLGRSICNLAYKGRGNHQNQHCPETFEHIDWRMFLSNILNSSKELATFKNGSRLQTWSQWCGSLKGFLEKYFLNLPDTYVKWDEAKRKIKAPSRKANELVMNSLSSSSSSKKIRMTTIHDVKGETLDALMLISNPDRHSKGGHFEHWLENPTSEYARFAYVACSRPKDLLIVVVPPLNEIQRKKLEGIGLVSQELPGTLSHWF

SEQ ID NO: 66454 - protein, 611 aa, Methanosarcina sp. 2.H.T.1A.3; identical to SEQ ID NO: 66452

SEQ ID NO: 66455 - protein, 624 aa, Methanosarcina sp. 2.H.T.1A.3; identical to SEQ ID NO: 66453

SEQ ID NO: 66456 - protein, 611 aa, Methanosarcina sp. 2.H.T.1A.6; identical to SEQ ID NO: 66452

SEQ ID NO: 66457 - protein, 624 aa, Methanosarcina sp. 2.H.T.1A.6; identical to SEQ ID NO: 66453

SEQ ID NO: 66458 - protein, 611 aa, Methanosarcina sp. 2.H.T.1A.8; identical to SEQ ID NO: 66452

SEQ ID NO: 66459 - protein, 624 aa, Methanosarcina sp. 2.H.T.1A.8; identical to SEQ ID NO: 66453

SEQ ID NO: 66460 - protein, 611 aa, Methanosarcina mazei; identical to SEQ ID NO: 66448

SEQ ID NO: 66461 - protein, 625 aa, Methanosarcina mazei; identical to SEQ ID NO: 66449

SEQ ID NO: 66462 - protein, 661 aa, Pseudomonas syringae pv. persicae; identical to SEQ ID NO: 62490

SEQ ID NO: 66463 - protein, 634 aa, Pseudomonas syringae pv. persicae; identical to SEQ ID NO: 62491

SEQ ID NO: 66464 - protein, 566 aa, Hafnia alvei
MRIETVYIKGFRNYCDAVINFNETNLIIGANDVGKTNLLYAIRLLLDKSLSELDLEPKSNDFHVSSAGEQVENIEITIKFIDVSEDAVISKLGGYVSDEGETYIKYLASSLTMDYKILLSHEHDNFDEVSNRFYLKCLSLRYINSQRDLEKYIKIEKKHLLRLAQEVRSEKDTENDGVVFTELNKLLTEVNEKVKGISYVASATEELNEELRKLSYTHDRLTVQLDTGAIGIDQFIEKLELSANTNGKKLMLGGDGFNNQILLALWKAKSVREHDVESEVVIYCIEEPEAHLFPHQQRKLAAYLIDKLPGQAIVTSHSPQIAVNFKPDSIIKLYYDDGETLAASNGCSDCISSAWDGMGYRMSIIPAEAFFANVVFLVEGPSEVIFYTELAKALNIDLDYYNISILSVDGIQFEVYRKILTALNINWIVRTDNDGSKVPHKNEWQFAGVNRALALCGNNKEPNSSIPIDSKALHTKWGTISPIINPNGIYISFLDLEGDLTNDFSKHVLDYTGKDNQDDAADYLRGKKAIRMRELIKEKKDFLIELKNKDIARPLIHTLKFARGEL

SEQ ID NO: 66465 - protein, 540 aa, Hafnia alvei
MNLTKEQLDAINYDGNLVITACPGSGKTTILVHKIFACLSYSKDYQGVVALSYTNKSSEELKARCRRLGAELNSSFFGTIDKFFINEIIFPFLRQIWGGNEIGLEIVKYIDLPQELKDKTNKYFERADFYSNTSFDGMDSLRGVYLKGMVVLDFIPHLAFYIARTSYSCQRYLMAKYISFFVDEYQDTGYFTHQVFKFIPTLGIPLIIVGDLDQSIYLYSHRSSDSLKDFMTDSSFCHKEITVNHRCHPSIVNYANRIKNFECQLTPCEEIFVYRKCIDGNQIDVAKWIGEILDKVKNKFSISDNKEIAILVRSNACAELVSDNLEVSNRAYLDNDLTKSGGKVSGLANDLLCYKYNSNKTAQSILEGVLGNNIKRSEATRIRKAIKQVRRTSDTLLIDVINKVVVILLGTELEQHHKSALSEILVTPRMQNNYLDVRSDEVQIMTLHKSKGLEFDFVFHLDLYDWILPKRVFIEGSYDVVFENEQQCTNLHYVGITRARKGIVLMHSTKRYNGSGDIKNGAPSQFLLKPGLDGLYKKLN

SEQ ID NO: 66466 - protein, 736 aa, Bacillus sp. SA1-12
MKITKIKIENYRLLKSLNLDVENDLSLIIGKNNCGKTSLLSILEKFIGTKNGSNDFSYDDFNIDFQKNLNDIVDSSSLLSKMQFPIGIKLKLFINYDELDNLSNICQLMMDLDPDNRTIVLSFEYILFEADLKRLRSDFTMYQEDIIKAGGEILPSNLDTSDNPISFNYFNDFMKKNHKNYFKLQKKSIEFNSISRKENDLEYIDLTRENIPLNKIINFKTISAKRNISNNTSDNSLSTLSSKYYESKADNEKGLVEIQKFKSTLSKTDGELDGVYEELFKIVIEKVKQFGGIKEGDSNIKIVSTLQHKELLKGNTTVMYEHIEKQSLPESYNGLGYLNLLSMIFELELIISNFRKEHKENEMPADINLLFIEEPEAHTHPQMQYIFINNIKKILSEASMGIDGKSKFNLQTLITTHSSHITTASNYNDIKYFYKKAKNEVISKNLKDLEKEYKIDGEIKNFKFLKQYLTIHRSELFFADKAIFIEGETERILLPAMMKKIDNNPEYSSSPSLISQNISVVEVGAYSQVFEKFIDFIGIKSLIITDIDSGKQVIEDRKTKTKKCRVSDNEASLTTNSSLKFFFEQAIENNIQTGIHKNELDYLRSLSFNQKLIKKNRENRIWELDKNGNVAIIYQTIEPNSKNQKYHARSFEDSFFHLNREFIIENKDNFHSLKNIKHFENDDMDVYDLSENCIDKKPSFAMEILLNSKMDESENEYSNWEIPDYIKEGLLWLKYN

SEQ ID NO: 66467 - protein, 638 aa, Bacillus sp. SA1-12
MVEIQLEEEVIQVFKHIEKNKNFLLTGGAGSGKTYSLVQVIKKVIHDNPSSMIACITYTNTAVKEIGGRVNHSNLRVSTIHEFLWENIKKFQKELKMGLVSLINNENSKIKIQGSNEIIDQTYFNKLEDGIQYKEFNLVNSGIISHDEVLELANYMFKSHPLLCDLLKDKYQFILIDEYQDTNPLIVEIFLEHLKQGKKKTIIGFFGDSMQSIYDDGIGSLEKYIASGDIVEFQKQENRRNPRLVIELANRLRIDSLVQVPSSDQKAPNMYDGSVKEGSIKFLYSSNDNLDMIKTTSFFETWDFKDTTQTKELNLTHNLIAAKAGFSELMEIYDKDPIISFKNDVLNKVKQDSEEIREKILNDNNITFEEVVDLYPIRNRQRLLKKDLIMQDSHTNQLYNQLKNLPFSHVRKIYINKDSLIDDKKQDINDDNKNGTKRDDLIKHLFKIQSLIQLYKDKKYNEFIRRTEFKVTSISKKREIKALVDKIEEMSDKTIETVIDFADESGFCKKDDNFNNFIEVNLYLFNRVKHVKYHEFQRLFKYLEGFTPFSTQHKIKGEEFNNVLVILDNGKWNKYNFEYLFCNRTDKQSILTRTQKIFYVCCTRAKENLIVFYHNPSIPIINKAKEWFGECNVHEIVE

SEQ ID NO: 66468 - protein, 609 aa, Candidatus Filomicrobium marinum
MRIRRLRLSNFRSVADGEVIFPGHTVIIGGNSVGKSTMCEALDLLLGPDRLSRASPIDEHDFFERRYLDDDGDPIVIELEVVLTDLTADVLTKFRTHREYWNTTTNTLLDETATPEDVEADDVVPALRIRFEGAYDIEEDEFRAETYFASPPPDDETRRAKVTRPAKRQFGFIYLRALRTGSRALSLERGSLLDIILKLKDDDRSAMWEQTLGAMEDLDPAIDAIPQLRAILDEVDRRVRRFVGLSDDDRTFRLYPSALTRESLRRSITLFGSSERSNIPVPYWRLGSGVINSMVFSLLTFIADLKSNVIFAMEEPEIAIPPHTQRRIVQFLQREMDQSILTTHSPFVLEQYDPENVILLERGSGGKVAGRRIEVTGIKAKAYRGNLRRVLAEAMLGNGVLCVEGVSDGEAIYSASAILEEHSAEGTYTPLDLSGVTVVQCEGDGGLLRYGEFFSGLGLKTYAFYDRQKNEAISEEIVEVFDAAWELEQTGIEYLLADEITVDVIRTFLIEASDWDDYPYNAKNASLFEYDPDADDEAVQALCKRVLKSRKGAGYAQRLVELCTEADLPAIVVEALERISEDLPNELSAGEGDDDDDDDGDPEAPDDET

SEQ ID NO: 66469 - protein, 579 aa, Candidatus Filomicrobium marinum
MTNPEDRFDLCDKRRAILGDAGHMLVLGGPGSGKTTIALLKARRMVLERLQPAQSVLFLSFSNAAIRRILESAGSVLTRDVGRQVEIKTYHSFAWDILQSHGYLLSSQRTLGIVAAQDAAVIRAGLEDDEWLAEEDRLFQEDGRATYDQFAPRAADILERSAVVRDCFCSAHPLILVDEFQDTDEDQWRLVRALSKNSEIIALGDTEQRIYAWRKGVSPKRLNEFAETLGADTYDFQNENNRSPATGIAGYARGLLSPDVHLVLPDDIAFKRFRPGQFAIGLRAGLIKTWNETVKRTGHRDITVAVAARSRTMVRLISDALAQKLTLGVKEHGPVPHDVMFDQMQITLASRVIAYLLASQQNPRDERLAGALERISAVFRSSGKKTAIKTSDRLLGWAEKCRHGKVPSTKCVTALTAAFDAIDAAGFSGSPTDDWLLVRRALERADADELKRTGDHARYLRLLRRGSAIEDQLAELWKEAGTYAGAEAALDNAILLDQMTDSHREVSSISVMTMHQLKGREYDAVLLVEDQHRTFRGRDQEPPYMETRRLLQVSLTRARHFAYVLSATKNATLDVLFED

SEQ ID NO: 66470 - protein, 609 aa, Candidatus Filomicrobium marinum; identical to SEQ ID NO: 66468

SEQ ID NO: 66471 - protein, 579 aa, Candidatus Filomicrobium marinum; identical to SEQ ID NO: 66469

SEQ ID NO: 66472 - protein, 677 aa, Citrobacter amalonaticus Y19
MQLKKIFISGFKSISNENPQIINLDHELTTFIGHNGTGKSTAMEALNKLFSVDHSLRGISINDFHNADGGNDEKSKSLIIEAWFSFPKPNEGKISIPPLIEHLTIDKSDGVILFRVRLESKLSFEANPMGDIDEDVWVVNTSDDVVEESSKQKLSAAVRNSIQVSYVPANRDPLLQLKYSSKAVLGRLLKAIEWVGGSQEVIEEQAAQLNALTKSNPAMNEIAVAINASWGNIYKGRYLSQASLNFPLANIDEILKLIQLQFNPDETGNTVNVDRLSDGQKSLVYFSLIKAMFDIDKKTRELISSGEASNFNPEKMRLPIFSMISLEEPENHLSPHYLGRIIKLVKDYSRNELCQVIISSHSSSILSRIEPEQIRHFRLDKDSKSTVVNALTLPEKEDELSKFIKEAVKAYPEIYFSKLVIFGEGDSEEIIIPKVLELHSTEIDSHSISVVPLGGRHVNHFWRLLKSLQVPFITLLDFDIDRNGGGFGRLKYAIEQLAMFSESGSTYIHKDIAGLIPSWDDARNPIDFTIKYNDGATINIVNELEKCNIYFSSPIDIDYAMIEAFPDIFCEKDEVYGERGPQNTKKQEGKEEQDELIKAVLKKGNSGIRYGFSADYLKYFLWYRYRFLSNKSKPASHIRMFSKIEEKYTSEEMRAKLPSELIRVAEKTVTLLAGVIE

SEQ ID NO: 66473 - protein, 554 aa, Citrobacter amalonaticus Y19
MTIQWQPSEGITPTLELMDIILCDQSISVLAGAGAGKTELIAQKSNYLLQTGKCMWPKRILCLSYKKEAQENIKERVNKRCGQKGERFDSYTFDAFCKSIVDRFKDILPEHKRPLNSYDLVFNAKASNGKDKLSFDLIRNLAVEILKNRADIVDLFSFTYPHVFIDEFQDTRSDQYELIKILFKDRGTQLLAVGDINQSIMLWAGARKTVFEDYEREFNTTRKLLVQNFRASDEIQEVLRCFIHFVQNDANFSPITKNVDNCTIHCYDDEISEADGIADKIENFIASGIKEKEICVLAKQQSEQYTEKLRDKLTTKGIRNLDMSELQDFLKEPLGRIFAALFKVYTSRSSSSYTELCDLYLNLHRVTRGDEKEDSLIKGLSDKIAANREMLGDSPNPDLLISYIKDIISFFGLKKMMGRWNQYKSTHYWSQVWLSLERHLRNTIGATHSLNEAALMFQAENSVQVMNVHKCKGLEYKVVIFLGLEDQAFWNYNKEKFENDCVFYVALSRAKEKILVTTAKHREHRINNGYDNRKSNYQMVMPVYSFLIDHCKFK

SEQ ID NO: 66474 - protein, 650 aa, Pseudomonas aeruginosa; identical to SEQ ID NO: 65324

SEQ ID NO: 66475 - protein, 555 aa, Pseudomonas aeruginosa; identical to SEQ ID NO: 65325

SEQ ID NO: 66476 - protein, 729 aa, Enterococcus faecium MRSN 11639; identical to SEQ ID NO: 62500

SEQ ID NO: 66477 - protein, 597 aa, Enterococcus faecium MRSN 11639; identical to SEQ ID NO: 62501

SEQ ID NO: 66478 - protein, 690 aa, Escherichia coli MRSN 10204; identical to SEQ ID NO: 62940

SEQ ID NO: 66479 - protein, 577 aa, Escherichia coli MRSN 10204; identical to SEQ ID NO: 62941

SEQ ID NO: 66480 - protein, 667 aa, Staphylococcus aureus; identical to SEQ ID NO: 66148

SEQ ID NO: 66481 - protein, 641 aa, Staphylococcus aureus; identical to SEQ ID NO: 63103

SEQ ID NO: 66482 - protein, 713 aa, Citrobacter freundii
MHISELTLINYRNFKRSKFFFTKAINTVIGENGTGKSNLFRAIRLMLDDEMLFRAYKLDENDFSHELGDWKGHWIIISLKFSDISHDESVQSLFIHESGDVMNDEGEYIQSATYNLIFRPNISKRSELAEIPHGDFVELERVRSEIKVSDYEVIFTGRSYADFYDKEIYKKIVGDFDKCIFPDKIDVKDVGWNLGRQISLSKDVSFTFIKALRDVVSDFSGSKRNPLLELLELKSESLNDEDYEKIIDDVISLNSEIELLPDVIQVSEGIHSTIKSTVGEAFSPTKLIIKSKLPEEPKELLKSLTLSVSEGSEYFDGSISDMSLGGANLLFLTLKILKYKYLINKGKVANFILIEEPEAHLHTHIQKALFKNLNFDNTQIIYSTHSTQISESSKISRVNIISKKEKANDVDVCQPSTGLTPQEISKLERYLDAKRGNLLFAKKVVLVEGDAEEIMIPAMFFKHFGISLDELGVTIVNVGSTGFKNIASIFHESRLRKRCAIITDLDKSIYSSIKKTDGKILHAKKRKAERSEKLGKERKKILDDFCKGNDYVKAFFAEQTFEVEFINFFQNEKYLKSVVSEVYSNENKILTVNKDLSSPSIEICGDRVLSVAKYMGKGWLALMLADKIDHDVVIPPYILDALSFSIGKFNRVILISVLKYKRSKLGADETKDIAPGIDEILDKLNGTERLLRQEIRDLISKVFGVDDALVRMI

SEQ ID NO: 66483 - protein, 587 aa, Citrobacter freundii
MNELTLKGFLSDEQIKSVLHEGNAVVMACPGSGKTRTLSYKIAYELSKSKVNRFIIALTYTNSAADEIKKRIMELGVSIDNLWIGTLHSFCLKWIIKPYSALCDETRYGFKIIDPHDSEDLKLQLCSKYSRDYFKTDFGWCEYGLREKDKHGKEVVEKYYECLRDSGFVDFEQIVYLSYKVVSNNHFVAKNLSNIFEVVMVDEYQDTQVLQYELLFSLLKVKRNSCRLFFVGDPNQAIFNSMGGVALDFDLFSSRTGVKFDLLQLKDNYRSSQQIVDYFTNFRTVAGEAFEACGEFRNYKSSITFDNSCLMEDLDSNISKFITGAIEEGISVNEICVIAPWWYHLSEITRRLMAIMPDVAFNGPGITPISHNRESLWYKFAKIALISPSPYNYRHRISTAGEIFEQLIDSGFFIDLKSCSPKLFLKHCNAVKVNEVGGVEYLSAFFEKACLYFGFDVLSSIEFADSYDAFFSSAEKRKEKLISLNLAVLTSVEHYKRMFERKKGVTVTTIHSAKGLEFDCVIAFGLLDGVMNKFGEENDHSKRLLYVLSSRARKKLHLISEGDRRYSRGVYSVNKVLGSVNYDYTAS

SEQ ID NO: 66484 - protein, 634 aa, Citrobacter freundii
MKLEVIRISGFQSFGPEPTEVSLENITYLIGPNGSGKTAALQALCKLFAFDPALRRIHRSDFHVPYDEEEVPEERQLWIEADFLFPELDEEDDNSTVAPHFSHMRLDDPGGLPRVRFRLTATMGLDGDIDENLVYVLDVNADGSPQNTAQVPRAERNHIQVHYLPARRDPADHITYGANALLGRLLRAVRWDAERDTIKGLTDQISDSLAANPSVKAFSKSLKTTWATLHKGKFFADPKITFVASEIEALLRHLSVSFTPGHDGSLVDFSRLSDGQKSMLYLSLVLSSQAIGRAVLAEEDVSFDPDKLRPPVFTLVALEEPENSLSPHYLGRIVSALYTMTKNVDAQALIATHAPTMLRRVAPELIRYLRLTEARKTRVTCIKLPEKADDAHKFVREAVQAFPEIYFSRLVVLGEGDSEEIVLPCLLQAKGAPVDESAITIAPLGGRHVNHFWRLLSALQIPYLTLLDLDVARYAAGWGRIKYVNDQFSAYEPYKKLPKDHGIPSWKDKAQKVRDFDNYFELLEERGVFFSSPMDLDFSMLLAYPEAYDVDKEKPDESTIKAVLGKSHHDSSQYSEDELMLFSTYHQRFKLGSKPAAHIEALTQLRDTELLENMPESLSRLADAVIAKLEELPE

SEQ ID NO: 66485 - protein, 559 aa, Citrobacter freundii
MIAAEAWQPADGLTLEPNAKRAAKARKRCLALTAGPGAGKTEMLAQRADFLLRTGTCRYPKRILAISFKVDASRNLKERVERRCGTDLASRFDSYTFHAFAKRIIDRFRPVLTGKDVLDAGYTIVDKKNGPSRTQIEFGDLVPLAIQILKTSKIARHAIRQTYSDIFLDEFQDCTNLQYDLVKLAFQGTSLRLTAVGDTKQKIMAWAGALDGIFQTFANDFNAVPLNMYRNFRSKPQLLRVQNEIIRTLDPDSVMPDEQLGGDGGEVYAWRFEDSCKEAVYLADLINGWINTEQLPPAEIAVLVSKQLELYADHLMTELEARGIPYRNEQQLQDITIEPAARLIVDYLSCLYGKREPKAWIRLMNQLIPFADEEIQSSARKDLDQLIKKQRKKVSDARHTDSPFSDWVQLAIEFLKYIGSKILVALSPDYETRSRLNDVIRETFARIKELHKLEPDLPKALGRFADDQAVRILTIHKSKGLEFDSVIIMAVENEIFFGDQDENRCAFFVGVSRAKRRLILTHADQRERPANARRWNINRTAQSEYFSYVTPFVAGNKFK

SEQ ID NO: 66486 - protein, 784 aa, Pseudomonas stutzeri; identical to SEQ ID NO: 65258

SEQ ID NO: 66487 - protein, 650 aa, Pseudomonas stutzeri; identical to SEQ ID NO: 65259

SEQ ID NO: 66488 - protein, 581 aa, Halomonas sp. A3H3
MYLAKLKITNFRKLQSVDLEFQPGLNVLVGSNNIGKTAIVDALRALLAGYDEPYPRFNNDDMHRPKGGDPAGDIQFKYVFQDLDVDDEADFLAALKPDEDGRFEAHINIRYSEADKIGRLRVRRWCGDHEEIGLTADMIENLRGVYLPPLRDASQGLKPNRHSKLARLFQLLADDEGRDGINEALKLLDEELRGHDPIITAHSAITSRHDTMLGSQLAQVLDLGLSGSDFQKLASRLSLVVDDFEIEQNGLGFNNLIYMAVVLCELARNADASYRGLIIEEPEAHLHPQLQAVLLDYLESIQDGEGEKPVQLFVSSHSPNFASIANLDSLTCLVETATGVETFFPRTIQFERGKREKLERYLDVTRAELFFARRIIFVEGAAELMLVNVLAEMCGYNLRKHGVSLISVEGLNFDSFLPLFGEEALKIPVSVITDADPVSEADETGETVAVYPTFDEEIRVSNNTARMKKNEDSLVKVFCGLKTLEYDLALVDVNRIAMLAALRNMHPRIAQDLQTKVEEEDGDAAKARTLFSGMFERKQNNVQKGRFGQSLAQVIAEGNAFVVPDYIQNAISHACQTAEAK

SEQ ID NO: 66489 - protein, 569 aa, Halomonas sp. A3H3
MNHPSEEQTQVIDASVEPLSVIACAGSGKTFTAVRRLANIRQKLGNHRGRVALLSFSNVAVDTFRKEYQDLGLSSNVNNRVDINTLDTFITSNVLRPHAYRTMGAQQTAFLVTGGEAFLKGFTFQTDPYPRAINEMQVGIDAGGVYFCYSDIKSEMHRLNTAQAADVVHRLGRIGAYTHNLGRYWCYRTLADQPGILRALVRRYPHILIDEAQDIGTVHQVIIEQLVSAGCQVSLIGDPNQGIYEFASADGAFLSKYGQRDGVNSLELKRNFRSVPPILDLANHLAGRTDAADREAPDTVHGTFFVAYGKNDREQLIVSFQRAVEAAGLRLERSAVLCRGRKQADKLAGNKGSPGWGIVKRFTQAAILRDRFKDYQGAFRLVAIGIVNLLVDAPNGMLAKLTSQHEDQALRRLIWAFTRNPDMGLPGVSLNGKAQWHPLLLNRVKTLLAQINKDCGLTSVDKLGSKLTTRDLPDGPLLSAADLNGNNYRPRIRVDTVHQAKGESLDAVLYLTNKEHAEGLMNGVDTEIGRIGYVAVTRARNLFWLGVPASALVDLRPGLLDLGFQETEA

SEQ ID NO: 66490 - protein, 679 aa, Syntrophomonas zehnderi OL-4
MKLDLAQIRNFRMLKELDVDFEDILSLVIGKNNSGKTSFLSILQKFLSENKPEFTFDDFNINTQKDILACENNNSSPEEYVEPLLSLKLYISYNDTDNLGNASALLLDLDSEMHQLVVLFEYFLGYEKYLKLVSDYSEYKSKGINRDFEYYLRNNINRYFTVRIKALEYGNETNFKIINSDIVSSVISMQIIGAKRDVDNEQGHSRALSFLAGKYYNSSVVSEEEFPELQKKLSETDESLTGIYHDLFRPVIKEIAAMSYNPQEAELSIISTLSEKKIFQDNTTVKYKHEDTLLPEDYNGLGYLNLFAIIFNIRIKLDQLSKKNKPDEDPAPLNLLFIEEPEAHTHPQMQYIFIKNIKKILTQHCLESSKDFSLQTIISTHSSHIVSQCDFEDIKYFFRESSTSVKSRSLKALFSKMVTAENTPTKEEEERAYRFVKQYVTLNRAELFFADKAILLEGDTERMLIYAMMKKVDECTEADNYNPLLSQNISVIEVGAYSHIFATFLGFLGIKTLIITDLDCAKSDGSGKPKKCRFSEGTTTTNASIKHFTQCSDLTDILSLSALPITLSYDNNTTSWSLDEKGQLRLLFQKEENCYQARSFEDAFICNNLQFIVDHKNHFTSLKNITVLDNSPPDFYDIADRCISSKTSFALDVLLYGGTHNEKWTTPLYIKEGLEWLAQ

SEQ ID NO: 66491 - protein, 536 aa, Syntrophomonas zehnderi OL-4
MAGTVMESIISCLDGKKNFLLSGGAGSGKTYTLMQTLNHIFKSNSKAHVACITYTNVAADEIKERSPYSKLRVSTIHDFLWDEIKDYQKNLKAAVINLISAEKVSKGSGIAYSGECEINEQTFTYVEYQNYRDLEHGIISHDDLLKIANHMFATYPLLSKILCDKYDYIFIDEYQDTQSVVIEIFLEHIKVAAKDRLCVGFFGDKMQSIYDSGVGNIQSYVATGDVCEIIKEDNYRCAVNVISLLNHLRFDIQQQPAKMTMEGIVANKSGSATFIYSINEFDLQAFKSSKFATGWNFENYKETRVLFLTHRLSAIRLGFGELLAAYSNNDRLIGNEPDRLARHLLKIGSILFCYGRKDFAYVISEMQRKIKNASDKKQISESLSRLYANLNISIEQLIEAFDKERFVRKDDRFNEFLENHAETYDKIKVLPASQVLAYFKYYNDFSPYSTQHGIKGAEFDNVLVIMDNGRWNNYNFKYLFERTPGKESVIQRTERIFYVCCSRAMDNLVVYYPNPSARIIAQAKALFGDENVCSLD

SEQ ID NO: 66492 - protein, 618 aa, Neorhizobium galegae bv. officinalis
MYLKNLSLRNFRSFGQSEIPLCKDLTILVGENNGGKSNAIDAIRLLTAPLGGRRELYCETTDIRFGSDERKFELTATFTELTPAQQGRLISAATDAAISGCIFGLKYDETTGRFPVRPVLWGGHQQGNPEPGCHDMVRHVYLPPLRDAKRALASGNPTRIYALLNHFLDGEKPEALAEALRRGVESEILGRVGGAVEVGLSALTAGVRRQAASLGFANDEKLIDIARDLRFKLSDHGIEPEDLRYSGHGYANLLYMATIAVELEKVNDADLTLFLVEEPEAHLHPQLQAAVLSFLDEQAEKSRKPRADIQGPAGELQVIVATHSPNLSAWVESKKLVFFRSFLPSPDLAEAAVAEEEPHVLAGVPAEIMPEIEPNPVMPVARPRRETRCIPLSALALNPVERRKVDRYLDVTKSALLFGGRVLLVEGIAEALLLPVIAKKVVLKGEPEKLRLFRSAVFVPIDGVDFEPYAKLLLSPYNEVRIADRLVVLTDGDGGEVADGAMTPGAGRKRDLEAAAAELGASDLLEVVINDYSLEAELVQAGNGALLKGAYVKLHPRSADKWEAAVGQAGAAQAVAIQRLFETTRKGDFAQLVAEEINNGAAFTVPGYLKTAIEALVK

SEQ ID NO: 66493 - protein, 574 aa, Neorhizobium galegae bv. officinalis
MIVAPFKPTDEQKRVIEHPGSAFIAACPGAGKTRVMVERARKLLNGGATSGAIAFLSFTIAAVSELDDRLRREGVIDTPAFPHFIGTFDGFLWQFLIAPFAIDGCAAKPKLIPDKDDRIIQPFSGAQALPLECFDRTTGKAIPALIQRHGFRGQLKAHETAARNARARFLERGELDFTDARSMALARLRDPARGAVLGRALAARFLELIVDEAQDCNPVDLEIIDWLRTAGVPVKVICDPNQAIYGFRGGVTRELSQFAEKFGKAERLPMSGNFRSSGHITKCLVALRAPNMRGAIDEALGECRDEPKAVQILSYSGRGVPSTIGAKFQELVRAMGFPAQDCPVVSATRRTGANALGHPQDTGVRDLSYRLAVAVSDFHFSFEIGGRKEALVAIHRIMLELGGGMGGKTYHQHLTDTDVSPESWRPAALALAQALKFSPERFATAEAWHDEARRLLAPLLPAGGPSINQRLRRNGDLDKALSVAPPSGHAARTIHSVKGMEFPAICVVMSPSTAKGIVDFLTGDAAVDNEEARKIYVGASRAQRLLAIALPRTQAPRLRDLMAGMGGSVDFTAL

SEQ ID NO: 66494 - protein, 711 aa, Neorhizobium galegae bv. orientalis
MYISRLQLVNYRNFAQADVIFKKGVNTIIGENGSGKTNILRAIRLLLDESMIRMIYRLDEQDFHRGLKDWRGHWLIISLEFSEVSEHESVQSLFLHNAGNIEGGSVGRATYNLLFRPKAAIRQALGKLTPGDLPGLASIRSKIELDDYEPVFTGKSSVNFCDPGIYRSVVGDFDDVVFPEGLHDASILGGIIPGGFSITREISFTFVQALRDVVADFQSNRTNPLLSLLKRKSGEIDPVSFEPISAKVKDLNGAIEALPDVRTVRSDIRETITDAAGETYSPRGLSIRSDLSDEADRLFQSLKLFVAENDELYEGGIHELSLGGANLIYLTLKLLEFKYRSRKESFANFLLIEEPEAHIHTHIQKTLFDRLNYADTQVIYTTHSTHISEVSNVENVNILGRDAGRCEVFQPSQDLKPDEIGNIQRYLDAVRSNLLFARSVLLVEGDAEEILVPILVKKVFGLSLDELGISLINIRSTGFENVAVLFHDRRIRKRCAIITDLDAAFIDVVEDALDLEADKNRKKKARKAAKVGLERQIALNTLCDGNNWLTVHFADHTFEVDFVMAGNVATVVSVLNDVYKDAPTIALAKKELESGKIEEYGTRVLTMANHVGKGWFAIVLGKAIHADVKIPDYLLDAIFQAHLPVSKETFAAILTYRLRLIGEAGGDEIELGKMRHQIEQYRVDKLDFAGVRAAMFMAFPADTINAILADF

SEQ ID NO: 66495 - protein, 595 aa, Neorhizobium galegae bv. orientalis
MFVWDKDDLNEEQVEAIDEPGNVFLAACPGSGKTRTLIYRIAKQLSELRSEKHRVVAITYTRRAADEIHERIERLGIDTSQLWIGTIHSFCLEWILRPYAGFQEELKLGFRVTNSHETEAVIEGLIEQRYPSLTIFDWGYFFTSSGYQLNCSDASKTGALQRLLGEYWALLQKNRQIDFELILYYAYQLISSVPVISKLLASIFRAILVDEYQDTREIQYVILASILRQSGENATAFIVGDPNQAIFGSLGGYAVSPAEFSQMSGLPFRQMHLSSNYRSSMKIVGYFEDFSSPTVKVEAVGKERDYPSIISYNNQVRKDDLQAELVRLIRLTIEEKKIAPSEICIIAPWWTHLASAARQLMTAMPEYTFDGPGMAPFARDPDNFWFKLSRILLTTPSPSLFIKRRRWAGEVIDALQAVGISVAGTDQRELLMICNKVTCLEQDGLTYLRQAFSQVFDALAVDHTRNASLQEHHEAFFESAQRRIARLIKEGSVAISDIAMFRKVFSERSGITVSSIHGVKGAEFDVVIAYGLLDGMVPHFTAVDQDGSARKLLYVICSRARKNLYLISEVGRAKGRTRTYSPSPLLASKQFAYDV

SEQ ID NO: 66496 - protein, 638 aa, Listeria monocytogenes; identical to SEQ ID NO: 64506

SEQ ID NO: 66497 - protein, 635 aa, Listeria monocytogenes; identical to SEQ ID NO: 64507

SEQ ID NO: 66498 - protein, 596 aa, Paenibacillus sp. DMB20
MRISRLLIRNFRGIKEGELLLSPKTVLVGDNNIGKSSVLEAIDLVLGPDRLSRPSVINEHDFYAGEYLDNESKLVEINIEVVVVDLTEDQQRHFRNHLEWWHNENQTILDGPPPESTDEEKVVPALRVSFTGRYDEDEDDFIGKTYFESPMKDDGSRDIFGTKDKRLCGFLLLRTLRTGSRALSLERGSLLDIIVRLKEINLPMWEEVLIKLRKITVVDDPALGVTEILTSVQEGLRALVPSEWADKPHFRVSDLTRSSMRKALTVFMGTGAIRSDGEEYAAPFQFQGTGTINTLVLTLLSMIAELKQNVIFAMEEPEIAIPPHTQKRIIHSIIAKSAQAIFTSHSPYVLEELDPSEILVITRQHGILSGKPAQYPPSVKPKAYRDEFRRRFCEALLTRTILITEGRTEYDSFPVAARRLQQLFPFKYRTLEELGIAIVNAEGESKVATLGAYFRSIGKTTLAVFDKQADESKKLIDLAVDHPFEAQEKGFEDLIVNGSDIAALRRYAKSVTEAGEWPTHLSKVTDSSTDEELKKSLREFFKQSKAAGVTSDFINQCEESEMPSFITDTLQAIQAIIETRAGKSGENEEDNDDLLG

SEQ ID NO: 66499 - protein, 558 aa, Paenibacillus sp. DMB20
MGGPGSGKTTIALLKANQIIEQDGLSKGQLVLFLSFARATVSRVEEQVGQMISSGNKKHIEVNTYHGFIWGILRSHGYLLNSNSPLKLLTPPEAASRLANISNEQEKTAEKRRLFDAEGIVHFDLFAGLGAELLSRSNSLARIISDAYPVIILDEFQDTNPDEWSFIKELGKRSRLIALADAEQRIYEFRGADPARISEFIKQYNPKQFDFGFENNRSNGTDIAIFGNDLLSGRNKEKKYNNVHIVTYPFRKGNWLHFDVKIGAIKAARRLIAAGQKNWSVVVLVPTKKLMMEVSDYFSETQNVMNKTLRRVPHEVALETTGPSLAAILIGELLDLGVAKEDGLNQLIKNLCEHIRGRNGNEPPSKANLELSTALLDYLATGKIRGTKRQSIINDCKAINDAIYDLEYSGNPSEDWIQIVDILSKSSSDVIKQVVVDSQYLRILHKGSELRSSLSTMWRSYGSYRGAGQAIRLSLLQDYFSSSTKEYRGIHIMTIHKSKGKEFDEVIIYEGLFQGKIVNKIGGAKSIEQSRLSLRVGVTRARQNTTIITPANDICPFL

SEQ ID NO: 66500 - protein, 769 aa, Serratia ureilytica
MSAADATTSLSGQISLRFVELCQFRRLGKVQLEIDPKTTILVGANNSGKTSILAALRHFLADGSSFGAFDISVSQWPKLRELGRAWDALEEDPSTSGASEGEWEEQLETLLSAMPTLDLWFDAKAGMFHYVSPFLSKFSWKGGGVGVRLRLEPASNIEDLKQLAWKYHLTRIPVKDMGKDSLAWPIDLLDFWLREPSQLGQVWAYKLDADNNPLDGIKTYVSQVLDADSSPIDRKHLQKLIKVDFVAAQRGLGSEEADSRSASGPHRIGLFSNQLLKFARQHLNVAATGHGHRADLIKAVADAQQELDKKIHEAIGPSVEEVKELGYPGLHDPQEIRFRTRIQTAELLDHGTAVQYSMQKDSLEELLPEYSIGLGYQNLQSLSYQLVSFKAARLNPEKGAPAPVHLVMIEEPEAHLHVQVQRIFPGKAHKLISPNGSNESGLKSQLIISTHSSHLAHAENFDRLRYVRRIAKSEEQNMPTTEVVNLGQVFGDDKTTRQFAERYFRVQHTDLLFANAAIFVEGVAERMLLPLFIERDFATLNSRYLSFLDIGGSHAHRLRSLVERLRIPTVIITDIDPVEERPGKPKKNGDPTTTLVAVANTGQPGLQCGNPTLRGWHPKLQQLEDFKNPKNEHLVWKEIAECSVRFAWQLPVAEADGQWPSTFEDSLILRNIPWFKQLIDEKVDGDGKQIKPPKGALGSVAREVAENDNIPELLAALHKLMHGSFNKGDFAASIFEMVAADEPIVCPKYIVDALEWLQTQLEPGKEVMP

SEQ ID NO: 66501 - protein, 658 aa, Serratia ureilytica
MTNSPILDGNDRDAGVVEEICGYLTDIPPRNYFLFAGAGSGKTRTLVEVLRRLTGVTEHEKGGQLARSLKMYGRSIRVVTYTKNAVSVINGRLGDNNLVSVSTIHSFCWELINGFNDDIRESLIALKEAQLAKETAEAQAKPKGITAAKQRDLDEITNEIEDLRTTEVFNYHPDRNTYGPGALPHNYVLDATAWLLQNKPTLQSILKDRHPIILIDESQDTMKGVLDSLMVLAKKRERDLTLGLLGDHRQRIYMDGHADLPSIVPESWATPELQMNHRSQRRIVTLINKIWETELEGRTQPTKGSAQHPRTEKAGGTVRLFLGDTSRSPEDKVLSERWCAERMFQISGIADWNQGQYQLLALEHKLVATRGSFLDVYEAMVLLDPNAAAPSGSGDNKGPSTVQILLNELAHLEACVSNEGIVNEFKATEVFRRYGGLDNMPEDSDARVYRTDEMLEAIAVFAMACANPESTVAEVLAPVLNAKLFEVDHRLQEAYADKSPAPPAPGRGEDESKQTRVRRGWCALFAAPWKQLKCYRNYLAGISELATHQVVKGSEFKHVMVVMDDALAGGNLIKYDKFFGGAELSPTDKKNAESGKETTIDRTLRLLYVTCSRAQESLALVLWSSDPTAAMARIEESMWFTKDEIQVIPECLVTGLSR

SEQ ID NO: 66502 - protein, 771 aa, Pseudomonas syringae pv. syringae HS191
MHLHSYRLKNFRRLKDAHIELADDISIFVGSNNSGKTSATQAIHAFVTGGRDRFTLYDFNSTCWKSFDEAADIDLALPLPEGFSFPSIDLDLWFEVAASDLYLVIPLLPSTAWEGSKVGIRVSLIAKSPINLIQNFQEAKAKGAVQTAELPPESQYIPWPRSITDYLQRELKSEYELRYFILDHSQFDESFREVGDYVPDELGGEPGGGTILKSLIHIDNLGAQRHLADPSPEAGGRSEDLSKRLSRFYKRNLNQRQDDHIALKALFDSEQALNIHLDGVFKPTLDRLAKLGYPGVNNPRLKIMSALDPAHVMSQDARVHYQIGDGEDTATLPDSYNGLGFKNLIYMVVEILDSQARWATMDNRPPLHLLFVEEPEAHLHAQLQQVFIRNILELLNIEGDDGSIFGSQMVITTHSPHILYERGFKPIRYFRRKKVGNEQLTEVLNLSAFYQSQPDDRDFLERYLKLTHCDLFFSDAAILVEGNVERLLLPVMIRKSAKTLRSACLCILEVGGAFGHRFQSLIEFLGLTTLIITDIDSVALVAQAADDNVDDEEVEEFEVPADAEDDAAGQVRDNVQDPAGEPMVPAPKKKYGKACLPSEPGAATSNQTLIKWLPGKLTIEDLRNASEADKTHVLEDDAKVRVAYQTERAITWNGASETLCGRTLEEDFGLENPDWSQAIARKPLGLIVKGEAAGPAALAKGLNQKVSRKSFDKTKFALAVLTEDEKAWHVPTYIRDGLVWLKDEIRIELETVLPDAILIAEEDLAIGGKHE

SEQ ID NO: 66503 - protein, 651 aa, Pseudomonas syringae pv. syringae HS191
MSSRANKPDTQADIDLRNCLGNVPPRSFIMKAGAGSGKTTSLIKGLSSVIQMHGDKLKKTRQRVACITYTEIAAGEIWRDVGSDPLVHVSTIHSFMWLLAKPFQNDIRVWVSGRIVEKIEALEEKRATYGPRVQQRTKDKDTRDLERLHRQSGRIAAVKGFRYGTGSNYAKGILGHDDILKLVPCLIAERPLFRTLIARQFPFVFVDESQDTTSEVVEALKTVEREPGVTLCLGFFGDPMQRIYATGTGQVEAEPTWADIPKPENFRCSTKVLNLANAIRSDGDDLVQTPGQRLGNDGIVPTPEGSAHLFILPADDKRDANLVRVREWMAAQTGDDHWRSDDDDSAWVKLLVIVHQMAARRLGFGDLYTALNSKAPSAFKDGFLDGSAWPISPCVKFLIPIAIAHTRGRQLEVMRLIREYSPLLDKDSLVEVSIAERLKELGHLVALIAAGIVGNPGVTIGDLLRQVHVSELLILDPRLVSYLDPNAVVPVQPKPDEGVDNDDDVQEDDESDKEMASMDAFLACPASQLLPYHTYISERSPFWTQQGIKGAEFDRVLVVLDDAESSHFQFSYEKYLGLKDFSDNDRKHIDAGEETTVDRTRRLFYVNCTRALKDLAVVLFTANPEQAEAHIRQLDLFEDNAIHTGAVFEVA

SEQ ID NO: 66504 - protein, 652 aa, Pseudomonas syringae pv. syringae B301D; identical to SEQ ID NO: 65096

SEQ ID NO: 66505 - protein, 631 aa, Pseudomonas syringae pv. syringae B301D; identical to SEQ ID NO: 65097

SEQ ID NO: 66506 - protein, 753 aa, Candidatus Moranbacteria bacterium GW2011_GWD2_36_12
MYISRVYIKNFRNFDEFDLFIPDGEPLTIIGSNNSGKTNFLQAIRLVLDSNIPTWERRLSENDFCWLKEESCWTKGEEIIITVTFSNVSDKEEIKALLHSIAPASSNGDDAQDGLDANISFVFAPSTFNKSESFDINDDYISFLVAGRYHPSGYYYSSDGTIQEYDNNILSSLHACDNKEEFYKYFYLSADDIEKIRENKEISFEKQLTKQIYANKIRKHINLLFLDALRDVKNDFYQGYNSLVSQLIRGAVQNGKNNKIFEEVTGALKTLRTAGSTPEANLILDEIESRLQNEKVNLLTDKAELVISTPKITPENVGRYFNFLVNLNEGIKKDSLDLKVVGLGFQNLAYISAIFTLFELKKEIYVNDSDEKIKIIYNLLLIEEPEAHLDVQNQKFLHTQIENKTEKLMDDFPAGDESASTEKPKFFAFTQVLQTSHSTHLASKSDLKNIVVMQKNVKQTSATNIDSILQLESGTYKHRRRILKQYLDATRSALLFAQKVVLVEGLSEKYALGTILNSYLKKAKPESKNLDIDSEGIEIVEVGGKNFDPFVALFNDNDKQGLKNKCLSLHDGDFQLKADADFSDYKIIHDSLNVSDTTTSTNIFSRSNIFTFEIETFFIPDPENPTSNNVEYLKLILYRFMKDGDYFKKDKTFEKKIGIINDVTTAISSHTIDKEKIESFFDEILGYEVSKPTLSLYLSSLLKAKLLNDDVEIDAWSNGYSPDDTTEISKFENLPEFIIPKYIEEGLSWLITE

SEQ ID NO: 66507 - protein, 320 aa, Candidatus Moranbacteria bacterium GW2011_GWD2_36_12
MVDYRIKLGTDFDLSQKQIEILQRNSDTLVRAVPGSGKTTILTLKIKNLLLDNSNISRICCISYTNVNVEDLEKSCSKMISSDLIGKIEFLTFHRFCIKYILEPFSYLYRSDKGLRPYKKIFNYKEHGPALIEFLKNNNTSENDIDNIIKSESIYYNFKLINNNWQPINNGDIHLNTVIKYLKFLNSNKLIDFNLISLLSLFIIKDNDIVKRSLNKSIDWIFIDEFQDVSEIQCKIIEELKKNVRDAENELKWFMVGDPNQSIYGFAGANPRSMFDIRNIFNEICDNNDNCEIKLDKTHRCSNNVFNFARNCYNQVITKI

SEQ ID NO: 66508 - protein, 753 aa, Candidatus Moranbacteria bacterium GW2011_GWE2_36_40; identical to SEQ ID NO: 66506

SEQ ID NO: 66509 - protein, 320 aa, Candidatus Moranbacteria bacterium GW2011_GWE2_36_40; identical to SEQ ID NO: 66507

SEQ ID NO: 66510 - protein, 753 aa, Candidatus Moranbacteria bacterium GW2011_GWE1_36_7; identical to SEQ ID NO: 66506

SEQ ID NO: 66511 - protein, 320 aa, Candidatus Moranbacteria bacterium GW2011_GWE1_36_7; identical to SEQ ID NO: 66507

SEQ ID NO: 66512 - protein, 503 aa, Parcubacteria group bacterium GW2011_GWA2_38_13b
MRDAENELKAKQGSRISKILKTHSDIITAEDELIQLLKNFKDASEEFFNSGKGKNIREEIDRLLKIFDEQANLQNKNIKFGPTEKLDSCLKTLEKLALYYDDLPRPGLGTLNMIFIAAELLHLNTQKAPKLILVEEIEAHLHPQRQLKIIKALQEESKKGIQMILSTHSPNLASVIEVERLNICYGGQIYSLAKNRTELESKNYSYLGRFLDVTKANLFFAQGVILVEGPTEQLLIPEFAKILGYNLTDYGMSIISTNNLGFEHFVNIFKRKKTPYNQIPIAVITDADKRQKAAIDDYVAKIKDDNNRVECFIGEQLYSDSDLESDGKKKTTFEKIIFKNAPKLKELYIQAYNSLKSRTENAVEKMDFEILYDKIDSEKAPIAQEVAQLLANKGTVAKSKISGVSVNGGTILSELIKKGALEEISSTEVRLSANKSLNEVDIRETAKDDFENVWGILQQSHKQNSEKLEIKKEIEDKLKYIKDAIVFVIPNTILNKAAETTTE

SEQ ID NO: 66513 - protein, 613 aa, Parcubacteria group bacterium GW2011_GWA2_38_13b
MCNCIPTNKEIEEAERDIFGNGLHFNDDQKIFLNCLDSRCVQAYAGTGKTSAIVGKLHILAQKYAWQNGRGVCVISHTNVAVDEIKKHVAKHYPAIMQYPNFIGTIQEFINKFLFIPYLFSKGLQIKFQDDSRYFDYKSELSENIVNRIESHINSKVNHSKDSERARKEFFNRLKTVHLVDGKLYARAKKSGFTEYVDLETKQVSQAVIVKALSDLIQKKHNDGYFLFVESFFYGYVHLKQNQLLKEIIAQRFQFVFLDEAQDCSEIQLQILNELFGENSKTIFQQIGDVNQAISETKWTPEKYLTLNQSTRFGNNIAGFINKFQVSDGSGVSGTSEETKKYLIIYDSGKEKDILQKFAEILKSENISTIEAIFAISHRHEHLEEYFLGYSEKLAKNKSKKTSYRFDNDIEYIDLLTKEAVLQRGSNLVWRVLCGLLYKQFKIGDNSWSKLKEFLRIGEKADDFNKIVTEICYDILQNGGISDLDSLKNRLNAILGEDRISFANSGSSSSPLIQNQTIKNKYSYNGIEINVGTIHSVKGQTHGATLLFSNKEDKKQDIQHTIDNTEKRTPEFKRRFYVASSRARHLFAFAIEKTAYSDLTDKTLFQDFTQETI

SEQ ID NO: 66514 - protein, 695 aa, Streptococcus suis; identical to SEQ ID NO: 62538

SEQ ID NO: 66515 - protein, 605 aa, Streptococcus suis; identical to SEQ ID NO: 62705

SEQ ID NO: 66516 - protein, 611 aa, candidate division WWE3 bacterium GW2011_GWE1_41_72
MYISHIKINNFRKFSTELRLDLRDGLNVLIGENNLGKTAIVEALSACLSIGDVSKPVRIVKEDFHDQSKPIEITLTFSSLSTDQQAAFLQGLQLNHNSIEDAQLIFRFEFTWRDDRPILKIFCGETQNQIKLQGDDFFSYLTCTYLPALRDVNSEFKVGRSNRICTTVKSRFKLDDDKEDKQFMSIFSQANQSAINYSYRNEVGEEVKPIQNYQTDTNENIAKLSLDNDDNKISLAFVDTHFDHLLRGLIMKTNGGNLDIYRNGLGYNNLIYISTILADLAKASSIQTQAYHCLIVEEPEAHLHPQLQRLLLGYIKENFSGIQILLTSHSPTIASDTPLDKLAIITRSNNGIEGITVATLIPNLTHQNLLQRYLDVTRSQLFFARRIIFVEGITEAMLIKAFWDYYFNDLENKFDRKGVEIVNIDGVSFEPYMDLVKNVYSKTNVKVAVITDDDRGTNCDEPMRFTDTEGKLKPTKQIKEIFDNAPKSSRYSNLEAMVSGLHQDGCSINIFGARKTFEIEIAIQPEQNLNLIGTFAETEFTDEMKKDLNVVGIELWKKVRNDKTKFSEKVLGWLSTENRDNSFVVPQYIKNAFDFLVTENENSDNSTIGSN

SEQ ID NO: 66517 - protein, 586 aa, candidate division WWE3 bacterium GW2011_GWE1_41_72
MKTPTIQQLAAISQRNNFILTAIPGSGKTFVVGKRIHDLHSTETILPYQGIATLSFTNNASRETEDTYYLTSGKRIKYPDFVGTIDSFLNQFIVTPYAHLVMGDRTKPPTIVSSNDFLYKKYPQMNKYARAYTPLDVTYRVDGSITHSSSGFEESMKQMMHKNNLLSLGDISYYAMKILETTDIASLLIKRFPYIMIDEAQDCSDVQMKIIDILVGTGHENIMLIGDPFQSIYVWRNARPELFIDKVNNWNSLSLDISQRSGNAICQLLNRFHQCEEYIKPCNSVQDCRVAVMSTENLDEVNSTVRNFFEKCEEMEINVSRENVGILCGSNFLVSSFSGIKESNMYNLWKADIASCCSLPIRAKSKFFKADYTGAMNLLVNYFYYQVNHSLPKNNDELERSGLLLIDRKVLIWNCLNKIPNFEVDLDTWIFQANNVISETAGLLGIEIKYPLIKKRFRNGEEPSGVMTSWLVERNESTYKIASKMTVETIHQAKGKSYDAVLVPFVARSQKVNINKLINALSCKNLFRDNTSEDERCIYVAFSRPKKLLMISVPKDEHLSLFDGSAQVKPEELDTVSTSFSKSLAL

SEQ ID NO: 66518 - protein, 611 aa, candidate division WWE3 bacterium GW2011_GWF1_42_14; identical to SEQ ID NO: 66516

SEQ ID NO: 66519 - protein, 586 aa, candidate division WWE3 bacterium GW2011_GWF1_42_14; identical to SEQ ID NO: 66517

SEQ ID NO: 66520 - protein, 589 aa, Parcubacteria group bacterium GW2011_GWF2_45_11
MWISKVTIKNFRKVPFDKEVVINFKEGLNLIIGENNIGKTTIIDALSLCLSYGSVERGVWLKKEDFNNPDSPIEISIEFSGLKLQHEAAFLQALVIDDEEKNNQLRFIFSFELKDEKVQPQIKCGELGLTSNPYDLLKYLRAIHLQALRDVNLEFQPGYKSRITKIVRKEFPECKSFEEIFKDANIKALGHQGEKNPVRVLEGQTNQNIAKLSLGSDNNKIKLDFVEQEFTKILTNIVMKTAEKGLDIKTNGLGYNNLIYISTILTELKVEEKYESHIFNCLLIEEPEAHLHPQLQALLLDFLQAEYKTIQVILTSHSPTLAAAVNFNNLTILAKSHEVMKSVLIKNTALENKNKAFLRRFLDVTKSQMFFARKIIFVEGITEAMLMKAFWNYIFNDIRMKFDRQGIEIVNIQGVAFKPYVDLIKNVFAETDVKSVLITDDDRGSGKSCPVDKRFIIDDQIRPTHEIVSIFNGAPISSRAVTLKNEVEKLNKEGFRVGIFLSQKTFEIEFALANEKIRKLFKNIIPIAESSAMLKLNFAIDIWRKISEEDLKSEFADRILRFIGRASNKKLGIQIPDYIIRAFNFLKDD

SEQ ID NO: 66521 - protein, 583 aa, Parcubacteria group bacterium GW2011_GWF2_45_11
MINPTPEQNIAVDQRGLCVLSACPGSGKTFTVAHRIKRIVNEKRLLPYQGVVALSFTNIAKDSIIKEYWEISGKQIGSPHYVGTIDSFLNNAIFRPFSHKLIGNGKKEIRILDVHSDWLNIVYPKSALFKINPHNITFNMNGEIVYQTRKLVEGKQQEYIEWLKKDLLKKCIVTQADVNFFCYEVLKKYANICRALIDKYPYFIIDEAQDCSAVQMGIVDLLVARGHAEVMLVGDAYQAIYEWRDANPRLFVKKETENNWQKKELLHSQRSGKVICQFLNKFHNNRAIKQDVARVELNDAEVKVVHCVDRRILCDNFLEDVKRKGIPIRKEKVAILYGGHASKINFRKTNIDPFNIWKNSDVGLTNTRKVYSLPLLSKIAFIEKNYKKSYSYLEKFFYYLIEKKHLVSSDDVRGHLLDRIENRVVLWNLCTNLPSLETEIDAWICKTNALIFKTAQQLGISSRIEIKKTKKVTNFNIYHELFGTIAPFKSINNVTLENVHQIKGRTFDAVMVFIDSGRGDFKLSIGKLEKILQHKNLLSGDYHEDGRCFYVAASRARRLLWIASADSKIEKIFNDDLRNCLRI

SEQ ID NO: 66522 - protein, 660 aa, Pantoea ananatis
MIIKSLDIKGFKSFDSDGQCVSLDSFTSLIGGNGTGKTALLLALVRTFGIKGSDRVILADDFYVPPGEKIDDKDERNFTIKVRFEFPELKNGEDNSVSDFFAHLISDGIDQTPYCTAKLKAKWIKTNLAGGDIESELVWEVGGDERKVSAYERSRIHVHYVPAYRDPSIQLKQTAGTIMHRLISAVEWSKDIAIKINEGAKSIDDQFQNETGIKTISTSLSENWNKLFTGGYFENLKVHPVMNGVEDILKHIDTVFLPTPDTQPLSTERLSDGMKSLFYLSLVKSAFDIESNVIDGADEDLAISVDALEPPDLSLILVEEPENHLSPQYFGRIVSLCKDISSNKRAQVFLSTHSPALLNRVEPENIRYFRLRENQNTIVKEILLPEKDEDGENIDEFTYIKEAIKSYPEIYFAKLVILGEGDSEEIVIPKLAEANGIALDNSLITFAPLGGRYVNHFWRLLSELSIPYITLLDYDRKRGGGGYGRIKYALKQLISTGVEKSELLKLKDETILSDDRLEGMHNWVENENTESSWIEYLKKYNIFFSYPYDLDWIMLKSFFEEYKSFAPANGGPLIPSEDDAEKYKLRTQAAIAAVLKKEVSEIDIDMFTEHDKYYWYRYLFLGRGKPLSHNYVLKKINNGDLKERAPEVLNELISAIQESI

SEQ ID NO: 66523 - protein, 612 aa, Pantoea ananatis
MSWIDDENWALKDIQEVEQEAMHAIKNFRDNSLVVAGPGAGKTELLAQKACFLIETGKCKNKNILSLSFKKDAANNLKERICARIDKIHSRKFESTTFDAFCKSILDRFYTSLPDQIRPTVDYEIVLNLNTSEFIKEIKNNGVGFQGLTAIELNKIQPKRFEENYLLKNISDHDHTVDARITKFTWQYLLKGKSRLTFKMISVLARCILEKNKTLSNAIISTYKHVFIDEFQDTTNLQYNLLKTIFLNTDITITAVGDDKQRIMGWAGALTTIFDDYKRDFKIKNSNVLLSNRRSKNNLILFQRRMEKFMAGEISGERFKPVVGEGDARILQFNNSLEESEYLKKVIEYWLEDVNHRDICVLIRYNAKQYTDVIINSLAENNIKCRFENEYQDLLNEPVVQLALKLLMLVYGKKSIGDWNNVLALFCDINGANRRNEVAKLERKLSTFIKGSVYHKGEVVDYLYTLLNIFGVSELKAVFPQYSQGDSLEFHIVKFALLLEKLNARLDFKYALEVFLGENVIPIMTIHKSKGLEFKKVIILGVEPDAYFGNEEEQIENQKTIFVGFSRAIEEVIITRCFYREDKYTRVWEQDFNRIPLITNMLKDAGINVCNG

SEQ ID NO: 66524 - protein, 598 aa, Agrobacterium sp. LC34
MKIYSVAIENFRGIRTATIVLPDHAVLIGDNNTGKSSVIEAIDLVLGPDRLNRRPPVDEHDFWQGRYVAALPKGENAIEGDAPKIRINVTIVHLSIEQQARFGGHIEWLNVETGDLYAEANPAGVDAAAIVAALRVTFIGEYNVDEDDFDGNTYYTRSLTEDDPPATFSKKDKQHCGFLYLRSLRTGSRALSLEHGSLLDIILRLKEIRPQMWEATIATLAGFDVASDPELGISGVLESINTSLKKYVPQEWGAKPRLKVSSLTREHLRKVVTAFIATGNGDHAAPFYRQGTGTINMLVLAMLSQIAEDKQNVIFAMEEVETAIPPYAQKRIVHELRKLSAQSIITSHSPYVLEEFGLEQTVILARSDGGDLSQAKIALPDSVKHKRYRQEFRTRFCEGLLARRVLIAEGATEATAFPAAARRLAELNPAIYSSLEALGLCIIDAGSESQIADLALLYRGLGKRTFAVCDKQTDAAKGAIEAQVEHLFMHEEKGIEDLVLNNTTAAALGRFAEMLDWPPHLLAQYPDPKAQAVAALKAYFGWSKGNWGIAEFLAQCTEAEIPQWIRDACIELRKRCDPPPAPPAAGANGGDLFADIFG

SEQ ID NO: 66525 - protein, 607 aa, Agrobacterium sp. LC34
MVELTKAQQHVLATDGYQLVTGGPGSGKTTVSILKAAKIAREALRPEQRILFLSFARATVSRVLEAMDEESRISRDEKRRIEVDTYHAFFWRILKTHGYLVGFPRRLAILTPPNEAIALSAVRSGYKANSKLSDAEKAEKKAREEAERNRLAKEEGRVCFDLFADRVATLLHGSAKVRTLISTMYPFIILDEFQDTSSDQWRVVQALGANSTLIALADPEQRIFDFIGADPERLDHFRAAFHPSEHDLAGDNHRSKGTEIALFGNDVLSGKFRQSNYSGIAFQGFKSNQNQAFASLVGHVLQARKRLIDSGKPDWSLAILVPTKKMTRLVSDVLREPFGQVPAIGHTAAVDMDGPILAAEIVAFLLQQGRHAGHFDEFLDLLCSYYHGRGGAAPTAGDMTEAARLNAALGKWNQCLAVGKAPPKNSVLNATAAVYATALDVGLTGDPDRDWAAIRAALEAGGCARLRAIAGDVRNVRLLERGTQLRQGLTQDWRDTGGYLNALAITRQSFVQEHFATAHKPETGVVVMNMHKAKGKQFDEVIIFEGWPRRAKGKVVANFDRIVRENIAAGPMVQARQNFRVSVTRAKLRTTILTPEDDPCVLLTASG

SEQ ID NO: 66526 - protein, 595 aa, Rhizobium sp. LC145
MRLSKLSIRNFRNFQSIDIPLSGNVVLLGQNRVGKSNLLFAIQLILDPTLPDSARQLKLTDFWDGGPADFSGPIEVHLELSDFATDMALTALLTDFRAAHDPTVAQLSYVFRKKSDITGAPQSSADCEFLVFGGGDETRSLPSRVRRRIAIELLDALRDAEGQLGSWRNSPLRPLLEDAVSGISRADIDAVAAELDKATKTLETFPTIKTLEDELRAGIVHLSGKAHDIDARLRFAPNDPLRLFRAIAMFIDNGKRGIGDASLGSANVALLALKLAEFSWRRKKNERNFSLLCIEEPEAHLHPQLQRSVFKKLLGNVDASQSMIVTSHSPTLAAVTPLRSIVQLKKQAGATQAFSLANLPVTPDEIDDLETYLNATRAELLFARGAIFIEGDAEEALLPIFASSLGHSLDELGITVCNVGGVNFRPYVKLAEALKLPYSVITDWDPLDGTKPPLGKKRTLDLWQDILAVRGLPLLTPAQLATWEPMDHAAFSVNAAKSGIFLNDQTFEVSVANTPVLLKPLLDILGEQDFGSVRTGRIAAWRAGAAVDAPQLLAMIADIGKGRLGARLAKKSVGLKPPAYIESAINAIVGLVAHV

SEQ ID NO: 66527 - protein, 593 aa, Rhizobium sp. LC145
MSSDRSLLQALAELKSNPEQSAAVVETGHCIVLAGPGSGKTKTLTTAMARVLAQDVAEPRGVACITYNNECAIELETRLARLGVVPGDRAFIGTVHGFAASQVIGPYARCVPIGLPANFRVATRLEARAAVEVAYRNAINGTDNPHQRWEFASEKRKRDVDRSRPEWRGRNPELAAFIETYEAELRRQGLLDFDDMPLLAYRMIKENVWIREALRARFPVLFVDEYQDLGHALHELVLLLCFEGGIRLFAVGDADQSIYAFAGANPELLESLTRRTDVRTIKLRFNYRSGGKIIRASLGALGEERDYRGVDGAPEGDLSFWEAPYGLDSQAQVIADTIIPKLIEQGFELGQIAVLYRAAWLGDKVATVMKDANIPFVRTDTNALVRRNSRLARFIEECARWATGGWRDADPPYARLLSQAITLVFGRHASEGEEQDLSAQLMAFLNASIGTAETTHAWLQRFSRELITPWSDVARNSEQEWQLCDEMIANTDPARDLDLSLAHFAGRIEGAGRVNLSTLHSAKGREFDAVIMYGVNNTDFPSDRDKRTPAGLREARRLFYVGVTRPKKHLSLVFQEQHFSPWVLELFQRSQKE

SEQ ID NO: 66528 - protein, 712 aa, Achromobacter sp. LC458
MHISKLTLVNFRNFKSTKLAFQRGVNTVIGENGAGKSNVLRAIRLLLDDNMVRAAYRLDESDFSRALDYWKGHWIIISMEFENLSPDEAVQALFLHGTAGIHAGPISKATYNLIFRPKKEIRLKLAALDSFDFAGLKAVRDSITIADYETIFTGRSSADFSDPEVYQRIVGDFDLCEFPDETEFPELGAKVPGFLSVTKEVSLTFIQALRDVVAEFHNNRTNPLLTLLKSKSGEIDAAALVPIVGKVRDLNGSIEGLEDVQAVRMHIRQTIKDTAGETYSPTSLSIRSDLPEDAEQLFQSLRLFVGEAEDGYEGTINELSLGGANLIYLTLKLLEFKYQREKMAIANFLLIEEPEAHIHTHIQKTLFDRIAYDDAQVIYTTHSTHVSEVSNVSNVNILGRRGAFCEAYQPATGLNPAQVTSIQRYLDAVRSNLLFAKSVILVEGDAEEILIPALIKLVLGLSVDELGLSVINIRSTGFKNVAVLFHDTRIRKRCAIVTDLDRPFFDTAPNPADNDALAARKRKAIGSETAGARRKIDLDAFGLGNAWVRSFYATHTFEVDLVKAGNHEAIVRSVDKVYTAPATITQAKADLRSGLIRQSGYRTLTMAEQEGKGWFAILLAQTLDHQAVVPGYIRDAVLFAHGPFSRPLVMRILRHRMNRLWATDPAARPRLAAFNAEVEYFGRSALDLPTLRAAAATALPGDVAHAFLDGPT

SEQ ID NO: 66529 - protein, 592 aa, Achromobacter sp. LC458
MFVWDATELNAEQAAAVEEPSSVFLVACPGSGKTRALTYKIAYELSRRTDKRIVVAITYTHRAADEIQERVETLGVDTTALWIGTIHSFCLEWIIKPYAIYVPELARGYAVLDLHDREKILERLCAPYRGVTVYDCDYYFEEDHYLLGCADIRKHETIHKVLAAYFRELADTRRIDFELILWYSQVLMRNQPHIAALLSQVFSYILVDEYQDTKRIQYNLVGAILRAGAGSTKTFIVGDPNQAIYGSLGGYAISVEDFRVLTDIPLREMALRLNYRSSARIIGHFSNFNVHATDIEGAGEIVGFPSQVSYNRLVSHEHLHDELVRLIQKSLAEGHAPEEICVLAPWWVLLASTTRKLVAQLPEQQFDGPGLVPFSNDPDNFWFKLSKILLTESSPQMLVRRTRWARDVIADLRDFGVDTAKITQRSLLRESNSLAITETDGLAYLDQAFAALLNRLGIEMRAFPALMEHREAFFASSQARLERLQNSGAGYITDLSFFKKVFRERTGITVSTIHGVKGAEFDVVIAFGLLQGMVPHFSDSDGDVAASKLLYVLASRARKHLHLISEAGRSRGRYGSYEPTEILARCDFDYNG

SEQ ID NO: 66530 - protein, 527 aa, Listeria monocytogenes; identical to SEQ ID NO: 64370

SEQ ID NO: 66531 - protein, 700 aa, Listeria monocytogenes
MEDEDANIFHHLVSLNGGNEFNKEQVNAIRFDMRTHLRIIAGAGSGKTQTICAKAAYLVLKEKIQERNIVMCTFSKKASQEMKERVNEFLGGNSRIEVLTFHGWFQKEYNVLIKKYPYLEKYGIAGEVPGKGSGKDSHDRILMNLIKQYHLYNFDKYEEKPINERLSYWRNMGYNDEEIVAFIARYFDDKEILKDQLLSEVFSEMLKELERIKRREKVINFDDMLINLKCVLENDSNALSLIQTRYQYIFIDEFQDINPLQKQIIELICPPDYEKSVINSTKLIIVGDDDQSIYFFRGAEPRYIKEFDRQYRQTSIELMTNYRSIAPVVHIGNTLISNNQHDRIKKSMIPHKLNEGDCYAKVFQNEQLEANWIAMRILSLSSEEKPFQDQIGKPNYTETIVLYPNKNQLKSMIIALQEKGIPFVTKSDDDLLGIFGINFFKRSFNLLMDIIDAETIEIKKHLYKQLIKNICLYYYIPFAKSTDFVSDETNYTSEKLTDFICKEKKVSKKEMALIKSIFRDINEFIKTEELNIKVFVNWLVETPKVKKQLIDEEKDWLLKEVSNVKTLKELILKYKAARTLKEEMADKLREYDNNNYNAVYLLTIHSSKGLGYKNVFVKGIYKNSLPDYRSVDKESIELQPLIEQASPPTTMEEQRRLMYVALTRAKENLYVTYPREINDKPTLVSPFIKESNIMFSEEKI

SEQ ID NO: 66532 - protein, 635 aa, Serratia fonticola
MYLSTLEINGFKCFDKSFSIEFNDGLNVLVGENGAGKTGIISAIRQLFTDSESGKRSIRDRDFYRGFSHGAMTSESIHIEATFSELNQNETTAFIDWCGQEPEAKLTFTATNRESRGHYRYQIWGGRQRIKPVDFEVLDLIHCIYLPPLRDAEIKLREGRQSRLARLLKVLCRQELEECKKAGTAHPLEQRVGEFNQELSESEDFAIKQANQRIGDNLKEALGMHLSQGTLIQFSEVNFSKIVEGLRLLYYPDLSGADATQFRSLEENSLGYNNMLYIASILAELIIDVDDDTGEKTYLRLLLIEEPEAHLHPQLQIRLLRHLRTVAETRGIQVIITTHSTVISSAVSVDSIIHLSRVDQPVAVPLHQCGLPEASRRFIDRWLDVTKSNLLFSRGVILVEGIAEAIVVPELARIVLQACGKGRDSLDDYGVSVINLNGIYFNHFMQLFCNVEGGQQGTNIPVRCAGLTDNDPPKAIEKIVDEVGKEKAVPYLPHADGFQEGNNPALRLIPLIAQSQHGRLYAGKYKTFEYDIALEGNNLSKMFKVIANNWPTKGGQVEATLEAAAELDFSEMPNFDKANYAWQLLQRIDSDEMGKGLYAQVLADVLREDLGDFVVPEYICEAILWACNIQPEIVT

SEQ ID NO: 66533 - protein, 580 aa, Serratia fonticola
MMILTEEQQAYINTPLNENVYLRACPGSGKTEVVAARITQAIRNWKQFPSGIAVLTFSNSATDELKERLVEYLGEPVSHPHCVSTFDSFLFTHIVAKIASQITGYQGKDGDFRIRLLDRAADIFRTRTKICERKISACRYDYDLDSNSFVFSTGELTDAVFNAAVLSDENKQDLIDTKKRLWRSGFATYRDIDMLALMALRDEAFVEYFARIVRRFPVVVVDECQDLSAEQLAIIRGLDRFGMRFHFVGDLNQSIYGFRKADPARVQKLLNDLNFRELSLTANWRSSQTIVNLCSDLLNIRRGDGNPEIEPLKPKLIQYQKCPSELMQRITELTKGYENVVVVARGHRTLQRLTRGRVLNPVEELAMSCVSVESNNLEAVRNAINTFARWLASKLALEVVPMSLHRPIEIDSTLVWRQFIFNCLKFLSTCGASDVELTWKQWAALTKQGIRQLSCQPFMLAEIAQKLADLNEVNLIAPKGLGAEKLSTRLTCVEQQPVVSHRYATIHQVKGETHDATVLISSLKSGKQSHWKDWLNDPLEEAARFAYVASSRPRHLLIWGVKALKPKEHKRLIELGFEIL

SEQ ID NO: 66534 - protein, 743 aa, Serratia fonticola
MKLIKLQIKNFRSLKSLQVDIEEYLSIIIGKNNSGKTSLLLALERFLVSANPRFELDDFNISFQKYLINLIKNKEQPVDPFPFCGISLRLFIEYGSDDDLANVGNKVIMDLDPENRWIVLDFLYHLSSENLDLLKRDYKVHCDKKGLKAKDALSFLQENHNHYFRLARRSVQFDHLTKKVQEDTYVDLIKEGVRVEEIISFKRINARRSVSNRDSDRSLSMMSAKIYSAMSADVGEEEVFDSFKEALSNTDVQLDGIYAGLFKDVISDVQKFGGLKEGDAQIQIRSTLQHRELLEENTTVMYGQGIEAHVLPENYNGLGYLNLISIIFDIKIILNEFKRGTSPKPADINLLFIEEPEAHTHPQMQAIFIKNIKSLVGRAITNANGITRPLQTILSTHSAHIVAESDFDDIKYFKRSDGETQAKNLRDLAVLYKAVGRNGHYKFLRQYLTLHRSQLFFADKAILVEGDTERILLSAMMRKKDQLDEAKAWETGSQLPIPLLSQNISVIEVGAHSHIFEIFLDFIGIKTLIITDIDSAIEVPRLNDNGQPKLNKDGEPIKDPHSHAVTNATHTTNHALKFFFGVGSELAYFLGLTIGQKTVRKNEVSHSWEVNPDGQVMCVYQVSENDADGNEYHARSFEDAFFHTNRSFMQNACNDDGEVETIKFPSLVVKYLKQYIKGGSSFDMAEKGISKKPSFAIEILLNSQSEKLTKSNMTGETKEFVVECNNWCTPQYIEEGLTWIKAD

SEQ ID NO: 66535 - protein, 632 aa, Serratia fonticola
MDQGGLKLEPEVVDVLKHVSDGKSFLLSGGAGSGKTYSLVQIIGELLRTDPSAFIACITYTNAAVREIESRISNERLSVSTIHDFLWSAISPYQAALRTVLIELMGCEPPKINPGSTVVSDDMFSGKTIEYKEYRILDQGIISHDEIIILARGIFEKYPKIRDIMRDKFRYILVDEYQDTAPDVVTILLDHLSQSSRKGVCGFFGDTMQSIYDEGVGSIQSYVDSKMVAEVKKRQNRRNPRLVYELANQLRTDGLLQHASEDENAPNMNGSTAKEGTIHFYYSFGETDKLGEVRKILKWNFDEVLETKELNLTHNLIAPQAGFSNLMEIYDKDGVLAFRDRLVSFIKKYDDLECYDGFTFGEVVTALQKNKAGKELASVSPTSQMQKFIDTHPGLLDEAKEHDFNVFRRMYVDKDLLIDDKKQSEEDIARKGSQRCDFIKHVFKIQTVVHLYEQRRYNEFLRRTEFQLNRVDDKVRLKRCIETIGAMRNSPIIDVIDFAHEHGLCVKDDRFHEFRQRKGYLFNRLVGVEYLAYKNLYEYLEGRTAYSTQHKIKGREFDRVLVVLDSGGWNKYNFNYLFESNGTDTVRERTRKLFYVCCTRAKDTLAVYFRNPSVATLVQARAWFGADNVIEV

SEQ ID NO: 66536 - protein, 618 aa, Afipia massiliensis
MYLDKLTLNNFRSFAESEIPLCKDLTLLVGENNGGKSNAIDAIRLLTAPLGGRREIYCEPTDIRFGSTERKFELTATFAELSPAQQGRMISAATDAAISGCVFGLQYDETTGRFPIRPALWAGHQRGNPEPGCHEMVRHVYLPPLRDAKRALASGNPTRIYALLNHFLEGGDPEDLAKSLRRGVEAEILGKVGEAVEVGLSALTAGVRRQAASLGFASDEKLIDIARDLRFKLADHGIEPEDLRYSGHGYANLLYMATIAVELEKVNDADLTLFLVEEPEAHLHPQLQAAVLSFLDEQAEKSRKPREGHQGPAGELQVIVATHSPNLSAWVESKKLVFFRSFLPVPVEGSTGDAGEEPQPLAGVPAEMMPEIEPNPVMPVDRPRRVTRCIPLAVLALDPVERRKVDRYLDVTKSAFLFGGRVLLVEGIAEALLLPVIAKKIVLKDDAEKLRLFRSAVFVPIDGVDFQPYTKLLLSPFNEVRIADRLVVLTDGDGGEVAEGAVKPGAARKRDLEALAAGLGATELLEVVINDYSLETELVRADNAAVLKGVYLQLHPRSGDKWNAAVAQAGAAQAVAIQKLFETTRKGDFAQLLAEEINKGAAFTVPGYLKTAIEALVK

SEQ ID NO: 66537 - protein, 573 aa, Afipia massiliensis
MAKPFEPTDEQQRVIEHIGSAFIAACPGAGKTRVMVERARRLLSSGPPGRGIAFLSFTIAAVSELEDRLRREGLVETPAFPHFIGTFDAFLWQFLIAPFGVDGCDAKPKLIPDKDDRSIQPFPAAQALPLECFDRVTGDAIPAMIQRHGFRGRINAHETAARNTRAHFLERGELDFADARSVALARLRDPVCGAVFGPAFAARFLELIVDEAQDCNPVDLEIITWFRAVGVPVKVICDPNQAIYGFRGGVTRELGQFAETFGEAERLPMNGNFRSSGHITKGVAALRATNMRAAIDEALGEHREEPTAVQILSYSGRGVPSTIGAKFQELTAAMGLAARDCPVVSATRRAGANALGHPQDSGVRDLSYRLAVAVSDFHFSFELGGRKEALVAIHRIMLELGGRMGGKTYHQHLIDADVAPDAWRPEALALVQTLRFSPERFATAEAWHDEARRLLAPLLPAGGQSINQRLRRNGELARALAVAPATGHPARTIHSVKGMEFPAICVVMSPSTAKGIVDFLASDAADDNEEARKIYVGASRAQRLLAIALPRTQAPRLRDLMTGMGGVVELIAL

SEQ ID NO: 66538 - protein, 650 aa, Pseudomonas amygdali pv. tabaci str. ATCC 11528; identical to SEQ ID NO: 62770

SEQ ID NO: 66539 - protein, 555 aa, Pseudomonas amygdali pv. tabaci str. ATCC 11528; identical to SEQ ID NO: 62771

SEQ ID NO: 66540 - protein, 712 aa, Enterobacter aerogenes; identical to SEQ ID NO: 64890

SEQ ID NO: 66541 - protein, 594 aa, Enterobacter aerogenes; identical to SEQ ID NO: 64891

SEQ ID NO: 66542 - protein, 216 aa, Enterobacter cloacae
ISTAWDDMGYRMSIIPAEAFFASAVLLVEGPSEVIFYTELAKALDLDLDLLNISILSVDGVQFEVYIKILQALHIGWVARTDNDVAKVPHRQEWSYTGANRALTLCGLSKGGHVSHEITSRERHNEWGRVTPLINARGVFLSITDLEGDLSCDFTAHLLDFSGAADADAAADFLRDKKAIKMRALLKHKRQFLAELADKDIARPLLAVQKLVRGEK

SEQ ID NO: 66543 - protein, 539 aa, Enterobacter cloacae
MKLTAEQQDAVEFTENLVITACPGSGKTTILTHKISQVLTDCRAHQGVVSLSYTNKSSDELKARCINLSKDIKASFFGTTDKFLLSEIVMPFIRHIWSCPSAGPEVIKASNLDAEDREILTPYYMPDNLPENNTEQGMAALERLYVRGMIILEMVPLMALYIMSESIACQRYLKVRYKGIFVDEYQDTGFFAHQIFRLIAGLGIKLTVVGDVDQSIYLYAHRSADSLKDFIRHPDFTHKKITLNHRCHPSIINYANRLKDPDCMLLDSDSVVVYHKSVTGDQASIAAWIDARVAGLKKHFSIESNKDIAVLVRSNLCAELIADNLRTASRTYLDDNLSKAGDKVSGLVKALLHYRYNKKTTVQLVLDDYLSAVSKRSDVVLTRKLIRQVRVTSDARLPEAIRRAVFSCTGCDLSETHITGINDVVTVPRIRNNYLHIRDDEVQIMTLHKSKGLEFDVVIHLDLYDWVLPAREYVKGSYDVIFQNEQQCLNLHYVGVTRARKGVILVHSTKRYNANRELKTGNPSQFLTRPGLKGLYKEL

SEQ ID NO: 66544 - protein, 663 aa, Vibrio parahaemolyticus; identical to SEQ ID NO: 63134

SEQ ID NO: 66545 - protein, 583 aa, Vibrio parahaemolyticus; identical to SEQ ID NO: 63135

SEQ ID NO: 66546 - protein, 663 aa, Vibrio parahaemolyticus; identical to SEQ ID NO: 63134

SEQ ID NO: 66547 - protein, 583 aa, Vibrio parahaemolyticus; identical to SEQ ID NO: 63135

SEQ ID NO: 66548 - protein, 597 aa, Acinetobacter baumannii
MHFKNLKIRNFRNFESIDIPLSDNIVLLGENRTGKSNLIFAMRLVIDQNLSDSARQLKLSDFWDGCDLFTKPQIEVHLDFTDFENDPDLTALLTDYRLASDPHTVRLSYIFRCKAECTGLPTSSEDFEFLIYGGDVEEKPINNQVRRRISLDLLDALRDAENQLGSWRNSPLRPLIENAMRAIDSTTLTTISADLEAANKKIVEQPQIKVLDSSLSKQILSLSGKGHDLKPSLRFSNADPLRLFRSLGMYIDEGKRSINEASLGSANVILMALKLEEFSWRKEKNERNYSLLCIEEPEAHLHPQLQRSVFKNIFNEKDSAQALIITSHSPTLAAVVPLRSIVTLRQINNSTKAFSLANLPIDEDEKDDIERYLIATRSEILFSKGVIFVEGDAEEALIPSFAELLEYDLDGLGITICNVGGVNFKPYVKLASSLGIPFTIITDWDPLDGTKQPLGKKRTVEIWDAIGEVNLSAFRLTQERRDWCERASYDKFSARWAKYGIFLNDQTFEVAIAQTPNLSEILLDILDEQGFGPQRTERIKEWRGDRKKINSEHLLSMIKDIGKGRLSGKIKKRITASGTVQPPTYITNAIEYMVKNV

SEQ ID NO: 66549 - protein, 593 aa, Acinetobacter baumannii
MSNYSRLKQALLELEKNKEQFEAVNCRNHCVVLAGPGSGKTKTLTTAIARTLHEEIINPRAIACITYNNECAIELEGRLSKLGIENNSQNFIGTVHSFALTQIIVPYARCLQGLLPNDFKIANKNECNLAVENAYKAIYKDGGDPHAQWEFAKEKRNREVDRTHPAWKGHNKELAEFIEEYEFELRKKGLIDFDDMPLIAFKMIKENLWIRHALECRFPILFVDEYQDLGHVLHELVHLLCFDGEIRLFAVGDADQSIYGFTGANPELLQSLTERDDVQIIQLRYNYRSGTRIVKASLAALDEERNYETPEGTPEGEIIFNPVKGTLEEQANFIADKLLGELASKGLKNEQIAILYKAAWLGNKIVEALEARKIPYHRTDSNSLIKRSSKLACFIEDCAKWITGGWKRAEPPFNKLSKQALNIVYGNNYKQAEKQILDLQLINFLQKSRSISETTNEWLIRFEKELIAHWSSICRNNIQEWEVCLDLIKKTSPQMNKDMSLELFSGKTEGTGRLILTTFHSSKGREFDAVIIYGANKGILPDKRDLKTSKSLKEVKRLFYVAVTRPKTILHLVYESKNHSEFLDEFYRRTQQN

SEQ ID NO: 66550 - protein, 597 aa, Acinetobacter baumannii; identical to SEQ ID NO: 66548

SEQ ID NO: 66551 - protein, 593 aa, Acinetobacter baumannii; identical to SEQ ID NO: 66549

SEQ ID NO: 66552 - protein, 696 aa, Bacillus cereus
MKLTKVKICNFRSFHKERTIDLEDFTAIIGSNSSGKTSFFQALLKLFGETSREREILRSDFHVPSHIDPNALTENHFFIDVTIEFPEVISEDSIAKSTVPPFFGNFIIEEGGKAPYIRIRQEATWQKSNQPEGIIESNVFFVTIGHGNEILDVHKKMISKAYLSLIKMIYIPALRNPNDQLKMVSGTLLWRLINRINFEDQFKEDISDQIGSIHEIIDKQKGLSKLKEIIRTEWKKYHNESRYVNVDLNFNTNNIEDILKKIDANFSPTEVGKNYTVDALGDGLRSLFYFSLVGSLLKTEEVTLMEISDNPSLDINDRTFSNTPPLLTLIAVEEPENHVAPHLLGKIVSNLRGISEGGNSQVILSSHSASIIKRVDPVEIRHFRNSKEDLGTVINKILLPSKEADEYKYVKEAVKSYPEIYFSSLVILGEGDSEEIIIPRILEDCDLDIHTHEISIVPLGGRHVNHFWKLLTQLKIPYITLLDLDIERHGGGWGRIKYVIDQMLLNGTSTEELFHLKEDQTFDLNTIKGMYNWDLGEEHRNLDILSKWVKLLESHNVFFSAPLDIDFLMIKAFKVNYLETLNSNEGPRIKIGEVQKKISELEESDMQTKEYEDRISHDVACTLKDIAKIGKYYEEIDKELMIWYNYFFLNRGKPTTHILALNNLDKKTFLEKLPTVFNELIKAINKQLIVGGEESE

SEQ ID NO: 66553 - protein, 631 aa, Bacillus cereus; identical to SEQ ID NO: 62979

SEQ ID NO: 66554 - protein, 589 aa, Bacillus cereus
MLIEWIRIKGFRNFDDEKINFANQTLVIGANDVGKTNLIYALRILFDRSLSDKDLELYDSDYNVFTKSDSIEITVKINEVVEDCLISTLKGDLQNNTVYIQYRNTKSGEYSIYAGHSEETLEMKSSRFYIKRLNMEYVNTNRNLTTFMKREKNQILEEAKSQLADELKKSDEEAVAEMKSDLNILNDKVDNLNYIKKSLESVNTELGELAIHNENQTLSFKNANSDIVRMLDNLELTYATDGETLTLGGDGRNNQIFLATWVAKQKNKKTLEKVTFFAIEEPEAHLHPHQQRKLSNYLLENFEEQVFITTHSPHIASEFRPDKIVKLYSKHKMTKVAKSGCSGDLKLDFDDFGYRLDAITSDVFFVNAVFLVEGPSEKLFYTALSKKLNIDLDRLNVSIISVNGVGFKPYVKICLALDIPFVLRTDNDTFTKTKKNSEEESMELFYQAGVSRVMGIYEELLSKEENKSLIEYWQENKKNNEWVEGGVPKEAIEILTHISQEIEKDNIFLSGIDLENDLVESNLYGSLKRFYNTRQKKSTVKKMQKAKAENMLSFLKNNFDALSDLKDDKIAEPLKKIQKLAEKVVRENG

SEQ ID NO: 66555 - protein, 548 aa, Bacillus cereus
MGKTIQPSPEQKKIIEDQGNTVITAKPGSGKTFTIVEKISSISGGLLDYQGVIAISFTRKASQELELRCKRKGIERKNHFFGTIDKFYISEIIIPFTKILTGKIIALEVRDSIDDYPEYEKLKGIREDFRNEELLLLLEKSLLDGHIFLELCGETALYILNKVPECLLYLKSRYTHVFIDEYQDCGEIQHNIFLKLVDKGIVGIAVGDLNQAIYAFSHRYSKFLFSLMTNNKFTHLEITHNHRCHKAISDYSLALMGVPDIVLTDDPRVFKVNVEGNDRAVINSIEHNLPILKQKYGLLNNNDFAILCRGNASAQRASDFLQTDNKLFIDTALDRSNSYWGILFNDILSSFFSYKVGETTILDCVESYFNEEFEKKRFEKGLIILNEIFSADEDQLVDQFNLFIKFAELAYPEHIDKEITHDLERILVNEEKLKSFKPATENEVSIMTLHKSKGLEFKCVFLLDLYRWILPPEGNWVSQEEYTQALNLHYVGVTRAIEACYIMQGTERYRARQKDFWSAEESSFLYLNNTPNLRTDITWGTNILVGQH

SEQ ID NO: 66556 - protein, 691 aa, Xanthomonas gardneri; identical to SEQ ID NO: 63118

SEQ ID NO: 66557 - protein, 584 aa, Xanthomonas gardneri
MADGAESPADAAGRVALERMFACLDEARSFRLEAGAGAGKTYSLDKALRRLIDHRGSELLRQRQQIGCITYTNVAKDEILSRIGAHPAVRSETVHGFCWSILQDFQTTLRALVPGLPGWAERLEPTGGIGARRVHYELGVPRVVDEQVTIRHEDVLALMIQVMAFPKFRAVLTARYPVLLIDEYQDTDAAFVDALKAWFLDHGEGPLIGLFGDHWQKIYGDGCGSVEHDALEVIDKNANFRSVAPIVQMLNRMRPDLPQMVSDPDAPGEARVFHTNDWPGVRRTGQGGGHWTGDTSADAARAYFGHIKRRLGGEGWDFSVGKTKILMLSHSVLAREQGYASIPPIYGQFNEPWLKKDDPHIKFLTDQLEPACAAFEARRYGEMFESFGAGMPRIRKHVDKVAWTDTMETLIALRLSGSIGEVIDFLAAQPHMRLPEAVEERERRLAEIGPEPVEGESRRVTQLRKLRAVSYSEVIALDQFIDGHTPFATKHGVKGAEFENVLVVVGRGWNKYDFAQMLAWSEAGPPADKLEFYENNRNLFYVACSRPKVRLALLFTQLLSPDAMSRLATWFGAENVIALPAQPD

SEQ ID NO: 66558 - protein, 691 aa, Xanthomonas gardneri; identical to SEQ ID NO: 63118

SEQ ID NO: 66559 - protein, 584 aa, Xanthomonas gardneri; identical to SEQ ID NO: 66557

SEQ ID NO: 66560 - protein, 691 aa, Xanthomonas gardneri; identical to SEQ ID NO: 63118

SEQ ID NO: 66561 - protein, 584 aa, Xanthomonas gardneri; identical to SEQ ID NO: 66557

SEQ ID NO: 66562 - protein, 691 aa, Xanthomonas gardneri; identical to SEQ ID NO: 63118

SEQ ID NO: 66563 - protein, 584 aa, Xanthomonas gardneri; identical to SEQ ID NO: 66557

SEQ ID NO: 66564 - protein, 691 aa, Xanthomonas gardneri; identical to SEQ ID NO: 63118

SEQ ID NO: 66565 - protein, 584 aa, Xanthomonas gardneri; identical to SEQ ID NO: 66557

SEQ ID NO: 66566 - protein, 691 aa, Xanthomonas gardneri; identical to SEQ ID NO: 63118

SEQ ID NO: 66567 - protein, 584 aa, Xanthomonas gardneri; identical to SEQ ID NO: 66557

SEQ ID NO: 66568 - protein, 691 aa, Xanthomonas gardneri; identical to SEQ ID NO: 63118

SEQ ID NO: 66569 - protein, 584 aa, Xanthomonas gardneri; identical to SEQ ID NO: 66557

SEQ ID NO: 66570 - protein, 691 aa, Xanthomonas gardneri; identical to SEQ ID NO: 63118

SEQ ID NO: 66571 - protein, 584 aa, Xanthomonas gardneri; identical to SEQ ID NO: 66557

SEQ ID NO: 66572 - protein, 691 aa, Xanthomonas gardneri; identical to SEQ ID NO: 63118

SEQ ID NO: 66573 - protein, 584 aa, Xanthomonas gardneri; identical to SEQ ID NO: 66557

SEQ ID NO: 66574 - protein, 691 aa, Xanthomonas gardneri; identical to SEQ ID NO: 63118

SEQ ID NO: 66575 - protein, 584 aa, Xanthomonas gardneri; identical to SEQ ID NO: 66557

SEQ ID NO: 66576 - protein, 789 aa, Lactobacillus plantarum
MFIKKLAVHNFRQLKDIELDLEEKTSILAGPNNSGKTSLILLLERILEDNSFDLKPNDYNIYDQTRWIVDFTKILRKFTSSDEDNRAILKKYLIDSATPVILPEIDVNLQIDYQMQDDLTNFANYLLDLDMSKCSFYFKYRIELDRLKFIETLIDQYSTIHHAIEALDKEDENETSGKNNQAGTMKATSQVDMDTASKTATNVSQGVTDSEGKQHNKPKKQHRSMLLAKILMKLYCQCCQSRTYYCDSKFEQLEKIQNQNDFHRLFNFKYIPAARLTEEQSRSNRSLSNQLVAFANSDDDWNSMMDGVTETLYNTVSENNSSVNRESTEVLSNVLKAVGNSNGQHLGDVQLEVDVDKTEIQSLVGRTTRAQYLVEGTGVSSSLNYVLNETSQGLGYSNLVYLDTEIEAFIRDRKSPENQQKVNLLVVEEPESHMHPQMQNVFAKELISRYDEDGLQGLITTHSTEIVREVKVSSLRVLREETLFNSKLCDLDKSISDTNKLLDDVGLNAEGFFKFIGIADLIFADYAILFEGDTERLYLKHLIQTDSKFEKLKNQYIAYVQVGGAYAFKFEKILETLQVKSLILTDADYAKSVKSEADLKVEETTNETLKYFYKEDSGNHNTEPSINDIFEWFGTINQLDKLSTKGKVVANVEKHKLNGECKNRDLVLLTCQSKSDKYTRTLEAAMLTRLFDLEPFHEFTREELKDKREKYGLAFPIPTFKKKGDEEKTDDSSDESQNDANQRMITLIDILNSSAMKKTDFMYSVIMKKRAAKMVPHYIEEGLKWLMLD

SEQ ID NO: 66577 - protein, 646 aa, Lactobacillus plantarum
MANVGLAVDQNIHIIDAPAGSGKTYNIRTQITDYLLRNPHERVLAITYTNRAADEIRSNVQNNQVYVSTIHAFINDLIGPFFRNSEVVNLYLEKYRDKIQQMLRGKEPKDKRRNERYEEKYGELSWKTIQTNLRKTGIRYGESSFTAYYYGYLSHDDLLIFAAFVAHKLPKINFKISKQFGLIIIDEYQDTMEDVLSLFFSAVTDTGSELYLYGDPMQQIYQKYSIQMIRRMEQLDRQRVQATNYRSCATIIDLLNKIDDEPSRAQLVPDEVKIKDSDFKPRAIFLDQSAIDSHVHEIIESEEANRSDSQTLALYVFNRERFETIGAPKLLKAYSGIYGYLSKIQPKDVLLELDPGDNPDDMMQILLRLLVGATLLEKAEYGQLIRLTNKGNQIFNEQLMLQTSTDKARVKEFWQSIARLISEPHLTIGDFLGRAYATGALKPIVKETMEDERYEQLLKVELNELENLRHNIQNFSTQHGVKGESHESVIFVAEDSGRYAPYLNMYGFLNLWSNKKITLHSLESFALKYRSEISVLNRENRNVRSIEIAELEVDAKQIMDKFADDEYFKALVEDDYRSFITRPLRKSVGNVMKPDFVDRVLTAYKLFYVGCSRARRNLTLILDKDKVSEFEPKLRKKLIEVGFDVK

SEQ ID NO: 66578 - protein, 491 aa, Lactobacillus plantarum
MFIKKLAVHNFRQLKDIELDLEEKTSILAGPNNSGKTSLILLLERILEDNSFDLKPNDYNIYDQTRWIVDFTKILRKFTSSDEDNRAILKKYLIDSATPVILPEIDVNLQIDYQMQDDLTNFANYLLDLDMSKCSFYFKYRIELDRLKFIETLIDQYSTIHHAIEALDKEDENETSGKNNQAGTMKATSQVDMDTASKTATNVSQGVTDSEGKQHNKPKKQHRSMLLAKILMKLYCQCCQSRTYYCDSKFEQLEKIQNQNDFHRLFNFKYIPAARLTEEQSRSNRSLSNQLVAFANSDDDWNSMMDGVTETLYNTVSENNSSVNRESTEVLSNVLKAVGNSNGQHLGDVQLEVDVDKTEIQSLVGRTTRAQYLVEGTGVSSSLNYVLNETSQGLGYSNLVYLDTEIEAFIRDRKSPENQQKVNLLVVEEPESHMHPQMQNVFAKELISRYDEDGLQGLITTHSTEIVREVKVSSLRVLREETLFNSKLCDS

SEQ ID NO: 66579 - protein, 646 aa, Lactobacillus plantarum; identical to SEQ ID NO: 66577

SEQ ID NO: 66580 - protein, 784 aa, Comamonas sp. E6
MMGGEMHIEFVEIANFRKLLSARVDLSPKTTLFVGANNSGKTSAMLTLRRFLTPRRCPFEIHDFTLCHLKALVDIGEAWVQAHQTDAAADISLTPWIQVLPTLDLWLQVKEDEVHRVRDLIPLMEWTGGRLGVRLRYEPKDLNALFKEFIIAVTEANAMRAAAAAAAAAKGAEAKLTVWPETLVDFLTKRLSSMFTIRAYPLDPALLASPEKLRALPQVLPASALPIEGDPLSNLIKVHDIPAQRGFGESASNVENEELQVSAGGTRLSEQLRSYYAKHLDPAKGPDPMDLEALQAMEAAEGAFDLKLTESFSECFNEVAGLGYPGVSDPRPRVSTRLRAIDGLNHSAAVNFEVDVVSDAGAVMPLLLLPEGSNGLGYQNLISMIFRLMSFRDAWMRVGKASKGAEAASIEPLHLVLVEEPEAHLHAQVQQVFIKKAYEVLRRHPELGESDTLRTQLIVSTHSSHVVHETPFAGLRYFRRLPAGMVAKVPVSTVVNLSQVFGEGTETERFVTRYLRAQHADLFFADAAILVEGPAERMLVPNFIRAHYKVLHQSYVTLLEIGGSHAHRLRPLIDHLGLLTLIVTDLDSLTGTGGSSVQPALGAGQKTNNATLKTWVPALDDVDDLMAATPAAKTFMDTSDTLFAVRAAYQIPVEVTMPGAAAKETAYPYTFEDALVFENVDFFAAFAGPGLSAKFRDAIAMGGGATTIGASMYTALKNGKKAEFALDVLMADNFNDLKVPRYIAEGLEWLLEQMKKKQVEILTTTPATAVSGITAAGTMPEDTP

SEQ ID NO: 66581 - protein, 638 aa, Comamonas sp. E6
MTDVDDQFDAEADATIIECLNLAEPRSFFLYAGAGSGKTRSLVNAVRKTIDGEHGRLLTLTGKKIGVITYTNAACDEIKQRLEFDPRVEVMTIHAFSWSLIEGFNADIRQWVARNLEEEIVELEEQHRNGRPNTKAGIERLRSMESKRRRLARLDSIVKFIYSPTSDNRTRDSLNHSEVILMTAAFLTSKPGLRRMLVSRCPVLLIDESQDTNKSLMDAFLHLEEEFQGRFSLGLFGDMMQRIYSDGKEQLDKAIPARWAMPRKRMNHRCPSRVIEVINNIRRDVDGEEQVPRSNAKKGVVRVFIATQASVDPFAIEAAVRRRMATIADDPAWQNSSTVKTLALEHLMSARRFGFVGFFEPLWGIENLRTSLLQGTGAGLGFFIRDVLPLVKALRANDRFGATAIIKASSPLLDRVALQEAGSNQVAQLGRAKAACDGLLALIQEQPKVSAQAVLEFVAHTGLFTIPDTLAPFVPGSVEAATHDNAAQDNQEDQPEDQEVEDASPQLSAWSKALEAPLSQIELYDMYVQGQSQFGTHQGVKGLEFSRVLVVINDDEARGFLFAYDKFFGAKEKSKADHENEAAGRDSSTDRTRRLFYVTCSRAEQSLAIVYYSPNPELARNAILQYGWFEQGEVELIN

SEQ ID NO: 66582 - protein, 583 aa, Xanthomonas hyacinthi DSM 19077
MHLGNLTISRFRSFDNVTISLRSDLTVLVGENNGGKSNVVDAIRLLTLPLSGRRERYPEDEDVRRHATVPNFQIEGTFRGLGDTLKGLLISAVPDPTQDEAVFGYRYEARSERAPRGKTTMWAGRFDTNEPEAGSSDLIRHVYLPPLRDAHQALGTGSGTRVMALLRHFLPKEQERDFLAGVRRAVARPDILKTMNTEIGTALGMLTNGVRPQVAALDFGEETLLDVARDLRFRLADIGLAPEDIRASGLGYSNLLYMATVVVELAKAKEADLTIFLVEEPEAHLHPQLQVLVLEFLLEQARQSAARAIEAGKPEGRIQIVVTTHSPNLTAWVSPSHLVVMRSRRREENGVAVSESVSVPIAELGLKPKTLDKISRYLDVTRSALLFGNRAILVEGIAEALLLPVLAQKIVLPADADGWLRFKGTVIVAIEGVDFRPYVEVLLRPYGDARIADRLIVITDADPTVLGNRKLDLENLAVTHRARQALTVLTNQHTLEHEIFSAGNEAFLKSVFLRLHRNSRRDWTDRIEGVAAPERPDAFLKLIEAKKTRKGDLAQAIASHIAAGEAFVVPDYLAEAIRGAAHA

SEQ ID NO: 66583 - protein, 592 aa, Xanthomonas hyacinthi DSM 19077
MTGIQGLTGEQEAFSAYAGGVFVHACPGAGKTRTIIARLMRIAAALPARHGVAVLSFTNSAVDEFRERCRAAALDSLLRHPSFMGTLDAFVRHFVVLPGCAVASRTRPIILDSWDSLGVGIRLSGQFAFQGEPVSLDLFDPETNVILPDKIGHAGLRNHVQQHQARYQQAASLRRRGLLQAGYLSAADARVQTLQLIRDPVRGRALGRALAARFHEVMVDEGQDCNPLDLQILSWLRGHGVRVTFVCDPDQAIYEFRNGNLAGIQELKDTYPAEARHEFTGNFRSSPAICRLAATLKSQAQVDDSVGETATVAHPVLLLSYGGRGPSAAIGQAFLGRVVELGLDSANAIVLAHSGNVAQRAASSVAAVDSNGTSRIESLARRVAEFWSPAATARSKETVVQAAEALLLDFMGLRQEGEHLRRAFERTGMDRRAHRRRTLTLLMNLPKVCGNTDADRLAWIDTVHAQVQLLGLPLPPGVTMRTFFRKPPNGQWSSHLQIPTETGLRCAKIHEAKGREYDAVCVVIPPNRAPRNRSEALFESWADRIEAEAKRVVYVGVTRARHLSALAVPTAFADRCAALMTDGDVPFARRNI

SEQ ID NO: 66584 - protein, 154 aa, Xanthomonas hyacinthi DSM 19077
MPEKFLTEAHSSGFGFRVAYQQPVKIDFGGSKGAEAIANTFEDALVYQNIEFFKSLQGGGLAKKIRESIMSSKDVAELSSSIQADLKTGDKAEFSMTLLESSDLDEVVLPDYIDKGLLWLIAQLKRKEDDVAGKLLLAPTSPDDAAPAPSGVKP

SEQ ID NO: 66585 - protein, 377 aa, Xanthomonas hyacinthi DSM 19077
MKHAQHSDENDIDQPADALIAQCLDPASPRSFFLFAGAGSGKTRSLVAALEHVQANWGEQLRRQGKRVGVITFTNAASDEIKKRIQFDALFDVRTIHSFAWSLIEGLNQDIREWLKIKISEDLVDLHEKEAKGRAGKASNDRKLRIVTNTKRLESLPGIKRFIYSPTGNNRTRDALNHAEVIRITAHFLQSKPRMQSIFVGRYPILLVDESQDTNKHLVDALFEVEAQQAGSFSLGLIGDTMQQIYADGKEGLGSNLPATWATPGKQMNHRCPKRVVTLLNKVRAPVDPHQQRARTDASEGMIRLFIVPSTAEDKPEVEERIAELMADLTEDANWRRRDAVKTLTLEHRMAAARLGCLEVFVALYEIDSTSLGGLKN

SEQ ID NO: 66586 - protein, 769 aa, Edwardsiella tarda
MSAADATTSLSGQISLRFVELCQFRRLGKVQLEIDPKTTILVGANNSGKTSILAALRHFLADGSSFGAFDISVSQWPKLRELGRVWDALEEDPSTSGASEGEWEEQLGTLISAMPTLDLWFDAKAGMFHYVSPFLSKFSWKGGGVGVRLRLEPATNIEDLKQLAWKYHLTRIPVKDMGKDSLAWPIDLLDFWLREPSQLGQVRAYKLDADNNPLDGIKTYVSQVLDADSSPIDRKHLQKLIKVDFVAAQRGLGSEEADSRSASGTHRIGLFSNQLLKFARQHLNVAATGHGHRADLIKAVADAQQELDKKIHEAIGPSVEEVKELGYPGLHDPQEIRFRTRIQTAELLDHGTAVQYSMQKDSLEELLPEYSIGLGYQNLQSLSYQLVSFKAARLNPEKGAPAPVHLVMIEEPEAHLHVQVQRIFSGKAHKLISPNGSDESGLKSQLIISTHSSHLAHAENFDRLRYVRRVAKSEEQNMPTTEVVNLGQVFGDDKTTRQFAERYFRVQHTDLLFANAAIFVEGVAERMLLPLFIERDFATLNSRYLSFLDIGGSHAHRLRALVERLRIPTVIITDIDPVEERPGKPKKNGDPTTTLVAVANTGQPGLQCGNPTLRGWHPKLQQLEDYKNPKNEHLVWKEIAECSVRFAWQLPVVEADGQWPSTFEDSLILRNIPWFKQLIDEKVDGDGKQIKPPKGALGSVARQVAENDNIPELLAALHKLMHGSFNKGDFAASIFEMVAADEPIVCPKYIEDALEWLQTQLEPSKEVMP

SEQ ID NO: 66587 - protein, 649 aa, Edwardsiella tarda
MTNSSALDDNDRDAGVVEEICGYLTDIPPRNYFLFAGAGSGKTRTLVEVLRRLTGVTEHEKGGQLARSLKMYGRSIRVVTYTKNAVSVINRRLGDNNLVSVSTIHSFCWELINGFNDDIRESLIAVKEAQLAKETAEAQAKPRGITAAKQRDLDEITNEIEALRTTEVFKYHPDRNTYGPGALPHNYVLDATAWLLQNKPTLQSILKDRHPIILIDESQDTMKGVLDSLMELAKKSERDLTLGLLGDHRQRIYMDGHADLPSIVPESWATPELQMNHRSQRRIVTLINKIWETEFEGRTQPTKGSAQHPRTEKAGGTVRLFLGDTSRSPEDKVLSERWCAERMFEISGLADWNQGQYQLLALEHKLVATRGSFLDVYEAMVLLDPNAAAPSGSGDNKGPSTVQILLNELAHLEACVSDEGIVNEFKATEVFRRYGGLGNMPEDSEARVERTDEMLEAIAIFAMACANSESTIAEVLAPVLSANLFEVDHRLLEAYVDKSPAPQAPGRGEDESKQTRMRRGWCALFASPWKQLKCYRNYLAGISELATHQVVKGSEFNHVMVVMDDALAGGTLIKYDKIFGGTQLSPTDKKNAEAGKETTIDRTLRLLYVTCSRAQESLALVLWSSDPAAAMARIKESQWFAEDEIQIIT

SEQ ID NO: 66588 - protein, 532 aa, Lactobacillus salivarius str. Ren
MNDYMDEKIKHNIELKERYLKQRIVTLYVNSIVPTCYFCDEKYENRCQMDDVKQFRNLFNFCFIKASRPLDDDLSDHSHSISKQMIKMAKLDGEWNELIDKLPDEILKPIQDKDISKKVQETSLNSLKETIMAIEETNGGRSGELMLDMLVTEEDISDLLQRITMATYCVDGYFLGEESQGLGYSNMIYIHLQLNEYENSKDSCKVNVFFVEEPESHMHPQMQQVFIKYLIEHYKNGIQGLITTHSNEMVRVAGIKHLRVIRKTDSFLSELHDLSKLINELQESSNSEDKLLANFYDWFFEIGYSELIFADKAIFYEGDTERLYIRKLLTLKKYEKLKQQYIAYIQVGGAYAKNYQKMIELLGIKSLVITDIDYSKDAEVIDEIESSEITNATIKAFYRIDNPESNPTVKDLYEWKNKNKNIISNGLIYTCFQTNNDGYSRTLEEAMLSKYFSIDVTTSLTKREWIEKKENSKLKFVIPTKGIEEENSIKLRDILKSTSSSKTNFMYSVVLNEKVEKTEPNYIQGGLEWLMK

SEQ ID NO: 66589 - protein, 648 aa, Lactobacillus salivarius str. Ren
MVDEVENIYLVNAPAGSGKTTWIRKQVEKHLLENDDDNILCITYTNRAAEELGRDIKSNRVFFGTIHSFISNYMGSFFGHKEIIDLYWELYEEKIAQRIANVENKKHVSISNERYIEKYGVLDMETVHSNLKKISYGETQFTSLYYGLLSHDDLLSFTKKAVERYPVILKKIRDKYQLVFIDEYQDTNADILKLFYSSMVSGKGKLYLLGDKMQQIYKNYDGSFEDTFNILNKSTRLDVNYRTTPYIVNILNAIYNDKSLQQYPYDKNLDSQMLFKPKVIFTNDRDKTVNIFTKKNKGTLVLYLTNKERFYGIGVKKLYESFNKIPKYQFTGKYSVVDVLTKEEVWNQDILLSIIFLLIDICDYYINGKIGNIFKITRNNEKIFNRKVFSIRFHADKKALHDKLDNLIAIYQEEGTTIGSFLKSCCDNRLIEEEYYGEIIEDDDYASALEVTLSEILILRNFLENPYISTQHGVKGESHDTVLFVAENNSKIPIVNMSKFFDLWSKVNVVLRDFDNFYYAYLKMIKSIEKKCGMKISKINSNDYRKNETFISEKISKFNEIYYDNDYYIVLLKDKFDKYFVKKNNKSAQECLKENAVYGALVAYRLFYVGCSRARKNLAIVINNADVVAFEERLKNKFKDIGFEIEEI

SEQ ID NO: 66590 - protein, 583 aa, Enterobacter aerogenes; identical to SEQ ID NO: 63878

SEQ ID NO: 66591 - protein, 591 aa, Enterobacter aerogenes; identical to SEQ ID NO: 63879

SEQ ID NO: 66592 - protein, 583 aa, Enterobacter aerogenes; identical to SEQ ID NO: 63878

SEQ ID NO: 66593 - protein, 591 aa, Enterobacter aerogenes; identical to SEQ ID NO: 63879

SEQ ID NO: 66594 - protein, 770 aa, Enterobacter aerogenes; identical to SEQ ID NO: 64882

SEQ ID NO: 66595 - protein, 649 aa, Enterobacter aerogenes; identical to SEQ ID NO: 64883

SEQ ID NO: 66596 - protein, 770 aa, Enterobacter aerogenes; identical to SEQ ID NO: 64882

SEQ ID NO: 66597 - protein, 649 aa, Enterobacter aerogenes; identical to SEQ ID NO: 64883

SEQ ID NO: 66598 - protein, 690 aa, Enterobacter aerogenes
MRIHQVQIKNFRLLADVELVLEEQTTVIVGRNNSGKTSLSEIIRRFLTDGSATFQLEDFSSSCYDRFCDALKALNEGEEDHVIRDLVPAIELRLKFQYDSTQPQLGPLSPFVIDLDPACTEALVVVRYELKDGQLARFLEGQPTEPLTQETRIAFFRALRERIPNEFCVKIWAEDPNDPENRRELQSSALRGLVKSGFINAQRGLDDVTSRESDVLAKTVEHLFATASSASADTADKQIADALKGAVQDIQTQIDTNFGSQLKSLIPALKTFGYPGLGGQELHTETLLDVRKLLSNFTKVRYSGYSGVTLPESYNGLGTRNLIFILLQLAGFYKAFRAEVTEPGVHLIFIEEPEAHLHPQMQEVFIRQLAKIVQQLVDGTEDRSPWPIQFVVSTHSSHIANAAGFESIRYFLGATVQGTQEGVRTTKIKDLRKGLRHIPTEDRNFLHQYMTLTRCDLFFADKAILVEGLSERLLLPAIIKKLESAEPERPKLSNQYATVMEVGGAYAHLFFELLAFLELQSLIITDLDAVLAPRGKACAVHLGTYSSNACLKAWFSEDTPFTLAGLIARSDDDKARNGNRIAYQCAEVTDGPCGRTFEDAFILANSALFGLVGRNTQELEIEARDKGAEWKKSEFALKYAITETEWNAPKYIVDGIRWLAGSNEPMTQDPVLAQVVEATTNIEEGASADV

SEQ ID NO: 66599 - protein, 577 aa, Enterobacter aerogenes
MSEIHSPAEAASQRALESMYACLSEGRSFRLEAGAGAGKTYSLIKALRFLIERNKDLFEKHSQQIACITFTNVAKDEIVARTDRSPIVFCDTNHAFCWSLISSFQKPLRELIEAMPEWREKLEEAGGSLGNRSVEYNLGHRSIRDHRITIHHDDVLSLTISLMEHDKFRKVITERFPIILVDEYQDTDKEWIEAIKRHFLGQTGAPLFGFFGDHWQKIYGGGCGKLEHPDVVEIGKEANFRSDKTIVDALNLMRPELPQCVKDPEAEGQVRVFHTNNWQGVRQKGLHWGGDLPLAEGQATLERVKETLQQDGWDFSPAHTKILMLTHRLLANQQGYSNIVATFRYNESFTKKENEHIAFFIDKLEPACDAFEARKYGAMFEVFGGATPQLRSHSDKESWHNAMMQLLAIRETGTIGEVVEFLRTHRKPRLPDNVEKHEQELLNYDRTAGAEIPRRLKELEKLKDIPYSEVKSLRRYLDGHSPFETKHGVKGAEFENVLVVVGRGWNQYNFGEMLGFAGEQMLPAGKEDSFERNRNLFYVACSRPQKRLAILFTQALSPEALATLGNWFGADTIVPAP

SEQ ID NO: 66600 - protein, 659 aa, Enterobacter aerogenes
MKITQMEIKGFKSFDNVGQTININSFTSLIGGNGTGKTAVLLALTRMFGVKSSDRIIQVDDFYVPPGDEIDTQDERELSVRVKFEFADLEDGEDNTVADFFKHLVSSEAAEIPYCTAKLKAKWTKTNLAEGDIESDLVWEIGEYEKNITAYERSKIHVHYVPAYRDPAQQLKQTAGTIMHRLINAVEWSDQMASTVDEVAVSIGNQFQEEVGVQTITSSLGRNWKTLFTGGYFEKLQIKPVVNGIEDVLKHIDTVFLPSPDTQPLPTERLSDGMKSLFYLSLVKSAFDIEDEIINSDGKQLSISVEALDPPNLTIILIEEPENHLSPQYLGRIVKLCEEISENDRAQVVLTTHAPSLLNRVEPENIRYFRLHDNKNTIVKEILLPREDKDDAENVDTFTYVKEAVKAYPEIYFAKVVILGEGDSEEIVIPKIAQVNGIELDTSLITFAPLGGRYVNHFWKLLNELSIPHVTLLDYDFRRGGGGWGRIKYAVKQLISIGVDKNILLKMSDGVLSDEDLEVMHSWDEDRDEEIAWIESLKEYGVYFSFPYDLDWLMLNEFFEDYKKFVPENGGPRLPKDDDPEYNKKVKAAIASVLKKEEKDIDISKFDDFEKYFWYRYLFLGRGKPLSHNYVLSKMEDDKLRDNSPEVLNELIETVRGLL

SEQ ID NO: 66601 - protein, 615 aa, Enterobacter aerogenes
MPIIKDDDWVLKDIQEVEDEAMKVIRNSTEHNLVLAGPGAGKTELLAQKACFLIETGKCRDKRIIALSFKKDAAQNLQDRVNSRLDLKYRQKFESTTFDAFCKSIVDRFKSTLPVAYRPSDDYEIYFPENKKFVEEVKRDAVGFEGLTAEELKKLKHNNFENNYIVRPYKKGEEHSVDARIKRFVWFRLLEGKSKVSFKMINFLANYIIRNNKFLSNAINSTYEYAFIDEFQDTTYQQYEIFKSIFLDKKIKITAVGDTKQRIMGWAGALHSAFEIFKNDFAIEHHNELLSNRRSLKNLISYQRMMEAFMNHADNKPEMELIENEGSAKLIQFDESNIEGAYIALCIQKWIEKGVDEREICILFRNPSKHYTDKIISSLQDLDIKCRIENTYQELLNEAIVQLILKMLMFTCDKKSIEGWNSTMELLCNIRGVNKSRDITRLEKELSRFIKSNKDINGNVVDYIYGLISIFGIDEIKSYFPQYINGNGLDYTINSLSQHLETLGIKDNKLAAIDMLLGNKTIPLMTIHKSKGLEFKKIIVVGLEPGAYFGDEEEQIENQKTVFVAFSRAIEEVILTRCAKRANWWDEVCSQNFSEIPLITDMLTYCGLEAEIYKD

SEQ ID NO: 66602 - protein, 583 aa, Enterobacter aerogenes; identical to SEQ ID NO: 63878

SEQ ID NO: 66603 - protein, 591 aa, Enterobacter aerogenes; identical to SEQ ID NO: 63879

SEQ ID NO: 66604 - protein, 770 aa, Enterobacter aerogenes; identical to SEQ ID NO: 64882

SEQ ID NO: 66605 - protein, 649 aa, Enterobacter aerogenes; identical to SEQ ID NO: 64883

SEQ ID NO: 66606 - protein, 673 aa, Enterobacter aerogenes
MQLKKVLISGFKSISNTHPQTIELEHELTSFIGHNGTGKSTVMEALNKLFSVDHSLRGLSVNDFHNVNDRSDGDCKQLFIEAWFSFPEPDEGTVTIPSLIEHLTIDQSDGGILFRVRLEGKLSFESNLLGDIDEDVWVINTSDDVFDESNKQKLSAAVRNSIQVSYVPANRDPLLQLKYSSRAVLGRLLKAIEWSGEHQGGFEEQAAKLNSLAQGNPALSEITEAINTSWGHVYKGRYLSKASLNFPLANIDEILKLIQLQFNPDEAGNTVNVDRLSDGQKSLVYFSLIKAMFDIDKKTRELISSGVASNFNPEKMKLPIFSMISLEEPENHLSPHYLGRIIKLVKDYGSNELCQVIISSHSSSILSRIEPEQIRHFRLDKDSKSTIVSALTLPTKKDELSKFIKEAVKAYPEIYFSKLVIFGEGDSEEVIIPKVLELYSTDIDSHSISVVPLGGRHVNHFWRLLKSLQIPYITLLDFDIDRNGGGFGRMKYAIEQLAVFGVSGSQYIHKDISAHIPAWDSKQNPKEFTLTFNSGDTVNITEALEDCNIYFSSPLDIDYAMIESFPEIFCVVDESNGEQGPEEIEQGKEIDLIKAVLKGGSSGVRYPFSTDYLNYFLWYRYRFLSNKSKPASHIRMFAKLEQQYTPAQIIERLPSELIKVAEKTVKLLSEIVE

SEQ ID NO: 66607 - protein, 557 aa, Enterobacter aerogenes
MTVQWQPSEGIKPTDELMAIITCDKSVSVLAGAGAGKTEVLAQKANYLLQTGKCIWPKRILCLSYKKEAQENIRVRVVSRCGKKSERFDSFTFDAFCKSILDRFKDILPEEKRPDNGYDIVSKPKDCNGKDKLSFDLIRKLSLDILSERGDIANLFSFSYSHVFIDEFQDTRADQYNIIRLLFKDKGTQLLAVGDINQSIMLWANASPTVFQDYCKDFHSESKLLMQNFRANEEIQDVLRCFVHFVQDEINFLPMTRDVENCSVLYYKNEITEADDITKRIERFISSGVKEKEICILTKQLSAQYTQKLRDKLTARGIRNLDMTELQDYLKEPLGKIFSALFKVYSSRSPSGYTELCELYLALHNIERGNEKEELLIRDLSEKISINRMKVGRSSSPDLILSCIKDIIDFFGVKKMTGRWSQYKSKAFWEKLWMNLEHHLRYTISVTNTVAEAAGMFSAENSIQVMNIHKSKGLEYKVVILLGLEDQAFWNYQKAKFENDCAIYVALSRAKEHILVTSSGYREHRLNNGYDNRTSTYAMVKPVYAFLQTSCKFQMIK

SEQ ID NO: 66608 - protein, 566 aa, Enterobacter cloacae
MEISYLKLKGFRNFKDAHINFNSNTLIIGANDVGKSNMLHSLRMLLDKSVSDSGIEPNELDFHLENGNSCEEFEIILHFKDINEDAVLSILKGNVSDSGESFIKYVAQKSDLSYKLFIGDSLESLQEINSRYYLKFVNLKYIQSQRDLERFIRKEKRQLLKIAQQSLNSDERKEDEDLLGEISTDLQLINDKISQLVYVERATKEINDELKKLAHHYSEYSVQLDTGAIGINDFIDNLQLEANTNGSNVMLGGDGRNNQILLALWKAKSIKEHDIDNEVIFYVIEEPEAHLHPHQQRKLADYLIAEIPGQTIISSHSPQIAVNFEPDSIIRLLDRGGHTVAASEGCSKGISDGWEDMSYRMSILPAESFFSNGVFLIEGPSEILFYHSLAKSLNIDLDYLNISLISVDGISFKIYAAILDALEIPWVMRTDNDVSKLKDKEKWHYAGINRCLDIAGIEKFEHSDKKISSQDTLANGDWQRVSDEVNRSGIYLSKIDLETDLVEELGASILDALDKKNNQSAIEYLQKKKAIRMRILLKKIKNDLDKLSMGDLVKPLHHLVKIVKGE

SEQ ID NO: 66609 - protein, 541 aa, Enterobacter cloacae; identical to SEQ ID NO: 66009

SEQ ID NO: 66610 - protein, 641 aa, Enterobacter cloacae
MKLEAIRLSGFQSFGKVPTELSLEDVTYLIGPNGSGKTAVLQALCRLFAFDPTLRRVQRSDFHVPFDEGEVPPERQLWIEADFLFHELAEDEDNSTVAPHFGHMRLDEPEGIPRVRFRLTATMGMDGDIEENLVYVLDVNPDSSPQTTAQVTRAERNNIQIHYLPARRDPADHIAYGANALLGRLLRAVRWDDERTAIKELTKQISESLAANPSINAFSESLKLTWATLHKGKFFSDPKITFVASEIEALLRHLSVSFTPGHDGSLVDFSRLSDGQKSMLYLSLVLSSQAIGRAVLAEKDVTFDPDKLRPPIFTLVAVEEPENSLSPHYLGRIVSALNTMAKNIDAQALIATHAPSMLRRVDPKFIRYLRLTEERKTRVACIKLPPKADEAHKFVREAVQAFPEIYFSRLVVLGEGDSEEIVLPRLLQVKGTPVDESAITVAPLGGRHVNHFWRLLSALQIPYLTLLDLDVARYGAGWGRIKYVNDQLAAFEPEKILPSEWKITRWNDEATPVRTHHFFNKGTQDIFEELENRSVFFSFPMDLDFSMLLAYPEAYGVEEDEPDESTIKAVLGKNYNNVSQYSADEQSLFATYHQRFKLGSKPAAHIDALAKLSDRELIANIPESLNRLVDTVIVKLGELPE

SEQ ID NO: 66611 - protein, 555 aa, Enterobacter cloacae
MIPIEAWQPADGLTLEPNAKRAAKARKRCLALTAGPGAGKTEMLAQRADFLLRTGTCRYPKRILAISFKVDASRNLKERVERRCGADLASRFDSYTFHAFAKRIIDRFRPVLKGREALDSDYTIVDKKISISRSQIEFSDLVPLAIKILQNSKIARNSIRQTYSDIFLDEFQDCTNLQYELVKLAFLGTKIRLTAVGDTKQKIMGWAGAMDGIFQTFTDDFNAVPLNMYRNFRSKPQLLRVQNEIIRRLDLASVMPDEQLNGDEGEIHVESFRNSQEEAIYLANIINDWINKEGLAPIEIAVLVSKQLDLYADHLMMELELRGIPYRNEQQMQDITVEPVARLIVDYLSCLYGKREPKAWIRLMNQLIPFADEEVQSCARKDLDRLLKKQRKEATSAEQLDSPFSCWWKFVKEFLKHIGTDTIVALSPDYESHKRLQEVFRDTKARIEELLEIESDLPQALRRFTDDQAVRILTIHKSKGLEFDSVIIMAVENEIFFGNQDENRCAFFVGVSRTKRRLFLTHAAQRERPANAKRWEVHRTVQSEYIGYVTPFIKR

SEQ ID NO: 66612 - protein, 770 aa, Enterobacter aerogenes; identical to SEQ ID NO: 64882

SEQ ID NO: 66613 - protein, 649 aa, Enterobacter aerogenes; identical to SEQ ID NO: 64883

SEQ ID NO: 66614 - protein, 738 aa, Escherichia coli
MFIRKVALVNYRNFKGANFYFDKGINTIIGENASGKTNLFRAIRLLLDSSMPRYTLKLQEGDFNRSIGEWRGHWIIISAEFDDIAKDEASQSLFLHGAGNAEAEIVSRATYSLIFRPKSFIRQSLSKITSGDRSALEEIIRSITIDDYETILVGKSSVDLSTPSVYKKIVGDFENIIFPEKLNHPELGVKLPNILNIPNEVCLTYIKALRDVVSDFHNNKTNPLLTLLKRKSGEISTTDFQPIADLVRNLNNEIENLPDICAVNNDITTTIKDAVGDTYSPKGMSIKSSLSEESNELFQSLKLFVAESSDGHEGAIHEMSLGGANLLYLTLKLLEFKYQHANQSIANFLLIEEPEAHIHTHIQKSLFENIKYHNTQIIYSTHSSNISEISNIKNMNIIGFVNNNCEVFQPSKSLSDEQCEFIQRYLDAIRSNLLFARSVILVEGDAEELLIPTLIKKVIGLSLDEIGISLINIRSTGFENVALLFNDERIKKKCSIVTDLDEAFFDITIPENADNDNDEIKVKKKAAASQKSGAERKVRLQNFSNNNDWVEVFFAEHTFEVDFIKSGNKYYLGKIVDDVYKQAATIEVAKNELNSSDISISGVRALTMANYQGKGWFALTLGKVIDFKTAIPDYIFDAIKFSHGDFNRQLKYKILEHRYNSVVEHVSFAQEQIRKLNEPEDIQLKNEWSGYIKAYEDGLNAFTPKWNMFDILKDDVDALKIQMMNDLPNENKDILRRI

SEQ ID NO: 66615 - protein, 595 aa, Escherichia coli
MFTWEKGELNEEQEDAINMPGSVLLIACPGSGKTRTLTYKIALELSKLSDDKKYVLAITYTHKAADEIKERIELLGVDTSQLWIGTIHSFCYEWLLKPYSIYHENLKDGFKILNSYDSEELITNICSNYKSVKTKFYECNHYYTSEGMQLSGTIKKHEAIRNILKEYHLQLRSNNQIDFEQMLYFSFQLISKQSISKILSGIFSYIFIDEFQDTKEIQYAIVAKIIKSSKGAIDAFIVGDPNQAIYGSLGGYAISQEKLEEMTDSHFSCLTLDKNYRSSQRIIDFYRNFNVLHSATSSESELKSYKSLITYNQIINKVNLVDHISKYIEHNIKTLGIEQKEICILAPWWMHLAALTRNLVTRLPNYNFDGPGLVPFSRDIDNFWYKITQVILTEPSPNMYVKRMRWVDDILSEMNFSQVDVHKLNPRLFLNIINDIKIDVVNGLDYLRDFFSELFNRIEVNISSYPLLQEHYDCFFKSSQDRIERLKKDNDHFETHINAFRNAFKPRTGIKVSTIHGVKGGEYDTVISFGLLQDMVPNFNDSSDESAKKLLYVIGSRARKNLHLISERGRRGTYKDYESTKVLSGTKFTYDLDPF

SEQ ID NO: 66616 - protein, 627 aa, Brachyspira hyodysenteriae
MYIRELTITNYKNIKNVKIDLKHEYSMIYLTGENGIGKSNIIDIIFKLFTYKKNLFEKEDFYKNEEKIEIEIKLELYTDEIFKDYLYRDNNKYFMKVVYKQYSSNDEYEWFYKNLTEEYKLHNNILTNFICYKYSPREFDNNFMFNKSNRIGKFISKIIENQIKKYQNDDNKLQKLLKENYENCKNELNEIFKPIFNKPNQELKLNIEIDDEIKFLLKLFELVHYHSDDNKLYLNQLGRGRGYYLYPFIDFLAFLYDKINNTKSQGFNTNIIILFDEPEVFLSPFLQRQFMDHWLSIFNNNQDYKIINNILNIITDDNDEIEYKITPIFFVSTHSAHIIPHLELNEKKNILSIQRLYYDKENTVKVASLDKYRAKLKQFMIFDRNILEGLFAKKIILVEGDTEIGFLPSCLNANGINIHQEHIYIIKAAPNNFPSLAKIFSKLQIKTYILTDRDCKNKEIKEQRNNKIYKTYVNEEYGYINKRVYDLYESIKNCNNVKIFVSDYWDFEESILVCLKNHFQKIYISIGKSNSNDKGKLIEKVQDENLDEEFTKKLLYMRKKHKNINDNYKLIKRIIKENLKLEQNEYKNGEKINFGNMNNEAIKNVAEENYKLPKYIINLIKELKNDE

SEQ ID NO: 66617 - protein, 531 aa, Brachyspira hyodysenteriae
MMNSDKVNKILEKHKNDKEQLDFITSTEQSLTIAPAGYGKTEMLISKLNYIIESKQIKYPKRILVLTLSNVAKHTIESRLNNNQIVDIYNFHNLASRILRLQGKQYLKIDYKYEYEHNNLENEIKDEYKKMIYKINIEFPNIQLNHKKIEKCINNINTKKKIYYENVIYFAIVLLNNFNINEIYKNLYSYILVDECQDINLLHFILLRSIADNEYNKIFFLGDTFQSIMKFADALGEQIEDLLNKYFNITKIIELQKNYRLEGRENISNFQKNIRNYDKKSQIEIDENFQIQSFNNFEDEISFINNQINKITSENKKAKIAILCPTKYSLYDKNNKLIEKMESIFTNLKINNIEYINTLLFSDNLENEIYDKIKDIKRLNYNNIIRSIENDHFYNDDIKKLIEGYRNYCLKFGMDFNTIIEVIKEKDLIKYAPYCSVNLNILNIHKAKGAEWDYVFIPFVNKEKFPVFYKCSECRLNTCNEIIDTKQYKEEFYQAFYVAITRTKYGLYITATKNNASCLFYHSLKLINNFN

SEQ ID NO: 66618 - protein, 703 aa, Vibrio parahaemolyticus
MHIKSLEITNFRKFKDKSNTVTFVEPTSKTDDESMISSSTTLVVGKNNSGKTTVTQALNMVVSEQSKVWGHDFNYSYIDELLSSYESGSFEKFPNMRFKLTFVTDPKLASLVNSKKVISLGQATKEDHNDLKEFSLVVDFQIENKIKFQEDVRILLEKCSSKTRDFKFRKLLELISEFKFDKVVKSPEGIVKAINISSLIELKVISAANNIHDSRLLSKAFNKIIKYKYQTNDKDFDEVNELISNNNDELTGNIRETHESVIEKVLQGIVGTESLGIELRADLTFDKLMDGLITYEHKDAGFLVPEGQFGLGYANLISIISEIIDYIERTPSTDKTTKVRLICIEEPETFMHPQMQVNFIRHIDSALRKIIGEGEEIKSQLLITTHSAHILNSKVHSSGSLDNINYIYPHQKYCENVPIKDEDISPESGRKDEFYFVKKHIKHQVPELFFADGVIFVEGITEERLLNFYIERDEVLSRKLISVFRVDGAHAKVYDKLMRQLRIPSLIVTDIDFKRNKSESTLSEETKSGKEITWEIYPQMTSISDDRFSTNKTLKYYFNSDKVKDYTDYYEDSNIKVVFQKDPLEIILSESEQARYYASSLEEALVLENYDNDIFRNVLRSTIQKNYDELVPEGTCEYVNLAHNSFKIQKELNTSKSKFANNIIYALVVNEESAALPKLPNYIENGLEWLASKLSGAEGEASI

SEQ ID NO: 66619 - protein, 690 aa, Vibrio parahaemolyticus
MTIHSLLEEEKQVQAQIFKNLEENRSFYFLAGAGAGKTYALVETLKYSLNQSMQKLDRSGSRIACITYTNAAKNEIIERFYDSNYLCVSTIHSFLWEIIEPYQKELLGVHREYIEQLISDIKYEIYTCDVKGKAPAFKKLRALSQDESLFLNEKVIANTKEIYNCFRCEDASSFWAELESILGGDIYTKIKSSKADVEKILRSIIKISRLEFCAKMIDCKDSKYSTVSYNEKGGREILHKNLIGHDTLIDYSLTMVEKYPLLRRVILDTFPQIYIDEYQDTHTQVIKIMDMLITYSKSHNIDFIVGFFGDPVQSIYSNNELALSIDNELDMVYKNINRRSRGGIVDLINVIRGDHQKIHQKALKNNDESDIFISSYGKEGVDEICFINDKIEEVKIKWKITSKNKLTCMVLRNKTIANLCGFGSLYDIYNNIYCDKSSFLSYASINDEVLSKDIVKLGILPLLILKISTPIFKIKFESDSPLSDVFSDESLDNHTLEEISTCLDYVRNGGYSSLSEYSSDLLKKSTESDRLKALYSDLAKGWAINSEDINCPDDIVDCLCYSISSSASDKLRDNVKLILSLDLNEIFNWIRFVYKIDIDDEVSYITCHGSKGLEFDNVLAIIDDKFGKDSNNKNVKDKFTKLFVSGFHENHDTDMEKTRNLFYVICSRAIRNLEIALLKEGSVNEEIIFK

SEQ ID NO: 66620 - protein, 746 aa, Streptococcus agalactiae; identical to SEQ ID NO: 63782

SEQ ID NO: 66621 - protein, 672 aa, Streptococcus agalactiae; identical to SEQ ID NO: 63783

SEQ ID NO: 66622 - protein, 746 aa, Streptococcus agalactiae; identical to SEQ ID NO: 63142

SEQ ID NO: 66623 - protein, 672 aa, Streptococcus agalactiae; identical to SEQ ID NO: 63143

SEQ ID NO: 66624 - protein, 654 aa, Microvirga vignae
MYLERLHLTNFRCFGPQTTTIDMARGLTAFVGVNGSGKTAVMQALLRLFGVTPEHRRVRRQDFHVLSSEAGTPLEREFVVEAILSFPELEGADGHAAVPEFFHQMACEEDGRLKCRLRLEGRWTDDGSLEGVIEQKYQAIRALGDFEDGDRSDLRPTDRARIQMIYVPTSRDGSSQVSAFLRGRLWRAITWSQGMKDVFLDAGGRLNGAFGDEAAVDLVSTAVERRWQQVHSAGTDTKPVFRPVDLRFQEFIRKVEVVFHPDEEGRDRGLEDLSDGQRSLFHLAMTAATLDVEGRIADGSAGAAFQAGSVPLPVLTLIAVEEPENNLAPFYLSRIVRQIEELAGTGRAQAFISSHSASILARVDPDQVRHFRLEPADRTARVNGIRLPDNDEDAAKFVREAVRTYPELYFARFVILGEGASEEVVLPRLAEALGLPIDRSFVAMVPLGGRHVNHLWRLLSDLAIPYATLLDLDWGRDGGGWGRIKTTCEQLLAVGRTSTEVFGTELSAADIAAHLTELAARSPSDTDGLRQSIVALRRFGVFFSAPLDLDYSMLTAFFAAYQQLEPGMRGPRAGDPRPAVLGNEGLPALYDASYDAALVWYRYLFLGRGKPSTHVRVLARLDAETLKAGIPEELKALLDYVIAALSFTPAEGAC

SEQ ID NO: 66625 - protein, 627 aa, Microvirga vignae
MPLVVPDAWRPRGIADLEPNAWHVLRRQGNTCVVAGPGAGKTEFLAQRAAYLLETGACPEPHRVLAISFKTDAAENLAARVRERCERAQADRFVSMTFDAFTKSLVDRFLPALAADWRPTRPYGIDFSRRPQVEDFLTRARLAAPQPWQAVVAGLGPSDFESKIVGSFRLPLQAMAPATAVEFVIERWWSELLRRPGRSLVTFTMLNRLAELLLRARPQIARALHATYPFVFVDEFQDTTHAQYDFLLSAFGDPRITVTAVGDDKQRIMVWAGARTDAFDRFEAEFAAERVPLLVNFRSSPDLVRIQHVVAQALDAGAIPTVAQSGRRVDGDVAQVWTCPTAAGEAQHLAGWLAQDMAARGTRPRDYAILVRQTADRFEEQLAPTLAAVNLRLRNESRALGRTTLQDLLVDAYAEIAQALLRLGVARRAPAAWQIASDAVLRLRDADPDDELACLRAEEGLSMFLQGLRATMAATPPSTAAAEALADVVLTFVDAQALARSFSEYATGDTLAIALEAFRLHLAACADGSPDWATCLDCFTGVDQVPLMTVHKSKGLEYDTILFVGLDDAMWWSHSAGNPEGIATFFVALSRAKQRAIFTFCRERGQRTRVADLYGLLTAAGVPEVAC

SEQ ID NO: 66626 - protein, 584 aa, Streptococcus agalactiae
MEFKKLVIENFRNFSSIEIDLSNKNVIFGMNDSGKTNLLFAIRYLLDRSIRNKGFIKSDYHKHDISKPIKIQLEIDLSDREEDDEESLKSSHSRLLISTVAGARKNASLDTFLISLEAMYDEKELFGNPVLSWGSTLDDLVEVPQYGTRSDIDKIFQIVYVNPAIELDAFFKRNRKLLFSDDTKTDEDVALEKEIESSIIDLNTNISNLSLITSVQSQLTDAYKSYRKEDLEIKIQSEISISGYLDNLTPYINWNGDTQNYPTSGDGRKKLLSYAINHLISEKQYSSKVIIYLIEEPENSLHRSVQVSLSKQLFIQNIYEYFFLTTHSAEVLYEMNNTQLIKITNQQEATGHSSYYKVPSEFSNLKKKLNISLAQSIFYDRVLLVEGPSEYYLFSSIFEYISPDFEAEGKYLLQVNGINFKPYAKLYRELGIEFFVKTDNDLKASRGDKHEFSPIGFNRCIEILDDNIVAKLNNYRIDFSSKEERNQNIKAKKEELYTMEYSLVSQLNSKRLYISEIDLENDLAKVLSESERNGMNVSDFVNWLQSSKQYNMLEYIEGDLTPEIAHKIVKSEYFKVLVEFLDYE

SEQ ID NO: 66627 - protein, 513 aa, Streptococcus agalactiae; identical to SEQ ID NO: 64745

SEQ ID NO: 66628 - protein, 729 aa, Staphylococcus aureus; identical to SEQ ID NO: 62500

SEQ ID NO: 66629 - protein, 597 aa, Staphylococcus aureus; identical to SEQ ID NO: 62501

SEQ ID NO: 66630 - protein, 729 aa, Staphylococcus aureus; identical to SEQ ID NO: 62500

SEQ ID NO: 66631 - protein, 597 aa, Staphylococcus aureus; identical to SEQ ID NO: 62501

SEQ ID NO: 66632 - protein, 729 aa, Staphylococcus aureus; identical to SEQ ID NO: 62500

SEQ ID NO: 66633 - protein, 597 aa, Staphylococcus aureus; identical to SEQ ID NO: 62501

SEQ ID NO: 66634 - protein, 729 aa, Staphylococcus aureus; identical to SEQ ID NO: 62500

SEQ ID NO: 66635 - protein, 597 aa, Staphylococcus aureus; identical to SEQ ID NO: 62501

SEQ ID NO: 66636 - protein, 729 aa, Staphylococcus aureus; identical to SEQ ID NO: 62500

SEQ ID NO: 66637 - protein, 597 aa, Staphylococcus aureus; identical to SEQ ID NO: 62501

SEQ ID NO: 66638 - protein, 729 aa, Staphylococcus aureus; identical to SEQ ID NO: 62500

SEQ ID NO: 66639 - protein, 597 aa, Staphylococcus aureus
MTNIFEKIVNDLNLEQKDVVESEDNLYVNACPGSGKTRVLTRKIAYQAIKHDGSLKRIIAITYTNRAAEEIKERLSLLSIDDDINIWVGTIHQFCLEFIIYPFKMNLSRVSKGFTIIDDYTQRAYVSQINNMLNLNLKTYELNKIDLSLSHDFKINEVQYTQVSEMYHTMLEKNKEIDFDMILLVAYKILTVNSNVARNIASNIRAIYVDEFQDTRELQYNVIAKLLQNNPQIQSMFVGDIDQAIYGSLDGIAKSVEELEMLTSHTFQSKTLHGCYRSNQRLVDFYSNFQSCPYEIESRGNNKNDRGFISYDCKVTKEDLPNIIKNIIKEKIESGIHEKDICVLAPQHYPLFSLGEYLKKELPYCNFDAINISPIKVNNHSLFFKLAILYFTESGEKVRRRKLIANDILIILKNEFGIEVKDYFIDLDSLQLINSVKRMYSGDDNGVDLYKFVTKHIFVNLNIDEKNYPSIFKHYLFFINEVEDRIKNNSLSSSVSSFKKMFKSRDGITLTTAHKVKGNEYDTVIAINLLNGKIPHWNEIFNVSDKGISSARKLLYVICSRAKNNLFLFSEVGYFTSKGDLLYPTQLLDKIEFDYNI

SEQ ID NO: 66640 - protein, 699 aa, Enterococcus cecorum
MKLTKVIINNFRSFGDSQVIGFNNQTVLIGNNSSGKTTVLQALSKLFSDKQNDRIIRKSDFHLPKGLKPGENSRTLFIETIFEFDELDGATYGPAIPSFFEHFTLSQDDAKPFLRIRLESSWEDDGTVEGSVDTQIYYISSAEDIIKDEDKHRAPRKDLDKIRVLYVPASRTPEKELGNASGSMLSRLVNSINWTEDEVNEITDKIDELNNTFLSENGALTQINNEIQKSWELYHEDNRFSQAELIINSSEMAAALRQIALKFSPTTTEEAFTVSDLGDGLRSIFYFSLVDSILDIELEITKDREENPDNPRFKLIPPILTILAIEEPENHIAPHHIGKLMKRFKQLSNNDNSQVILTSHSPAIVKRIEPEDLRYLRIENNDRVLQTIVSDIQLPQAIDESYKYIKGAIQAYPELYFAKLVVLGEGDSEEMLLPKFFDLLGREIDSSQISVVPLGGRHVNYFWKLLNDLRIPHITLLDFDNERYGGGWGRIQYVIKQLILNGVAKEKLITVTTESQKLRVLNDDEIDKIKDWKIYRPDNQLLEGWIKMLEKFNVFFSAPLDIDFLMLQYYKDYYLKILSKNEGPIISYNNSDGNSKKVKLSDLNKSDQLQLEGFEKRIGEAIQATLKDKSGPGDSFTREEKELMIWYQYFFLGRGKPTTHMQFLLSICDDELKGNLPPVFKKMVRRAEEILGDIKYGEE

SEQ ID NO: 66641 - protein, 605 aa, Enterococcus cecorum
MVKSNDWFPKGVIKLEDAALEVVKDVTNCLVIAGPGAGKTELLAQKLDYLFSTNKCVSPKKILALSFKTDAASNLKERVKKRYGDEYASRFTSLTYSAFEKRILDQFRDVLPENIRPSRDYLIEDWGIIKELLSIDGINVNGWRMLDIRDFVENIILNDGNTHKLKKDLLKGTQDNKPVLLYRQITKLSTQIIDTNEYIRKALQMTYDFVFLDEFQDTTYDQYNLLKTCFLGSSCKLTAVGDNKQAIMRWAGANPDIFPDYIRDFNSNEYQLLMNHRSVPKLVEFQKEVHQILNSNHSSIQTNNYPEFQEGEITLFEFENESLEAESIANNIDSKIKGGIRPSEICILAKQKVNDYSSKLITTLSSKGIKARIENEYQDLLKDPTCNLLLDLISCSQGKRDPLIWENISSFYGNINGVDEFTDELILAKSYKEIDNIVSDIAYLISTFIPNEESMLNIIDCIIEKIDEKRIISNFSTYNGKSDLDIIVKNFSKLLYKEYSQTQGEWLDIVSSFKGENSIPIMTIHKSKGLEYEAVYFLGLEDSAFWNFNNQPEEDKSAFFVALSRAKSYLIFTYCKLRNNRSQNNRNINEIYSLLIQSSLVDVVN

SEQ ID NO: 66642 - protein, 699 aa, Enterococcus cecorum; identical to SEQ ID NO: 66640

SEQ ID NO: 66643 - protein, 605 aa, Enterococcus cecorum; identical to SEQ ID NO: 66641

SEQ ID NO: 66644 - protein, 664 aa, Delftia tsuruhatensis
MHVESLTLTNFRCFGAAPTKVALHVELTTIVGPNGAGKTALLQALMRLFGVTRAQRTIMLADFHVPPSGSASEAEAAAESTRTLSLDVVIRLPELADGSATAATVAPVFRRIHISAPGAVPACRLRLEARWDDDGTAEGAVTQDLFWVNSLADDFEQSHKSGVAAAERGLIQLYYTPATRDAQSQIKATTGTLAARLLKAIEWSKGTEDAVETASKTLTSAFGGEDAIKAIGNALSKRWSYLHDGDIDTKPGLSLMSRRFEEVVARIGVVFKQGPAGEDRGLEALSDGQQSLFYFALAAAVFDLERDVIAGEVDGFHDDALSIPALTLFAIEEPENHLSPYYLARIIQQIQSMVKGGSGQALISSHSPSVLSRVPPENVRYCRRDTDSATSSVLAIPMPKDGTEAVKFVRSAMLAYPELYFARFVLLVEGDSERIVLPKLAESKGLMLDPSFVAIAPLGGRHVQHFWRLLNGLGIPFATLLDLDLGREGGGYGRVKTSIQQLLANGASKRPLLEIKDGLLSDKSLEGMHDWKTKIPALRLWLDDLEKYNVFFSWPLDLDLAMLKAFPDAYKATIEGSGPRMKNEDAAAVVLGSDGKGLEVYTDDAETFTKHMAAYRYHFLTHSKPATHLRALTHVSPATLRKDMPECLLKVLQHIKDRLPAQTL

SEQ ID NO: 66645 - protein, 634 aa, Delftia tsuruhatensis
MSLPPRRVDVEAWAPVGVSRLESNALKVVRSTGHRSVLAGPGAGKTELLAQRAAYLLQTGACPAPQRILAIAFKRDAAQNLALRVAQRCQREHASRLDSVTFDAFAKNLLDRFGQALPPRWRPTPDYEILFPKADLFREFLRSASESRDRVGTAAQINALVPGTFERRFVVAARLPEAGWLSPSPAQWAADAFWQHMLHDGKRSTLTFPMIGRLAELLLRVNETARHAHALTYSHVFMDEFQDTTQVQYDLIHTLFLGTDTVVTAVGDNKQQIMRWAMAMEAPFNVFEADFGARRIPLLNNYRSSPELVRIQHVLAQALDAGAPHPVSKTEGTVSGDCCAVWDFASPRAEARHLATYIAQEMKSRALLPRDFVLLLRQKADDYAQELAPHFATAGLRLRNEDASVGALKLQELLTENLSIDCLLLLRVAMTRNAGAAWAAALRTLEGLMPAGFDPSDANHRRLSKSLDKFASELIDRYPDPPNSQEQAAELVRALVDFLGRDRLKAVHPAYDQGDWFAKVEHSLTQHLLSSAASASDWDSTLDIYEGLDAVAMMTIHKSKGLEYHTVVFVGLDDAAWWSYARETTESTAGFFVAFTRAKQRVIFTYCPTRGNRNAIQPLYALLQQAGVSTISQP

SEQ ID NO: 66646 - protein, 779 aa, Delftia tsuruhatensis
MHIEHVEIGNFRKLHSVRVDFDKKTTVFVGANNSGKTSAMVALRHFLVDRADFSVNDLTLSNWALLDGLGSGWEATVTGDAEDPFDWNSVLPHLDLWLNVPMHELHHVQKILPTLDWAGGLIGVRLRYEPKDLGDFRQEYLAARQAAAKVMSAAVSAGEGSLPLKLVEGFSLWPRTMMDFLALKLRTHFEVRAYLLDPAKLVAPENGIAARQSLPDGSEPLEGDPLKKIIRIDEINAQRGFGFSSTSYHQEDSADDGRPKGGKRLSTQLRSYYTQHLDPFDKPEPKDLEALQAMHEAQTAFGKRLESCFAAALKELEDIGYPGVTDPKLTITTNVKPIDGLNHSSAVQYSVPTHSSAPGGFAHRLPEDSNGLGYQNLVSIVFALMGFRDKWMKVGKAGKSSDVDDALIPPLHLVLVEEPEAHLHAQVQQVFITQAYGVLRKHDKLKDSKDLCTQLVVSTHSSHVAHEAEFSSLRYFRRLPVKPVPGAVPISCVVNLSEIFGKEDETARFARRYLKATHCDLFFADGAVLVEGPAERILVPHFVRTRDKHEYLRRCYISWLEIGGSHAHRLRPLIDHLGLNTLVITDIDAKDGSGKSVVPIRKAGLKARNETLKKWVPEKEDLDALLDLKPGDLARLDTTGFAVRVAYQQPIKTEWTEGRPEEAIANTFEDALVYENIKLFKGMDGNALLGRIRKSLDTASDLPSLATRLADDLAKGGKAEFAMELLYSEEIDKMIVPAYIDQGLIWIADQLKRKEAGIAGKSDLPVDGATSETSKDLAA

SEQ ID NO: 66647 - protein, 612 aa, Delftia tsuruhatensis
MDKHVDAEIAACLDLDAPRSFFLFAGAGSGKTSSLVTALKHVQSSLGDRLRFRGQRVAVITYTNAASDEIKRRMSFDPLIDVRTIHSFAWSLVEGFNHDIREWLRIELAQDIEKIEAEEDKGRKGTKASATRLSQIESKTRRLRNLSSITSFTYSPSGDNRGRDALNHAEVLKIAASFLRFKPAMQSILCGRHPILLIDESQDTNKHLVDAFFEVEEKLKGKFSLGLLGDMMQRIYTDGKEGLGVNLPTHWATPTKRLNYRCPKRIIALINKVRDSTDKQVQQPISSAKDGVLRLFILPAELAAKSAAEKAIALYMAKLTGDEKWGDPKAVKTLTLEHRMAASRMGFAEAFGPLYDYPGWRTSFLDGSLSVSRFFADQVLALVNAKRAGNRFLVARIAKANSPRLSPAALREAPDAKQHLDGVSASIDAFMKLWDHGADPSLFDVLKSIADHQLFEIPESLKAHASGAIEEAEASSSKEDESEDPLSERELAIQGFLEAPFSQIEPMTEYLSGHAHFDTHQGVKGLEFDRVMVIMDDSEARGFMFKYEDLFGGKAAGDRTVETTRRLFYVTASRAQSSLALVAYSSSPDRVRSYVQQQGWFDEAEVIVGVPS

SEQ ID NO: 66648 - protein, 585 aa, Chryseobacterium gallinarum
MHIKHITIQNFRNFKNFEIDFSEGFQTIIGENNIGKSNLYWAIRLVLDKNLSYNSRNLELKDFHGFRNKLNIDDYILVSIEMFSKKLSEFPTFHALKTSDDTARVTFLFAHKLKFNSEFEIGETIEMSDFRWQLFGGGNSLKIDDILQLTSIRMSDLEGINLYYLNAFRNTSTDLHGSTKSLLSKFCISRENSDGELQEVKDILRKSSDSLNKLSFIPKIASNIEEKGKNIAGDYFSFPISLSFISNYDIDAWSQLNVYYNPTDGVNIPIQTLGLGQKNILYLSLFIAELENSSSDFEINILLIEEPEAHLHPQLQKVLFSNLNQLKTTQVFLSSHSTHIASDCEYKNLNILYLNLLKEVKSFSPFKENLLLDRERLLLKRYLDATRSEIFFSSAIIYVEGVSEQFIIPIIAKEKYNIDLTEHNISIVPIHSRFFDPYLKLVNDNNLEIPAAAIIDGDLHLTDEESSFIATAKKLEVENRVIVCEGTNTLEIDIFPNSDTNSKYLEQCFINLGHPISYQNLLEITKSNKDLWQTELLKRIDGTIKKGRFAQELSLLIDKDFIVPPYIERAIKHIISCKKLQYGLS

SEQ ID NO: 66649 - protein, 559 aa, Chryseobacterium gallinarum
MDYLNEIQKQAVYEYNNGLIVSASPGTGKTKTLVARANKKLTNLPKHKKLALITYTNAAADEIASRLDYTENDVFIGTIHRFCLEYILRPFSWIYKWDKPRIASYSDFKEFLEINKLSTIQLEDLNKIKKNLDGSLIIPTEWLHKITFEELSRIYYDFLKQRKLIDFNEILFRSYIIISKNLFTAKSVSNIFMEISVDEFQDTNIFQYEILKKIKNNGDTSFFIVGDEKQKIYSFAGALNETFTIAKKDFGYEILDLNYTYRSTKKIVTGYSKLFSDHPTLINSSKYKDIPFDIRFHQTKKDDNNLYIKQIIDSLIKAKAQVGNIAILTTSWFDAYNIGSYLREYFNIIGLGALPHSNISNTVFAILKTLSRYSVDSSIRNLKIIKRNIELLILEKNIDFNEKEIVFATNKLISQFQKININTGLKESLLQYQNIISLIFKIDVPEVDEILTIVNDDEALNWNFKKYIETLSGINGITINTIHQAKGLEYDFVILNGINENRIPYQRCIDHVKYIYEELTDESIQNGRTLLYVGMSRAKIGLFILHNWKPSMFISQIKL

SEQ ID NO: 66650 - protein, 703 aa, Enterobacter cloacae; identical to SEQ ID NO: 65464

SEQ ID NO: 66651 - protein, 583 aa, Enterobacter cloacae; identical to SEQ ID NO: 64895

SEQ ID NO: 66652 - protein, 703 aa, Enterobacter cloacae; identical to SEQ ID NO: 65464

SEQ ID NO: 66653 - protein, 583 aa, Enterobacter cloacae; identical to SEQ ID NO: 64895

SEQ ID NO: 66654 - protein, 703 aa, Enterobacter cloacae; identical to SEQ ID NO: 65464

SEQ ID NO: 66655 - protein, 583 aa, Enterobacter cloacae; identical to SEQ ID NO: 64895

SEQ ID NO: 66656 - protein, 634 aa, Enterobacter asburiae
MKLEVIRISGFQSFGPEPTEVSLENITYLIGPNGSGKTAALQALCKLFAFDPALRRIHRSDFHVPYDEEEVPEERQLWIEADFLFPELDEEDDNSTVAPHFSHMRLDDPGGLPRVRFRLTATMGLDGDIDENLVYVLDVNADGSPQNTAQVPRAERNHIQVHYLPARRDPADHITYGANALLGRLLRAVRWDAERDTIKGLTDQISDSLAANPSVKAFSKSLKTTWATLHKGKFFADPKITFVASEIEALLRHLSVSFTPGHDGSLVDFSRLSDGQKSMLYLSLVLSSQAIGRAVLAEEDVSFDPDKLRPPVFTLVALEEPENSLSPHYLGRIVSALYTMTKNVDAQALIATHAPTMLRRVAPELIRYLRLTEARKTRVTCIKLPEKADDAHKFVREAVQAFPEIYFSRLVVLGEGDSEEIVLPRLLQAKGAPVDESAITIAPLGGRHVNHFWRLLSALQIPYLTLLDLDVARYAAGWGRIKYVNDQFSAYEPYKKLPKDHGIPSWKDKAQKVRDFDNYFELLEERGVFFSSPMDLDFSMLLAYPEAYDVDKEKPDESTIKAVLGKSHHDSSQYSEDELMLFSTYHQRFKLGSKPAAHIEALTQLRDTELLDNMPESLNRLADAIIAKLEELPE

SEQ ID NO: 66657 - protein, 559 aa, Enterobacter asburiae
MIAAEAWQPADGLTLEPNAKRAAKARKRCLALTAGPGAGKTEMLAQRADFLLRTGTCRYPKRILAISFKVDASRNLKERVERRCGTDLASRFDSYTFHAFAKRIIDRFRPVLTGKDALDAGYTIVDKKNGPSRTQIEFGDLVPLAIQILKTSKIARHAIRQTYSDIFLDEFQDCTNLQYDLVKLAFQGTSLRLTAVGDTKQKIMAWAGALDGIFQTFANDFNAVPLNMYRNFRSKPQLLRVQNEIIRTLDPDSVMPDEQLGGDGGEVYAWRFEDSCKEAVYLADLINGWINTEQLPPAEIAVLVSKQLELYADHLMTELEARGIPYRNEQQLQDITIEPAARLIVDYLSCLYGKREPKAWIRLMNQLIPFADEEIQSSARKDLDQLIKKQRKKVSDARHTDSPFSDWVQLAIEFLKYIGSKILVALSPDYETRSRLNDVIRETFARIKELHKSEPDLPKALGRFADDQAVRILTIHKSKGLEFDSVIIMAVENEIFFGDQDENRCAFFVGVSRAKRRLILTHADQRERPANARRWNINRTAQSEYFSYVTPFVAGNKFK

SEQ ID NO: 66658 - protein, 712 aa, Klebsiella oxytoca; identical to SEQ ID NO: 63712

SEQ ID NO: 66659 - protein, 599 aa, Klebsiella oxytoca; identical to SEQ ID NO: 63713

SEQ ID NO: 66660 - protein, 703 aa, Enterobacter cloacae; identical to SEQ ID NO: 65464

SEQ ID NO: 66661 - protein, 583 aa, Enterobacter cloacae; identical to SEQ ID NO: 64895

SEQ ID NO: 66662 - protein, 634 aa, Enterobacter sp. GN02366
MKLETIRLSGFQSFGQEPTELSLEDITYLIGPNGSGKTAVLQALCRLFAFDPSLRRIQRSDFHVHFEEEEVPPERELWIEADFLFPELAGDEDNSTVAPHFGHMRLDEPEGIPRLRFRLTATMGLDGDIEENFVYVLDINADGSPQNTAQVPRAERNHIQVHYLPARRDPADHIAYGANALLGRLLRAVRWDAERDTIKELTDQISDSLAANPSVNAFSESLKTTWATLHKGKFFADPKITFVASEIEALLRHLSVSFTPGHDGSLVDFSRLSDGQKSMLYLSLVLSSQAIGRAVLAEEDVSFDPDKLRPPVFTLVALEEPENSLSPHYLGRIVSALNTMTKNVDAQALIATHAPTMLRRVAPELIRYLRLTEARNTRVTCIKLPEKSDDAHKFVREAVQAFPEIYFSRLVVLGEGDSEEIVLPRLLQAKGAPVDESAVTIAPLGGRHVNHFWRLLSALQIPYLTLLDLDVARYAAGWGRIKYVNDQLIVHEPENKLPEDQGIPIWNSGTYKVRNYPHYFNLLEERGVFFSYPMDLDFAMLLSYPEAYKVVEEEPDTSTLKAVLGKSHYDSSQYSENELKLFSTYHQRFKLGSKPASHIDALARLSDEELLVKMPESLNRLADAVITKLMELPE

SEQ ID NO: 66663 - protein, 556 aa, Enterobacter sp. GN02366
MIAVEEWQPADGLTLEPNAKRAAKARKRCLALTAGPGAGKTEMLAQRADFLLRTGTCRYPKRILAISFKVDASRNLKDRVERRCGYDLASRFDSYTFHAFAKRIIDRFRPVLTGKDALDAGYTIVDKKNGPSRTQIEFGDLVPLAIQILQSSKIARNAIRQTYSDIFLDEFQDCTNLQYDLVKLAFQGTSIRLTAVGDTKQKIMAWAGALDGIFQTFANDFNAVSLNMYRNFRSKPQLLRVQNEIIRKLDPDSVMPDEQLDGDEGEVYAWRFEDSCKEAVYLADLINGWINTEQLPPAEIAVLVSKQLDLYVDHLMTELEARGIPYRNEQQLQDITIEPAARLIVDYLSCLYGKREPKAWIRLMNQLIPFADEEIQSSARKDLDQLIKKQRKRVSDAKHTDSPFSDWAQLAIEFLKYIGSKMLVALSPDYETRERLNDVIRETFARIKELLKSEPDLPKALGRFADDQAVRILTIHKSKGLEFDSVIIMAVENEIFFGNQDENRCAFFVGVSRAKRRLILTHADQRERPASAKRWNVSRTAQTEYISYVTPFVRPQ

SEQ ID NO: 66664 - protein, 566 aa, Enterobacter sp. GN02457; identical to SEQ ID NO: 66008

SEQ ID NO: 66665 - protein, 541 aa, Enterobacter sp. GN02457; identical to SEQ ID NO: 66009

SEQ ID NO: 66666 - protein, 706 aa, Enterobacter cloacae
MYINKLAIRNYKNFRSSNFCFVKNSVNTIIGENASGKTNLFNAMRLILDDSLPMNSRVLSGEDFYRGLNDPFGHWIIITMYFDDLSESEEEQVIANYTINNGNEEALKEGNYTFIYRPRFHIRQKLYELTVDNKDLESRLEAFTELKSTCIISKETYEAVAFVRTKVDFNNDEVYKQVVGDFENYIFSNPNEDDATVIGVKKPPYFALGSEVACTYVKALRNVVADLKYYKTNPLYKLLTLKSKQIDDRKDISENVKNINEQISAIPEIARLSNKISTSLLNTVGSTYSPKILVSSQLPEDFTELIQSLGLVVEDSLDYDGSGRIDDLSLGGANLIYLALKLYEYEEIRDAEEHITHFLLIEEPEAHIHNHIQKTLFDNFNFQNTQVFVSTHSTQISSVCKISSMNILARQRGYTDIYQPSNGLQPKEISSIERYLDAIRSDVLFAKSVILVEGDAELIIIPELIKVTLGISLDELGISLIKLDGTVFKHISNLFHSNRLKRYCAILTDKDLAYVQEPDELFDADFVESLKNAETDGLRRERELAEYVEGNQFVSVFYAENTFETELVRYDENSDLFNSVIRTTYKRSGDIERVVAGINSDDLRVRFRTALFFANKIGKGWLATEMVEYLHNENRVPDYILKAIHFALKDRELNAVLTKMLAYNMSLMGTHWDDVCNKINSEPDFDKKMQEYRKHFNDSFSRFWEL

SEQ ID NO: 66667 - protein, 583 aa, Enterobacter cloacae
MPYRNLTSEQLDAVKFDGNLLLTACPGSGKTKTLVSKLCFILENKELFDIGKKKIVALTYTNVAADTILERIISYGINSDSLWIGTIHSFCLNWIIKPNIDRIPRLSKGFNVIDEYEKEFILNDLRERYNLSPYDKIDTLLDLSFTPVYSRNTAEYSVVKAYHSYLYENRLIDFDLILNLTCNLLLKNDVLCERLSLIMRYILVDEYQDTSHIQYEILRLIVSKRNSLVTFIGDKEQAIYTGLGAVVKNREELFDYFNLEELEEMRLTGCFRSSQSIIDFYSKYKDDAYYINSLSELKTFPSVILKENSVDITQLSVYVSGIIRTHLEQGISPGEIAVLCPSWFDVIKLSNEIISLNSDLDIDGIMVSPIPKNNENFWLNLVKLALIEKNPSNYLVRQKLLRDLLKELNDLESYTKFLSPKQIIKEINKIEFALDYNCEIDIWIKNLITKFCSSLGLDVNNQSYAYKEMICLIDATKKRMAKYSMNYRANDLHSFFNFKSGVKITTCHSTKGDEYDVIICTGLLNGKIPNWNDIIDCSPAHQNYVARRLLYVIGSRAKKHLYLISESGHKTQKGYPYQVTPQL

SEQ ID NO: 66668 - protein, 676 aa, Enterobacter sp. GN02534
MQLKKIFISGFKSISNQNPQTIDLEHELTTFIGHNGTGKSTAMEALNKLFSVDNSLRSLSINDFHNADEGKDEKTRSLIIETWFSFPKPKEGKISIPPLIEHLTIDKSDGNILFRVRLEGKLSFEANPMGDIDEDIWVVSTSDEVVEESSKQKLSAAVRNAIQVSYVPANRDPLLQLKYSSKAVLGRLLKAIEWVGGSQEVLEEQAAKLNALTKSNPALNEIAAAINASWGNIYKGRYLSQASLNFPLANIDEILKLIQLQFNPDETGNTINVDRLSDGQKSLVYFSLIKAMFDIDKKTRELISSGAASNFNPEKMRLPIFSMISLEEPENHLSPHYLGRIIKLVKDYGRNELCQVIISSHSSSILSRIEPEQIRHFRLDQISKSTVVSALTLPEKEDELSKFIKEAVKSYPEIYFSKLVIFGEGDSEEIIIPKVLELYSTEIDSHSISVVPLGGRHVNHFWRLLKSLQIPFITLLDFDIDRNGGGFGRLRYAIEQLSIFCGGKYGKTKEKIPAWDDERDPTTFKLPRTDGDSYNVVAALENHNIYFSSPLDIDYAMIEAFPDIFCEKDVVYGERGPKNIEQEKQEEQEEQKKELINAVLKKGNSGVRYEFSVDYLKYFLWYRYRFLSNKSKPASHVRMFSKIEEKYTPDEIREKLPPVLIRVADKTVSLLAEVIE

SEQ ID NO: 66669 - protein, 557 aa, Enterobacter sp. GN02534
MTSQWLPSEGIEPTQELMDIIFCDQSVSVLAGAGAGKTELLAQKSNYLLQTGKCMWPKRILCLSYKKEAQENIKTRVMKRCGQRGERFDSYTFDAFCKSIVDRFKDVLPENKRPLNNYDLVFNQKANNGKDKISFDLIRSLALDILTIRTDIVDLFSLTYSHVFIDEFQDTRSDQYEMIKLLFKDKGTQLLAVGDINQSIMLWAGAKKTVFEDCEKEFNTTKKLLVHNFRASEEIQEVLRCFIHFVQNDANFTPIIKSIDNCTIHYYDDELSEADDIADKIARFITSGIEEKEICVLVKQQSEQYTEKLRDKLTTKGIRNLDLSELQDVLKEPLGQIFAALFKVYTSRSSSSYTELCDLYLELHRVSRGDEKEDALIKVLSDNIAKNKKNLGDEPSPDSLITCIKDIITLFGVKRMVGRWNQYKSADYWDKIWRNLEQHLRYTIDATHSLNEAALMFQAENSVQVMNVHKCKGLEYKVVIFLGLEDQAFWAYKNAKFENDCALYVALSRAKESIIITSTKCREHRITNWRDDRTSTYKNIGPIYSFLTKHCKFREVR

SEQ ID NO: 66670 - protein, 594 aa, Enterobacter sp. GN02730
MYLSNLRIANFRNFETVDIPLDGNIVLLGENRVGKSNLLFAIRLVIDPTLPDSARQLKLSDFWDGCDLSTSPQIEIHLEFADFDSDASLSALLTDFRIAENPALARLSYVFRKKEDIAGEPKSSEDCEFIVFGGGQESRTIPSRVRRRIAIDMLDALRDAEAQLASWRNSPLRPLLEDAFGSLSRADLDRVASALESATGTMEAFTPIKNLEESLRGGILNLAGTAHDLNARLRFAPTDPLRLMRSISMFIDDGKRGITEASLGSANVALISLKLAEFAWRRAKNERNFSLLCIEEPEAHLHPQLQRAVFDKLFNNADKAQSLIVTSHSPTLASIAPLRSVVRLCRDDNGRTHAFSLAELPVTTDELDDIERYLTATRAELLFAKGVIFVEGDAEEVLIPGFAEAMGLNLDELGITVCSVAGVNFEPYVKLAGSLGIRIAVITDWDPLDGSKQPLGKARAISIWDALCAVRPEKHKLSAEEKAWFVDKGFEECSDLWKKAGIFLSPQTFEVSVANTPILKDALLNILDAQGFGSLRSSRIASWRAGQDPEPAQLLAMISDIGKGRLAAKLKKKASGLAPPEYIAAAIQYVVSNV

SEQ ID NO: 66671 - protein, 597 aa, Enterobacter sp. GN02730
MWCPMSDRHALSMALSELSSNKEQYGAATEQGHCVVIAGPGSGKTKTLTTAMARALMDDITDPRGVACITFNNECAVELEERLACFSVACSERNFIGTVHSFALNQVLIPYSRCIPGLLPNDFRVATRDECRAAVEAAYLAKFGAIGDPHTRWKFAEEKRRRDVNRLLPSWRSNNPELADFIELYEAHLRRFGLIDFDDMPLIAFRMIREHDWIRNAIRSRYPVLFVDEYQDLGHALHELVLLLCFDGGIRLFAVGDADQSIYGFNGANPRLLDSLVSRAEVKTFRLRFNYRSGAKIIRASMGALGEERNYRGPDGTVEGEIGFHGVEGDYEKQARYIAQDLIPSLRARGFKPERIGVLYRAAWLGDKVADALKAEGIALMRTDTNALIKRNSRLARFIEACSQWVTGGWKEASPAFNLLLGQALSLVYGRRASRTEEQLLTIQLITFLRSGIDQAETAHQWLLRFDKELISGWQIITENPQVEWEVVNELLKRTDPALKQDMALIVFAGKEESTRRVTLSTLHSAKGREFDVAIMFGVNKYDFPGKRDLVSDNALREARRLFYVGVTRPRKELHMVYRKGEHSPWIVELYHRSQQT

SEQ ID NO: 66672 - protein, 641 aa, Enterobacter cloacae
MKLEAIRLSGFQSFGKEPTELGLEDVTYLIGPNGSGKTAALQALCRLFAFDPTLRRVQRTDFHVPFDEDEVPPERQLWIEADFLFHELAEDEDNSTVAPYFGHMRLDEPEGIPRVRFRLTATMGIDGDIEENLAYVLDVSPDSSPQTTAQVTRAERNNIQVHYLPARRDPADHIAYGANALLGRLLRAVRWDDERNTIRGLTNQISDSLAANPSINAFSESLKLTWATLHKGKFFSDPKITFVASEIEALLRHLSVSFTPGHDGSLVDFSRLSDGQKSMLYLSLVLSSQAIGRAVLAEEDVTFDPDKLRPPIFTLVAVEEPENSLSPHYLGRIVSALNTMAKNIDAQALIATHAPSMLRRVDPKFIRYLRLTEERKTRITCIKLPPKTDEAHKFVREAVQAFPEIYFSRLVVLGEGDSEGIVLPRLLQVKGTPVDESAITVAPLGGRHVNHFWRLLSALQIPYLTLLDLDVARYGAGWGRIKYVNVQLAAFEPEKVLPTEWKITKWNDETTPIRTHHFFNKGTQDIFEELENRSVFFSFPMDLDFSMLLAYPEAYGVEKEEPDESTIKAVLGKSYNNISQYSVDEQSFFATYHLRFKLGSKPAAHIDALAKLSDKKLIANMPESLNRLVDAVIAKLGELPE

SEQ ID NO: 66673 - protein, 555 aa, Enterobacter cloacae; identical to SEQ ID NO: 66215

SEQ ID NO: 66674 - protein, 676 aa, Enterobacter cloacae
MQLTKVYISGFKSISNDVPQVICFNENLTTFIGSNGTGKSTVMEALCKLFSVDQSLRIISHNDFYHNDEESEVDKTLIIEAWFHFPEPCEGQLSIPPLIEHLTFDDEADELIFRVRLEATLSYELNPLGDIEENVWILNCCDKDPDESDMTKCSSAVRNSIQLNYVPANRDPLIQLKYSSKAVLGRLLKAIEWSGDYKKLLEEQANALNLLTDTNPALSEIADAINKSWRSVYKGRYLSQAQLKFPISNVDEILKLLQLQFNPNELGNRVSVDRLSDGQKSLVYFSLIKAMFDIDRNTRKLLSEGKECNFNHEKIRLPIFSMICLEEPENHLSPHYLGRIISLVKEYGNYDFCQVIISSHSASILSRIEPEQIRHFRLDNESKCTIVCELSLPDDKDEHSKFVKEAVKAYPEIYFSKLVIFGEGDSEEIILPELIEMYSKNIDANCISVVPLGGRHVNHFWRLLNSLKIPYITLLDLDIDRNGGGFGRMKYAVEQIITHGSSDSIYVNNSIIKFIPEWDSPNNPLSFSINYNAGKANETSRVLLSELEECNVFYSSPLDIDYSMINAFPDIYCSKDNAYSEQGPNLVPLGKEKTLIDAVLKSGNTGIRYNFGDGYLNKFLWYRYRFLSNKSKPASHLRMLSLIKDQYSEGEIIKKLPPELTRLLDKVVKIAEGIIE

SEQ ID NO: 66675 - protein, 560 aa, Enterobacter cloacae
MTSGWALSEGIEPTDELLDLIKEVSSVSILAGAGAGKTEFLAQKANYLLQTGICPWPKRILCLSTKKEAQVNIKERIMKRCGATGNRFDSYTFDAFCKSIVDRFKNVLPVKDRPDKGYDIEFEQKNSNGKDKVSFNDIRTLAIRIIKTRPDIAKIFSVSYSHVFVDEFQDTRFDQYELLKLLFQENNTVMNAVGDINQSIMLWADASPTVFNDFRRDFSAKDKFLLKNYRSSNEIQDVLTCFVNFIQSSNSSITVNKKPKNCSIHVYNNEYEEADNLVQKLNGMIDSGINEKEICVLTKQQSSLYTSVLRDKLTQVGINNLDMTELQDALKEPLGKFFACLFRIYTDKSHSSYNEFSELYLELNNVDRGDEQESKLINKISDLISMYKLEIDEDPSADCILSKINKTLKFIGWSKFISKWGQYKSKLFRDKLWNKLESHLRYTINITNSLPEASKMFVAENCIHIMNIHKSKGLEYKVVVFLGVEDQAFWKYSSENFEDKCAIYVALSRAKQEIIISTSRHRGFRCNARRDDSISNYKKVKEIYDFLLKNCLFTLTKYEK

SEQ ID NO: 66676 - protein, 798 aa, Enterobacter asburiae; identical to SEQ ID NO: 66256

SEQ ID NO: 66677 - protein, 622 aa, Enterobacter asburiae; identical to SEQ ID NO: 66257

SEQ ID NO: 66678 - protein, 735 aa, Enterobacter sp. GN03164
MYISFLKINNFRKFGDNDNIIGFVKSHSESPQKDLVASSTTLVIGKNNSGKTTVTKALELLYSDSEKITGHDFNYNYSKAILKQNLDGRQDITPKLSFEIEIILDDSMHDLTGDFKSFIDAKRSLIDGVRKANIFIEYEVKIKADYISKIEELKKNLPSENDNQEKIFRKYLDILSKTQFKRKIKNYQGVYLDTLTPKNIFDLRVISAAKNIHDKRLLTKSFNKIIKYMYESDADEYEGILNLVDGNNENLTQNIKIKHQSGVERILAKIISDKEIGIELRSELTFDKLMSDLITYEHRDGDFLVPESQFGLGYASLVSIIGEIIDYTNQSLKETNQSKIRLLCIEEPEVFMHPQMQINFIRHIQEALNEILSHQVENLNSLKSQILITTHSSHILNSVIHSSNTFDDINYIYLKHGNAANVLLKDKDIADSKTKILQFEFIKKHIKHQTPDLFFSDAIIFVEGITEERVLNSYIEKDPILNRMHISVFRIDGAHAKVYEKLINKIQIPSLIITDIDFKKQIKKNNTNIIEDNKIIVEAVEAVEAVESDESDESDESDESDESDESDSKVQIVGQISTLSDELITTNATLCHFFKNNKISALSNYYVKDNLMVVFQKDGIDIPRVSPEITYYATSFEEAFILKNYDNNLLLNVLLKVIKKETLSTLGSTRNTNNIAHNSRKLQKLLTNKKSEFSNNLIFSLVTADQPKPELPDYILKGFEWLTLKLKRDGVNYEI

SEQ ID NO: 66679 - protein, 682 aa, Enterobacter sp. GN03164
MKFKLDQQQIEIEKSVEAELLNLIKNFNSFYFISGAGAGKTHALITGVNKFITENHAELVAHSQKILCITYTNNAADEIKQRLGDNDLVITSTIHSYIWDVVKFHMDLLLDEHVIFLSEQITKIQSEIYELETNDITLLKVRSLEEHHINTIISHILKDKNNFYGSIKSASDFWEYLKSITDEVVFNQLRGNYQKLSSILKKLVKHQEYKECILKIEAKEDRFDIIKYFNTKNIEVLYRNIIGHNTLLLYASRLLRKYKLLLKCIIDSHPLIFIDEYQDTDENIINLFLDIDKIAREENKKLCIGFFGDPMQTIYKDSTHSESNSLKKLVKNINRRSHQNIVACINNIRGGHQDVKQSPMKIHIDQCCPALIIEQESNYNYNYLTSVIQKHKSEWSINEKSKLACLVLKNEMLSQLLGFETLYNTMLDIYQAENTKGFEIIGSEFLFREMRYAGLLPSILHDLLMPLYMLKRKANFSISDFFNKSPIQNHNLSDVLNSIRFIDSLNFNTLSDFVNEISKYYPSQDNEIQKIINYNFNLVIEGLEISKNKIIEECRFKDTIKLPQLLDRLFQLDMEQFFLWLDFIYQKYSESLVSYLTCHASKGLEFDNVLVFLSDSFNRKEGYFSTLLNSDMNNNLNSQLESARRLLYVSSSRAINNLKIFLFTNKEIDENKITNLFTHPPK

SEQ ID NO: 66680 - protein, 594 aa, Enterobacter sp. GN02358
MYLSKLGIRNFRNFEAADIPLAGNVVLLGENRVGKSNLLFAIRLVIDPTLPDSARQLKLSDFWDGCDLESNPQIEVHLEFADFDSDPSLSALLTDFRIAEDPAVARLSYIFRKKEEVDGAPRSGEDCEFIVFGGGQESRAIPGRVRRRISIDMLDALRDAEAQLASWRNSPLRPLLENAFSSLSRADLDRVATELQAATETMEKFPSIKDLEDSLRGGILDLAGTAHDLDVRLRFAPADPLRLMRSISMFIDDGKRGIIEASLGSANVALISLKLAEFAWRREKNERNFSLLCIEEPEAHLHPQLQRAVFDKLFNNADKDQSLIVTSHSPTLATIAPLRSVVRICRDPEGRSRAFSLADLPVTSEELDDIERYLTATRSELLFANGVIFVEGDAEEVLLPGLAQAMGINLDQLGITVCNVAGVNFEPYVKLAASLGLPFSVVTDWDPLDGTKQPMGKTRSIGIWQAYSDVSEKLGKLTPENINWFNNSSYEVCKPVFERIGIFLNDQTFEVAVANTTGLKEALLDILDEQGFGVLRSSRIASWRAGIAPDPTQLLAMISDIGKGRLAAKLKQKAPGLAPPEYIASAIQYVVSNV

SEQ ID NO: 66681 - protein, 597 aa, Enterobacter sp. GN02358
MWCRMSDRRALSEALNELLPNREQYAAATYPGHCVVIAGPGSGKTKTLTTAMARALIEEVADPRGVACITYNNECVSELEGRLACFNVSGDERNFIGTVHSFALNQVLIPYSRCIPGLLPDDFRVATRDESRAAVEVAYQARFGSVGDPHARWKFAEEKRRRDVNRLLPAWRNNNPELADFIEGYEAELRRLGLIDFDDMPLIAFRIISEHEWVRNAIRSRYPVLFVDEYQDLGHALHELVLLLCFNGGIRLFAVGDADQSIYGFNGANPGLLDSLVSRADVRPFRLRFNYRSGAKIIRASLGALGEDRDYVGPDGNPEGELGFHGINGDYDAQAHFIAHDLIPSLFERGFHPERIGVLYRAAWLGDKVADEFKARNIAIIRADSNALIKRNSRLARFIEACSQWVTGGWKEASPLFNLLLGQALFLVYGRRASRAEEQLLTVQLITFLRNGIDKAESAHEWLRRLNDELITGWMAISQNTQQEWDVISELLKRTDPLRGLDVALDIFAGKVEGTGRITLSTLHSAKGREFDVAIMFGVNKYDFPSKRDLTSDNALREARRLFYVGVTRPRKELHMVYEKGKHSPWIAELYYRSQQT

SEQ ID NO: 66682 - protein, 650 aa, Pseudomonas chlororaphis
MKITKISAVNFRALQDVTLDLRDSLSLLIGRNNSGKTSLLVLFEKFYESGVAFNYHDFPLAIRKDLVAIDHGTDVVPLSISMRIEIEYDDEDNLRHLSEFMLDLDSKVNKVNILFECVINKDLLLRDIEQFDGERERFLRKNLDRYLQVHVYAYANDEDLLLENRTRLVKKDITSVRDLINFQIIHAKRDVASSEGGKKMLSKLTTQYFNKANKDVTDFDPINNLLLQIDESLENSYKDFFEPFLKTSKAFLGIEDIKVVSNLESNEVLENSSQVVYGDRAEFLPETFNGLGHMNILYLLLSVEIKKESFAKTGKNINLLFIEEPEAHTHPQMQYIFANQIKSILNEIDNIQAVITTHSSHIVSQCDFKDIRYLQNSEGKTKIKNFHAELKAKYGDDEDSFKFLEQYLTLNSCELFFASKVIFIEGVTERMLWPYFVELFDKSKLHSKDHISLFSQNVTILEVGANAKAFRHFLEFLEIKTLVITDIDTTKKTLDLSKDKPKTTYLSSKVVDADHISNATLKHYYDAPDFSDEAKFASWFARLVSHDLKHAYSNIYIAYQKEEEKYHARSFEDAFLHVNKELIKKKIDSINGLKNVHEFDAGLDAYDLIDKVLDKKSAFASSLLYLALTDDQVTWRIPTYIEEALEWISE

SEQ ID NO: 66683 - protein, 664 aa, Pseudomonas chlororaphis
MDIRMTPFDQVLSCLARGKSFLLQGGAGSGKTETLKKLLDHISKNMPDKRVACITHTNLAADEIKMRAGDLHTISTIHSFMNGIVKTFRLDLHKVIHEIFLLPEFTRGEALDDEKEYKKREHARYKRAYEKYAEKAYFILRTKEEKVLGKPVYDRDPAAANKVLNDKIKYLNSHILKHIEGVPAHKVSYNETVFNSLRDLSFGHDGLIKLAVSLLVKRAKLRKILSDKYDYIFVDEYQDTSPDVVRAFLNYVAIDQNIIFGFFGDSMQGIYEEGVGDVESYVQSGALEKIEKEDNYRCSEQVVRLINNLRNDGLKQNVALRVFDGGLLETLVERQGKVKLVYAICEEKPNQQSSREAKDLYVEKLYKLIERAQGFDNYKMLMLTNKAVALEAGFGRLYEIFNSRFGQSTNENLEKVLTTCHFDDLYELYQDVSSRRHSNVIRTVKKSGFVLDSVRQKDELLAAFKQVFELNCSGHKAILESFQLKLIKSSESYERFIKRRDHFIEQMNGDARYTDFKKLYISGIDSCSKLNKSGFDIDDYEFGDLERDVKRDLFYTEFFGEKITLGEVFNYYDYLSEKTNFITMHKTKGSGIRNVLVVVDEFFWRDYKFTNIFSAGPVSAENQKIMYVACSRAIENLTCVRLMGEEEASSIGDYFDEVEVVKLD

SEQ ID NO: 66684 - protein, 623 aa, Pseudomonas chlororaphis
MHLVRVRVRNFRGIAYGEVHFNGHTAFIGDNNAGKSTLLEAVDLVLGPERLSRRPVIDEHDFYAGTYVDPAKNEVVPIQIEVIVAGLSDEQLRHFRDHIEWWDSQAKRLLVGPPPEGTDAPHVGAAIRVFFNGWYDVQEDDFAGDTFYATPEMPDGSYLRFSAPDKRKCGFLYLRTLRTGARALSLERGSLLDVILRLKETRLTMWEDLLDQLRALPVGETEDIGELLVAVQDAVRHYVPSDWAEQPHMRVSDLTRDMLRRTLTVFMGTGAKRPDGSVYSAPYQHQGTGTINTLVLALLSIIAELKQSVIFAMEEPEIALPPHTQKRIINSLRQKSAQAIFTSHSPYVLEEFDPAQVVVLKRTAGVMTGVPATYPPAVKPKAYRTEFKARFCEALLARYVLVLEGRTEFDALPAAARRLAELDPTRFKSLENLGVAIVDARGETNVAPLGAFFRSLGKIVFAVFDKQSQEALATITASVDHAYESATKGFENLVLYGVSEVVLRSYAAVVVAGGDWPQHLAAWTPTPATPLADLQAALSSYFSWAKGGGDAGDLLASCPTANDMPEYVRTTLAAIKNVIEPPPLLPLPPQVAGVPPLPEAAAKSPPLAAAYGKFQPSPPQPLA

SEQ ID NO: 66685 - protein, 551 aa, Pseudomonas chlororaphis
MALGGPGAGKTHVALVKARNEIRSGVLKPGQKVLFLSFARPTVARIIEKASELISREDLKQLEVSTYHGFAWSILRSHAYLLNGRPNLQLLPPPEAAAHLADIDKAQHENEKRRLFEQEGRLHFDLFASLASELLSRSDRLGAIFSDTYPIIILDEFQDTNSDEWALIQQLGKRSRLIALADPEQRIYEFRGADPRRVGEFLENFGAAHFDFAGENHRSSGTDITAYGNDLLTGANKGKAYQQVKITRYDFMYGKSLHFTAKAAVFSALDRLKKVPDKSIAILVPSRRLMLDFSDYLSSAADGLPALHHDVAMDAEPPALAAGVIATLLAGGTAGDVASRMLGALHSHIRGRRGGRPTPQTELDLADALSGFLSSGKIRGSKRLLIVSEVQRISELRRQLQLTGDPAEDWLYLRGLLASSTAEALKQVATDARYLRLLHRGSVLRTNLGALWRAQGEYMGAEEAVRSALMQEHFAAAQKDWRGIHLMTIHKSKGKEFDEVIIYDGLYQRIAKAPQNPKICAQDLLVLRVGVTRAIRRTTIVTPKRDPCPLL

SEQ ID NO: 66686 - protein, 352 aa, Geobacillus sp. T6
KKLSLIYGQEPISIERNGLGKNNLLFISLVLSHLASQTENKSPLIFRVIGIEEPEAHLHPHSQKHLAHNLSDISKVETLDSDEGIQKNGESGIKKDTQIIVTSHSTHITTSIDLENLVVLYKDKGKLDYHYILDGFKDNREGREHIRYLKKYIDATNSSMFFARKLILVEGISEQILIPTFFKLLYGQTLERIGCNIINVNGLAFKPFLEVIKNGYFIKCGVVTDKDKGTHMENRADELKKKYDGDIIKIEFNEETFEKEILKFNQKGKGKDILLKVFQKLRPKLFIDFSPNWDSEINIDEYFGKIKEAKSDFAFFLQEELQENHDGFEIPEYIKRILKFIMEENDGEKQEN

SEQ ID NO: 66687 - protein, 523 aa, Geobacillus sp. T6
MGRSKKISKHKLIIAAAGSGKTRELIKRIKDKIKLLPPSKHLIVITYTNAATNEIKERLEEEISIPENVFIGTIHSFLIKYVIKPYGKILRLVPDEITITDYDIKIDSQTGNQYYQRKNQIINALSRKGIITYDGVVTLAKKILKNDVVRARFCKRIAYLFVDEFQDSDLGQFQIFEILRKGNCTEIVLVGDPEQNIMNFRKKITNHPIVSLQGKKTYHVECIQNNYRSSETIVEFINHFHSDIKQLYKNKEITSKNPIVFIESTELNQIVRNFNDLCTNKEYCENKPKKRFFLAYENKEFDEYRINNSGNRESKQAFKVIDLIMQYLGALYNVKKSKLINHFNMETIEFRKRCLNLFFKIRSDPNMKIEHIITYLNSLFPHKISPLEENTNIQFKIDKIVEDFIKDIQSIDFKKNIDNIIDDDYEDHFLTIHKSKGLQADAVLAVASTEKELLKWLEIDKNKRLSDKTDDCRLGYVAFSRAKEFLCIACRKSISDSTRQHLNNLGVVFYSDKTAAKKDLTYV

SEQ ID NO: 66688 - protein, 522 aa, Variovorax paradoxus
MPGFLSVTKEVSLTFIQALRDVVAEFHNNRTNPLLTLLRSKSGEIDAAALVPIVDKVRDLNSAIEGLEDVQSVRKHIRETVKDTAGETYSPTSLSIRSDLPEEAEQLFQSLRLFIGESEDGYEGTINELSLGGANLIYLTLKLLEFKYQREKMAIANFLLIEEPEAHIHTHIQKTLFDRIAYEDAQVIYTTHSTHISEVSNVSNVNILGRRGAFCEAYQPATGLDPAQVTSIQRYLDAVRSNLLFAKSVILVEGDAEEILIPVLAKRVLGLSVDELGISVINIRSTGFKNVAVLFHDLRIRKRCAIVTDLDTIFFDTTPSPTDDGVLAARKRKAIGSQTAGAQRKIDLDAFAAGNAWVQSFYATHTFEVDLIGSGNQEAFVRSVDKVYKAPATITQAITDLRSGLIHQSGYRTLTMAEQEGKGWFAILLAQTLDHQAVVPGYIREAVLFAHGPFSRPLIMRILRHRMKCLLGIDRAARPRLVVLNAEVERFGRLEIDLPTLRTAAAAALPGDVVHAFLAGMV

SEQ ID NO: 66689 - protein, 592 aa, Variovorax paradoxus
MFVWDATELNPEQAAAVEEPSSVFLVACPGSGKTRTLTYKIAYELSRRKDKRIVVAITYTHRAADEIQERIEALGVDTTALWIGTIHSFCLEWIIKPYGIYVPELARGYTVLDRHDREKMLERLCAPYRGVTLYDCDYYFEEDDYRLGCADTWKHDTIHKVLEAYFRELADTRRIDFELILWYAQVLIRSQPHIAALLSQVFSYVLVDEYQDTKRIQYNLVGAILRAGAGSTKTFIVGDPNQAIYGSLGGYAISAADFRALTDIPIREMALRLNYRSSARIIGHFSNFNVHATDIEGAGKMVGFPSQVSYNRLVAHEDLHDELVRLIQKSLAEGHAPEEICVLAPWWILLASTTRKLVALLPEQQFDGPGLVPFSNDPDNFWFKLSKILLTESSPQMLVRRMRWARDVIADLRDFGVDTSRITQRSLLRESNSLAITEADGLAYLDRAFVALLDRLGVELRAFPALVEHREAFFASSQARLERLQNSGAGYITDLSFFKKVFRERAGITVSTIHGAKGAEFDVVIAFGLLQGMVPHFSDSDGDVAACKLLYVLASRARKHLHLISEAGRSRGRYGSYEPTEVLARCEFDYNG

SEQ ID NO: 66690 - protein, 527 aa, Listeria monocytogenes; identical to SEQ ID NO: 64370

SEQ ID NO: 66691 - protein, 793 aa, Listeria monocytogenes
MKMDKNFGRTIINWLFSYSDERRMMGYNILSLKKSKDELLNVVSNLEKEIRNLKENQVNNESEQKKLSMLVNEYTNRFGTISNTNNFASDVVRMEDEDANIFHHLVSLNGGNEFNKEQVNAIRFDMRTHLRIIAGAGSGKTQTICAKAAYLVLKEKIQERNIVMCTFSKKASQEMKERVNEFLGGNSRIEVLTFHGWFQKEYNVLIKKYPYLEKYGIAGEVPGKGSGKDSHDRILMNLIKQYHLYNFDKYEEKPINERLSYWRNMGYNDEEIVAFIARYFDDKEILKDQLLSEVFSEMLKELERIKRREKVINFDDMLINLKCVLENDSNALSLIQTRYQYIFIDEFQDINPLQKQIIELICPPDYEKSVINSTKLIIVGDDDQSIYFFRGAEPRYIKEFDRQYRQTSIELMTNYRSIAPVVHIGNTLISNNQHDRIKKSMIPHKLNEGDCYAKVFQNEQLEANWIAMRILSLSSEEKPFQDQIGKPNYTETIVLYPNKNQLKSMIIALQEKGIPFVTKSDDDLLGIFGINFFKRSFNLLMDIIDAETIEIKKHLYKQLIKNICLYYYIPFAKSTDFVSDETNYTSEKLTDFICKEKKVSKKEMALIKSIFRDINEFIKTEELNIKVFVNWLVETPKVKKQLIDEEKDWLLKEVSNVKTLKELILKYKAARTLKEEMADKLREYDNNNYNAVYLLTIHSSKGLGYKNVFVKGIYKNSLPDYRSVDKESIELQPLIEQASPPTTMEEQRRLMYVALTRAKENLYVTYPREINDKPTLVSPFIKESNIMFSEEKI

SEQ ID NO: 66692 - protein, 625 aa, Archangium gephyra
MHLSRIKVSNFRNLDGIDVALGPHTVLVGENGSGKSNLLFALRLIFDPTLPDAERYLGSEDFADILSNPITSGVSIQITVDIEDLDDDDALAVLGGYLIRDEPPIARITYRFAPKESLESPPVSEDDYEFTIYGGDDPTNLVSPEVRRRLPMMVFHALRNAEDDLRNWRRSPLRPLLDRLASEISSDVLSDLVEEIRTSNSGAASLEEVQQLSEKINHVLAQFAGEGNTTEVAFGIAPVLPSRILRNLQLLIDGGKRGVESGSLGSLNVLYLVLKFLEIQQLCEENVYDHATLAIEEPEAHLHPHLQRLVFQHLFKLSLLAEKVPVGTFLSTHSPNLASVAPVKSLVVLRRRTPTGSVVARSLATTPFSEDEIADIERFLDVTRAECLFARGVLLVEGIAEKYVVPALAKLQKMSLDQIGVSIVVVDGTHFEAFDKFFGSRGLDLPFAVLTDADPWASGARTGAERVRRLLSSRGVRIPPNSDESVIRNLAAEHGIFLSKWTLEVDLYVSGQHQAVLSTMRALTASDAAKARVDGIVRDGEIKDVKAFLKDVESVGKGRFAQRVSTAFSGTSCPPYIFNALGWLKRQIANKNELIQSGRTGVASQQGAVAGVRKPRTSGRSGGPG

SEQ ID NO: 66693 - protein, 562 aa, Archangium gephyra
MAVKLARIAEEELEPPHRIACLTYNNECVSEIRKRLVAVGVRLEERFYLGTVHSFCLSEIVRPFARLAGLRLPSPVRVAPEHIQEKCMQAAINRFGRGQDVAWFRPEIDCYRRTHLNRDRPDWRGEDSSLASIIEEYERLLRADGFVDFDDMVLLAVQILEKHHVARRAVSAKYPTIAVDEYQDLGLPLHRIVELLCFQSASRLFAVGDPDQSIYGFTGARPEMLLELSRRIGVTPVRLKKNYRSGQSILAAAEVALGESRGYTGEKKDVGRLEARQCIGGIEEQCSAAIREIVPALMRLHPGLRLGNVAILYPSKKEGEYLAEACRASSVPFVRNDRGSPYSRTRLIRWLEDAAAWVAGRTLMTPRWEDLLDRWVSLCGHGGRLEHQKAIALRQRVARFLWRNRMPGMPLCEWIAVLIEGFEAELSEMKLNAPDDVASLVGLKELALNGFLQGCTVLGFAFAGGSPDTLNLLTLHSSKGLEFEVVVMVGLDEGVIPRYKASARGVAEARRLFYVGLTRAMRHVVFVYSGFTVDQWGRKHRNGPSRFVRELLGRSLVEVRRD

SEQ ID NO: 66694 - protein, 726 aa, Pedobacter sp. BMA
MKIDFVHLQNFRKLKDCRIEFAQQQTLFVGANNSGKTTAMDALMLFLKQKSKFTTRDFTLSNWKDINKLGEKWCSLTAYDPEEFSIDKWAGLLPTLDVWLKVEHTELQHVHRLIPTLSWKGGLLGVRLRLQPVDIELFYQEFTAAQKQATELTGKPEKGKKFKMWPSTLWEFLDEKGNLSRFFKVQTFLLDPALHDKPQEMDPLADALEGDVFSGLIKIDIINAQRGFSDSNSESQERSENIKNLGSQLRSYYDKHLNPSVNPTADDIAALKAISSAKEIFDESLKTAFKDSLKELEILNYPGFGNPSITLSSKFNSLDSLTHESAVQYALEEGLSLPEKYNGLGYQNLISIIFKLIRFRDEWMQVGKGFDSSGTTEVVGFEPLHLVLIEEPEAHLHAQVQQVFINKAYQVLRKHDDLLEGSLFTTQLIISTHSSHIAHEADFTALRYFKRSQPKLGMSQTTTVVNLSETFGEDTATTKFAKRYLKTTHCDLFFADAVIMVEGPAERMLVPSFVRRYEDLCNCYLSILEIGGSHAHTLRPLIEDLGILCLVITDLDAVQGRSKVQPDLGKGYNSGNSTLKTWLPGENSLDKLLAMKEADWISKNGQIRVVYQTKISFKEGKKDVPAYPYTFEDSLVLTNKKLFSEMHAGKGLLLKMCTAAKQKNTALCAKELYEVITDETAKKAEFALELLFMEDPKALEIPAYIASGLSWLEGKLSILKKPTKGK

SEQ ID NO: 66695 - protein, 627 aa, Pedobacter sp. BMA
MAATDINNTDAHVDEEIFDGLNPQDPKSFFLFAGAGSGKTKTLVTVLRRIREKHGRHFLLRHQRIAVITYTNAAADEIMHRLEQNVLFQVSTIHSFCWDLIQGLTADIREWLKINLRGELSDLSAAQAKSRDLGNKSSLERAVRMTSKTKRLESLDGISKFTYNPNGDNISRDSLNHAEVIALTAYFMREKSLMQEIIVDRFPIILIDESQDTKKELIDAFFHLQATLPKRVSLGLLGDTMQRIYSDGKENLGNALPKDWLTPVKQMNHRSQKRIIDLVNTIRGTVDKQLQLPRAENQGGLVRLFIADSSADKDKAEAYVSERMAELTGDPKWRENRLEVKTLILEHHMAARRMGFLDFFQPLYENDRLKTGLLEGSLSSIGIFTRMIIPLYHAHLIGDKFAIGRLVKQHSPLISKDNLALATEQLAQLALADKAVEALIKLWKDGAEPSGLDILKSLSTSRLFTVPDVLRPLLMEVSERELVDEEIEKGAEAEQVRALASALSVPFSQIVNYDRYLSEKSQFGTHQGVKGLEYSHVMVIIDDEESRGFMFKYDTLFGISGLSDTDRKNIKEKKETVMDRTRRLFYVACSRAKESLAIIAYTHEPSALEHNALEFGWFSKLEIERMT

SEQ ID NO: 66696 - protein, 597 aa, Acinetobacter baumannii MRSN 7339; identical to SEQ ID NO: 62720

SEQ ID NO: 66697 - protein, 593 aa, Acinetobacter baumannii MRSN 7339; identical to SEQ ID NO: 62631

SEQ ID NO: 66698 - protein, 597 aa, Acinetobacter baumannii MRSN 58; identical to SEQ ID NO: 62720

SEQ ID NO: 66699 - protein, 593 aa, Acinetobacter baumannii MRSN 58; identical to SEQ ID NO: 62631

SEQ ID NO: 66700 - protein, 606 aa, Burkholderia contaminans
MRISRVVIRNFRVFEYLDISLGNNISCIIGENNTGKSAFLHAIRLCIDANLSSAHRSLSMRDISTAIDIGKPGEVLIGLEITDYAGKVNEEALAGAWSVEPNRARLIYRFRPRPSIRERLAVADPTLGKLVLSDYQWELQGGGDAEIDLANIDWDEDVGFGIRFSDLQAFQVVFLPALRDVESDLRQPRSSPFVKLIEASAITDAEKQKLVTAMEKANDTISSSDTITKLARAVDKSFNEVAGPAFEMTIDVGLAEPTFQSVVRALRLLLSDDAVTDADPSSNGLGVNNVLYIAILIEYFKRRLQQENSAGQLILFEEPEAHLHPQLQLSLYAALEGLPFQTILTTHSTHITAQAGLNKFVTLTNVGTGYSHSSVPSACDDLSDDDVADLERYLDATKSGLLFARKVILVEGPAELLLIPALVKQVLGRDLDREGITVVPIYGVHFDVYAKLFSKHGLPKKCAIIADGDLTPSDAAESGLSEEEAPFNAPDLARLKSKYVRVFANATTFERAVTMSGNIEMFARTASSLGAVVVATQLRRWRKEWGTLEPESDGAKEIAEKCRIKVLSTAKRYGKARFAQVAARNIAAATSIPEYIREAIEWLSEA

SEQ ID NO: 66701 - protein, 588 aa, Burkholderia contaminans
MRLTKEQRDAVGCDSSVFLTACPGSGKTSVITAKLGRCLEEVEPTPRSVACITYTNAAVHEIETRVRRSLGARGEWPLDISTIHSFCLNNIFRPYSHRLHHFQHGFKVIGQDSEEFKSLVEDTRSAFGKRATGRDIDEFGQLRTTAEKLAVGPPIVSGNISPAEATHFWQLMYERGQIDFASLLYYSLTLCLTYPEICDHLSARFAWILVDEFQDTTDLQVAIFEEIHRRGNTKFFLVGDLYQSIFGFAGAAPDLAESFAKRIGALSEFALSENFRSAPSIIDDANAIFPRAPAMTAKGRHKGITLPTELVVASNPTYAVTDFFLPRITELGIPLGESAVLANSWFKLIPIAKELRIRGIPVLGPGARPYRRQRFFATVAERICGHLCEPDFEALVGVERSLYDMILEVANRAPHRLFTYDGRRLVYQVLADAANARDHSTGGMEFLYSLSERVSAHLLAENYIRTPEAEILRESVEEMERDIRKNNIDPESLSIEEMGILARPKRAVKLLTFHAAKGREFSAVAMVDLNEGSIPFYQLRTEEEFAEAQRLFYVGLTRAQKYLMYAPDTRDYRNCPSRFVGAGFLGKC

SEQ ID NO: 66702 - protein, 594 aa, Enterobacter cloacae; identical to SEQ ID NO: 64492

SEQ ID NO: 66703 - protein, 605 aa, Enterobacter cloacae
MPLRSVSAAYLAQAAELAGNPGQLAAYESRGHCVVLAGPGSGKTKTLVLKLARILAEDVQAPRGAACITYSQECARELIRRLEALGLREAPNLFIGTVHGFCLRHLLMPYGRLADLPIPFPLSVASQRASERLLRQSGDRLFGPNHPYKAIDLGRHRRSVLNRNSVAWRAEEELAAWAEAYEAALRQEGLIDYDDMVVFGQRLIVEHDWVLPLVQAKFPILAVDEYQDLGVALHRIVKRLAFEGGVRLFAVGDADQSIYGFTGADGALLMELASRRDVETVRLQLNYRSGTGIVNASEMVLGEVRGYRASDPNRQTTIAFQLCPDGLEDQAVHAVAQIIPTALAAKPGRTLGDIAILYKDYRAGDVVADAVTAGGFDYIRVDTAAPYRKVALTSWVEDCAAWCAGGWRIGRPQLRGLIDRYLAFHRARLDDACARRKGQELTRLLWALRTDQQPACDFVVSLRNGLVDSLLATEPALSDQAEQLEHMTAALAEGGALALLDITSLGGRDGSPEHLNLLTLHSAKGCEYDVVIMVGLDLGNLPWRNEAPEKLRESRRLFYVGLTRARDEVHMLYSGFVDGRNGPMRLGRSPFLDELEARMRGAGLW

SEQ ID NO: 66704 - protein, 654 aa, Vibrio cholerae; identical to SEQ ID NO: 62722

SEQ ID NO: 66705 - protein, 630 aa, Vibrio cholerae; identical to SEQ ID NO: 62723

SEQ ID NO: 66706 - protein, 701 aa, Enterobacter aerogenes
MKVSRVAIRNFRRLENVQIDIEEKESIFVGPNNSGKTSATAVFRCFLGGRDFKIYDFSVARIADFDTFGLTGDETLLPKISLDLWFTIDPESIGFGRVFTLLPNLSDFTSVGIRLSYEVSEVRKLYENYNAAYPPKEDGTRSKSLSQYLSIDGNLGRHFTVCYYSLDEKIQEGAPSEILSSYLDPDEGKRLLKQLIRVEFVDAQRNINDDNSSRSNRLSSAFATFYQKNLEQVDHAADAHSVIDANNKQLTDHYAKQFAPLINLIKRLGVPSINDRELQIISSLSPETALRGNTELLYIDPSRKHELPELYNGLGFKNLIYMAIQARHFHSQWVMTTENRPLCLMIFIEEPEVHLHAQVQQTFISNIWQVINQSAKVAGEPNLVPQLVITTHSSHIMEAVDFEKVRYFQRCHCEGETEAAGIRNASMVRSLRAFQPNVETIDGKVIPPSESLAFLKRYLRLTHCDLFFADAGILVEGAVEKLLMPTMIERAAERLRTVYLTVLEVGGAYAHRFEGLLSFLHIPYLVITDIDSVSPTGYPKACRADVAGAKTSNASLKKLCGLTTIDQLIALTCAQKQHNDKDRCIAFQTDVLVEENDASEMLRPRTLEEAIVYENFGLLRSGALSIGITVRASISDAYQDVYDRVRSDNFKKTDFAMDILACAEQWIVPGYIAEGLKWLESRLLPPLPVVVDTEASVAAGE

SEQ ID NO: 66707 - protein, 612 aa, Enterobacter aerogenes
MRTWIESEADIQVRACIDGHRSFAMIAGAGAGKTSSLVDALGRVRDNEGNILRKHGQRIACITFTKRAVEVIKKRLGFDELYLVSTLHGFLWGLISHFHENIRQALYESRIPNLIDKAREDDNGGNSKKALKARAKIERLTEQLALLETVNHFDYSDTSFSDYEKGQIGHDDVIEIATYLLENNQTLRRIIGLRFPYIFVDEAQDTFEGIVSGLNLVCAGDELPMIGYFGDPWQQIYDRSAGDFAPPDKGKVIKKAENFRCSKSVIRLLNAYRGDVEQYAAGENAECEGSVEFLLIKAEEPTEPRRRYSEEQIERALARMDAAVENWGWAGRDDVMKLFLARQMIARRLGFADLNRLFTGDYASSRAQDAFEEGTHFLLKPFLSTICPLITAQSQGDDRKIINLLRRDSPAFASDGLNAEKSLKVMIETSRSLVKQLHALWDTETIGTILHFCVEMQIIQPSERLSEHLDRPPRTEPFNEELHSFDKGDWLADSFFKMATGGVSRYFEYLNNNTAYSTQHGVKGEEYPKVLVVYDDVEAAWNQYSFSKTLTPLTAGEPSDRQRSVTQKLVYVSFSRAEEDLRIVLFTANPEGAQAELIESKLLSPDQIRIMA

SEQ ID NO: 66708 - protein, 798 aa, Enterobacter cloacae
MKIEYIDIQNYRKLKTCRIRLTDEETLLVGANNSGKTSAMDALIFFLDQRGRTAASIASGKSPSSRKLGAADFTLSNWHQLNQFGQAWANAEEVGEKISDWQPLCPTLDVWLKVEKNEVHRVRHLIPTLKWDGGLLGIRMIYQPKDLDALKADFIAHFKAAEQLKISAEKNAEKAQGGSASELSDFKFSVWPGSLREYLEREVSKAFEIKSYILDPAKLITDQGSKFLPQVLVEGQLPLDFYPFNGLFKVDIIDATRGFSDPYVATGSQNGASNLASQINQYYNRHLNPTDLPCDEDLDALEAIAYAQHSFDGKLNKVFNKPLKEIETLGYPGFSDPHIRLSSRVNPIDNLDHEAAILFEIQKTSHAAGVPLMSLSEKYNGLGYKNLISMVFTMMSFRDQWMRVGKAGLRKPEEDVFVEPLHLILIEEPEAHLHAQVQQVFIKKAYSVLRNHDDLRTSKRFSSQLVVSTHSSYLAHEVGFEKLRYFKRKPATGPHDVPTADVIDLSCTFGSGKIRSDDVLQTAQFVARYLKTTHCDLFFANGIILVEGAAERILMPHFIRNNPNANTSLDNSYISILEVGGAHAHRLRALIDILGIPTLVVTDTDAQKPPLKLPADVQKVSSGNKPKAIRPEFGKGYITGSHTIKIWLDVEGALDTVLRMPEHEKIRGKVRIAFQYGIPIKFGKEEEAEAFPYTFEDAIALTNPELFKKVEKPTGMMKKMQDALNLDTLEQCCEKLYLALKDDKAEMALDLLYCADPAELAAPKYIQEGLDWLKKELEVASRDLTPEVPKVTDVWEGE

SEQ ID NO: 66709 - protein, 622 aa, Enterobacter cloacae
METPSTNEPVVEELFSYLDLENPRSFLLFAGAGSGKTRTLVSVLEKMKQRYSSELSRCGKRIGIITFTNAACEEVQRRLFFDANFMVSTIHSFCWDLINPFTSDIKLWLKNELEKSIEQLTRDIEKSRKPDGITAQRNRRSLASKTKRLQYLDKIQKFSYSPTSNRPEKGALNHSEVINVTAYLLQNEALLREILFSRFPVLLIDESQDTNKYLIESLIMTQQEHPTKFCIGLFGDMMQQIFSGGKSDLASPLPPGWESPEIIINHRSPVRIVTLINSIRQFNDAYIQEPRPDAQPGTARLFVVDMNTHKERADIERQVAEYMAEQAADTEWNNKQSVMVLTLEHHMAARRGEFENFFLPHLEVERLGDAAINGDSQEITFLSSQLWPLIDAIRSDDDFKIATIMRKYSPVFSSSRLEYADDPLLLFREAQCQIDKIKVLLGENLAFPILEVCKLIHEGELLILPEAFQLHLALVPHKDDESTEEVDVNKEHEAWSRSLSASVRELENYISYISSTSSYDTHQGVKGLQFPRVMAILDDEEARGFMFSYDKLLGVIPHSKTDQENESAGGDSSPKRSRRLFYVICSRAQESLAVVAYTKAPYLVERTVIESGWFVKEEIMHM

SEQ ID NO: 66710 - protein, 798 aa, Enterobacter cloacae; identical to SEQ ID NO: 66708

SEQ ID NO: 66711 - protein, 622 aa, Enterobacter cloacae; identical to SEQ ID NO: 66709

SEQ ID NO: 66712 - protein, 659 aa, Enterobacter sp. BIDMC92
MKITQMEIKGFKSFDNVGQTININSFTSLIGGNGTGKTAVLLALTRMFGVKSSDRIIQVDDFYVPPGDEIDTQDERDLSVRVKFEFADLKDGEDDSVADFFKHLISSEAGEIPFCIAKLKAKWTKTNLAEGDIESDLVWEIGESEKNITAYERSKIHVHYVPAYRDPAQQLKQTAGTIMHRLINAVEWSEQMGATVAEVAVSIGNQFQEEVGVQTITSSLGRNWKSLFTGGYFEELQIKPVVNGIEDVLKHIDTVFLPSPDTQPLPTERLSDGMKSLFYLSLVKSAFDIEDEIINSDGKQLSISVEALDPPNLTIILIEEPENHLSPQYLGRIVKLCEEISENDRAQVVLTTHAPSLLNRVEPDNIRYFRLNDNKNTVVKEILLPSDDEDDADNVDTFTYVKEAVKAYPEIYFAKVVILGEGDSEEIVIPKIAQVNGIELDTSLITFAPLGGRYVNHFWKLLNELSIPHVTLLDYDFRRGGGGWGRIKYIINQLLKVGCDEDIVLQTEGGKLTLKELNGMHEWKENEKDEKSWIDFFETYNVYFSYPYDLDWIMLNSFPTSYHSFIPDNGGPKILPKTDAQYIDKTKNAIASVLKKDAEDIDIDSFEDHEEYYWYRYLFLGRGKPLSHNYVLKKLDNDSLKNNAPDVLKNLIEKVRGLL

SEQ ID NO: 66713 - protein, 615 aa, Enterobacter sp. BIDMC92
MTIIKDDDWVLKDIQEVEEEAMRVIRNSAEHNLVLAGPGAGKTELLAQKACFLIETGKCRSKKIIALSFKKDAAKNLQDRVNSRLDSKYRHKFESTTFDAFCKSIVDRFKSTIPESYRPSNDYEIIFPNNNDLVEEIKREAVGFEGLTSEELNKLQPYNFEENYIVTPYDKALEHSVDGRIRRFVWLHLLKPKSRLSFKMINFLANYIISRNQYLSNAINSTYDYAFIDEFQDTTYRQYEIFKSIFLGKKIKITAVGDTKQRIMGWAGAMHNAFDVFKKDFGVEQPNELVSNRRSLKNLINYQRMMEAFMNHADIKPDMMLIENEGSAKLLQFDESSIEGAYIALCIQQWIAEGVNERDICILLRNPAKQYTDDIISALQYLKIQCRLENEYQDLLNEAVVQLLLQMLMFVCNRKSIESWATTMELLCNIRGVSKRGDVTRLEKELSQFIKSHRVIKEEIVDYLYSLLSIFGVDKIKSYFPQYMSGNGLEYSIELLSRHLDKLDVKENTSEAIDLLLGNKTIPLMTIHKSKGLEFRKVIVVGLEPGAYFGKEEEQIENQKTVFVAFSRAIEEVLMTRCKIRNNSYGRSFKQNCNDIPLITNMITYCGIEAEDYQG

SEQ ID NO: 66714 - protein, 771 aa, Klebsiella pneumoniae; identical to SEQ ID NO: 64244

SEQ ID NO: 66715 - protein, 625 aa, Klebsiella pneumoniae; identical to SEQ ID NO: 64245

SEQ ID NO: 66716 - protein, 710 aa, Klebsiella pneumoniae; identical to SEQ ID NO: 64654

SEQ ID NO: 66717 - protein, 558 aa, Klebsiella pneumoniae; identical to SEQ ID NO: 64655

SEQ ID NO: 66718 - protein, 653 aa, Klebsiella pneumoniae; identical to SEQ ID NO: 64650

SEQ ID NO: 66719 - protein, 621 aa, Klebsiella pneumoniae
MTRVSRDDWVPQGVGGLEGRAWEALRETDSSILVTAGAGAGKTEFLAQKASYLLQTGICPAPKRILAISFKKDAAQNLAERVAKRCPRDQARRFDSMTFDAFTKGLLDRFRPALPEPFNAPGTYQIVNPFRRDYDDFIERHGYHGVSAQQLERRLLLTDLPIDLSNGSEVHRALADYWHEQFFGGDEISLSFPMINRLVKLLLQENSYIRRALQATYPIVFLDEYQDTTYAQYDMLLTAFDGSDAVFTAVGDDKQRIMGWAGAMNDAFDQFENDFAARRITLLSNWRSHVDLVRIQHEIARRIDDSVEEVQAQGTREIEGEVSAIWQFRSADDENNYLAEWVSGEVQSERVAPHDVAILIRMRADQVEGEIAPSFAARGLRIRNAARSVGEIQIQDLLGEELTCIFVPLLRLGATERSPENWEQTQQNYLFLEAADPDNDLTQERLLVKLEAFVRKLRTELAQRQPSPDSAEEIADMLLEFVGTPRLRQSFPAYQRARDFERVWSGFVTLLKECAEHSSSWTEALDEFEGIGQVALMTVHKSKGLEFHTMIFYGLDNQTWWSLTPQRGEELNTFFVAFTRAKQRAFFSQCVERGHAIGWIQQLLAPAGVETIDGTTILGTT

SEQ ID NO: 66720 - protein, 771 aa, Klebsiella pneumoniae; identical to SEQ ID NO: 64244

SEQ ID NO: 66721 - protein, 625 aa, Klebsiella pneumoniae; identical to SEQ ID NO: 64245

SEQ ID NO: 66722 - protein, 329 aa, Klebsiella pneumoniae; identical to SEQ ID NO: 62502

SEQ ID NO: 66723 - protein, 557 aa, Klebsiella pneumoniae
MTSQWLPSEGIEPTQELMDIIFCDQSVSVLAGAGAGKTELLAQKSNYLLQTGKCMWPKRILCLSYKKEAQENIKTRVMKRCGQRGERFDSYTFDAFCKSIVDRFKDVLPENKRPLNNYDLVFNQKANNGKDKISFDLIRSLALDILTIRTDIVDLFSLTYSHVFIDEFQDTRSDQYEMIKLLFKDKGTQLLAVGDINQSIMLWAGANKTVFEDCEKEFNTTKKLLVHNFRASEEIQEVLRCFIHFVQNDANFTPIIKSIDNCTIHYYDNELSEADDIADKIARFITSGIEEKEICVLVKQQSEQYTEKLRDKLTTKGIRNLDLSELQDVLKEPLGQIFAALFKVYTSRSSSSYTELCDLYLELHRVSRGDEKEDALIKVLSDNIAENKKNLGDEPSPDSLITCIKDIITLFGVKRMVGRWNQYKSADYWDKIWRNLEQHLRYTIDATHSLNEAALMFQAENSVQVMNVHKCKGLEYKVVIFLGLEDQAFWAYKNAKFENDCALYVALSRAKESIIITSTKCREHRITNWRDDRTSTYKNIGPIYSFLTKHCKFREVR

SEQ ID NO: 66724 - protein, 771 aa, Klebsiella pneumoniae; identical to SEQ ID NO: 64244

SEQ ID NO: 66725 - protein, 435 aa, Klebsiella pneumoniae
MRRIVAKRFPFVFVDESQDTDPDVISALRTIANDNPDMCIGFFGDPMQKIYMSGAGAIPLSDGWAEITKPENFRCPTSVLGVINSIRASGDGLQQIRGRTTIVDGVEQTVSGTVNLFILPSNVERSAYLTSVRRYLANETSDEQWLSDTREGDVRLLVLVHRMAANRLGFPNLFAALTDKAPMSLSEGVNDGSAWPLRPFVQHILPIFAAAQANDQFQIMSIMRSECPKLEPLRLHGQAMVAVLNEIQQGIDGLFALLEEGSQATVRDILLHVKDCELLRLDDRFENHLSDEPVNDGNDDFENVQNYLRCNAHELWAYRRYLSEESPFATHHGVKGAQFERVLVVIDDEEARFSQYSYGKYFQYIPLSDNDLANLEEGKESVLDRTRRLFYVCCSRALKDLAVVIFVPDVAVAQAAIVEQNLFPASTILGQHDLS

SEQ ID NO: 66726 - protein, 771 aa, Klebsiella pneumoniae; identical to SEQ ID NO: 64244

SEQ ID NO: 66727 - protein, 625 aa, Klebsiella pneumoniae; identical to SEQ ID NO: 64245

SEQ ID NO: 66728 - protein, 771 aa, Klebsiella pneumoniae; identical to SEQ ID NO: 64244

SEQ ID NO: 66729 - protein, 625 aa, Klebsiella pneumoniae; identical to SEQ ID NO: 64245

SEQ ID NO: 66730 - protein, 771 aa, Klebsiella pneumoniae; identical to SEQ ID NO: 64244

SEQ ID NO: 66731 - protein, 625 aa, Klebsiella pneumoniae; identical to SEQ ID NO: 64245

SEQ ID NO: 66732 - protein, 716 aa, Klebsiella pneumoniae
MCSKTMLRAQSITMYINKLAIRNYKNFRSSNFYFVKGSVNTIIGENASGKTNLFNAMRLILDDSLPMNSRILSNEDFYRGLSEPFGHWIIITLYFDDLSESEEEQVLANYTVNDGNDKSIKEGNYTFIYRPKFHIRQKLYELTLEDDNVEARSASFTEFASNHIISKETYEAVAFVRTKVDLNNDEIYKQVVGDFDSYSFSNPNDDDATVLGVKKPPYFSLGSEVACTYVKALRNVVADLKYYKTNPLYKLLTLKSKQIDDRRDIVENVKEINGKISAIPEIERLSNKISASLLNTVGSTYSPKILVSSQLPEDFTELIQSLGLVVEDSLDYNGSGKIDDLSLGGANLIYLALKLYEYEEIRDSEEHITHFLLIEEPEAHIHNHIQKTLFDNFNFKNTQVFVSTHSTQISSVSKISSMNILSRQNGFTDVYHPSFGLTPKEISSVERYLDAIRSDLLFAKSVILVEGDAELILIPAMVKETLGISLDELGISLIKVDGTVFKHISNLFHEKRLKRKCAILTDLDSAYVKVADNIFDADFVESLVDAEDDGLRRKEELDKYIEGNEFITVHYAENTFETELVRYDENNNLFIEVMKTEYKKEAYFKKAESDVNSSDLRVRYKRVLKFAKKIGKGWLATEMVEHLSVDNRVPDYILQAIQFVLRDRNVEPIYQKMLDYNMSLMGGKAFDCINAEKDFSSKMIEYKKHFNDSFVRLLEL

SEQ ID NO: 66733 - protein, 583 aa, Klebsiella pneumoniae
MPYRNLTSEQMDAVKFNGNLLLTACPGSGKTKTLVSKLCFILENKELFCIGKKKIIALTYTNIAADTILERIMSFGISSESLWIGTIHSFCLNWIIKPNVDKIPRLCRGFSVIDEHEKEFLINELKEKHGLSANDKVFTNLDFNLGQFYSRGTKEHLIVKEYHNHLYEKKLIDFDLILNLTCRVLTKYNALCERLSLLLRCILVDEYQDTSLIQYEILRQIVLKKNTMITFIGDKEQAIYTGLGAVVKNRDELINCFQLDNLTEMKLTGCFRSSQSIIDFYSKYKDEDYEINSLSDNKDFNSVIFKESEVDVSQLPIYVSGIIRTHLAQGVLPNEIAILCPGWFDVIKLSNDIVTLNPDIEIDGVMISPIPKNNENLWLALVKLFLIRRVPSNFNTRQKLLRDFLQELNVVAPYTESLSPKKILKIINKISLSVDYNCEIDVWLRQVITRFCHSINLGISNDSYYYQEMELLINATLKRMLKYNMAYKANELHLFFNFRSGVKITTCHSTKGDEYEVVICTGLLNGKIPNWNDIINCSSEHQNYVARRLLYVVSSRAKKHLYMISERGYKTKRGYPYQTTPQL

SEQ ID NO: 66734 - protein, 522 aa, Klebsiella pneumoniae
MPGFLSVTKEVSLTFIQALRDVVSEFHNNRTNPLLTLLKSKSGDINPLTMEPISEMVRGLNASIEGLEDVQSVRNHIRETIKDAAGETYSPASLSIKSDLPEEADKLFQSLRLFVGESEEGYEGAIHELSLGGANLIYLTLKLLEFKYQREKLAMANFLLIEEPEAHIHTHIQKTLFDRIAYSDAQIIYTTHSTHISEVSNVSNVNILGRHGAFCEAYQPARGLDPTQINSIQRYLDAVRSNLLFAKSVILVEGDVEEILIPILIKLVLGVSVDELGISVINIRSTGFKNVAVLFHDLRIKKRCAIITDLDKAFFNITVQATDNAIVAKIKAKAAGSQKAGLERQADLTEFTAENPWIETFYAKHTFEVDFVAAGNQEAIVQTIPKVYKDQVTREEAKLQLKSGDLQQMGSRTLTMARQEGKGWFALLLAEYLTPQVQIPEYIIQAIHFAHGKFPRSLIVRILQYRTEYRYGADVANLPAKQLFLQEINRFAQGDIGLAEFRITIGRLLPGDPIIVFLGKLQ

SEQ ID NO: 66735 - protein, 594 aa, Klebsiella pneumoniae
MRFVWDPSDLNPEQAAAVTEPSSIFLIACPGSGKTRTLTYKIAYELSRRTDKRMVVAITYTHRAADEIQERIEDLGVDTSGLWIGTIHAFCLEWILKPYGIYSPELARGYRVIDPYDRERLLERLCAQYKGITHWDCDYYVTETGYQLGCVDTRKHPIIQNVLKEYFKELSSSRQIDFELILWYAYCLMRDRPPIAVLLSRVFSHILVDEYQDTKQIQYSILTSILRAGRGETKILIVGDPNQAIYGSLGGYAMPLDEFRAQAGIPIKEFALSLNYRSSERIISYFSNYSVHASKITGAGKDAKFPSRITYNQKVTRSNVHDEIVRLIRKSLDNGYSPENICVLAPQWVLLASTTRKLVAMLPDQQFDGPGLIPFSNNFDNFWFKVSKVLLTDSSPALLIRRLRWANEVIKDLDSFGVDTKTLTPRILLRESNALTVNELDGLRYLDQAFTELLKRLNISPEIHPALLTHREAFFSSSAARIERLQKEGATYINQISVFKKVFRERSGITVSTIHGVKGAEFDVVIAFGLLEGMVPHFNEVNGHVAASKLLYVLSSRARKNLHLISESERQRGRYSSYSATELLAACIFNYDEE

SEQ ID NO: 66736 - protein, 329 aa, Klebsiella pneumoniae; identical to SEQ ID NO: 62502

SEQ ID NO: 66737 - protein, 557 aa, Klebsiella pneumoniae; identical to SEQ ID NO: 62503

SEQ ID NO: 66738 - protein, 329 aa, Klebsiella pneumoniae; identical to SEQ ID NO: 62502

SEQ ID NO: 66739 - protein, 557 aa, Klebsiella pneumoniae; identical to SEQ ID NO: 62503

SEQ ID NO: 66740 - protein, 712 aa, Klebsiella pneumoniae
MYISKLTLVNYKNFKNTSLRFHKGVNTIIGENGSGKSNILRAIRLLLDDNMVRSAYRLEEGDFSRSLDQWQGHWIIISMEFDEITTDESVQALFLHGTAPLDDGPIHKATYNLIFRPKKDIRLKLAALELFDFKELSEIRDAITIDDYETLFTGRSSADFGNPAVYRSIVGDFDICDFSSETEFPEIGAKVPGFLSVTKEVSLTFIQALRDVVSEFHNNRTNPLLTLLKSKSGDINPLTMEPISEMVRGLNASIEGLEDVQSVRNHIRETIKDAAGETYSPASLSIKSDLPEEADKLFQSLRLFVGESEEGYEGAIHELSLGGANLIYLTLKLLEFKYQREKLAMANFLLIEEPEAHIHTHIQKTLFDRIAYSDAQIIYTTHSTHISEVSNVSNVNILGRHGAFCEAYQPARGLDPTQINSIQRYLDAVRSNLLFAKSVILVEGDVEEILIPILIKLVLGVSVDELGISVINIRSTGFKNVAVLFHDLRIKKRCAIITDLDKAFFNITVQATDNAIVAKIKAKAAGSQKAGLERQADLTEFTAENPWIETFYAKHTFEVDFVAAGNQEAIVQTIPKVYKDQVTREEAKLQLKSGDLQQMGSRTLTMARQEGKGWFALLLAEYLTPQVQIPEYIIQAIHFAHGKFPRSLIVRILQYRTEYRYGADVANLPAKQLFLQEINRFAQGDIGLAEFRITIGRLLPGDPIIVFLGKLQ

SEQ ID NO: 66741 - protein, 594 aa, Klebsiella pneumoniae; identical to SEQ ID NO: 66735

SEQ ID NO: 66742 - protein, 712 aa, Citrobacter sp. MGH103; identical to SEQ ID NO: 63712

SEQ ID NO: 66743 - protein, 599 aa, Citrobacter sp. MGH103; identical to SEQ ID NO: 63713

SEQ ID NO: 66744 - protein, 712 aa, Citrobacter sp. MGH105; identical to SEQ ID NO: 63712

SEQ ID NO: 66745 - protein, 599 aa, Citrobacter sp. MGH105; identical to SEQ ID NO: 63713

SEQ ID NO: 66746 - protein, 591 aa, Citrobacter sp. MGH106
MSILINSVRISGFRGIKEIEVELGRIAVLLGTNNAGKTSFLKSLQLALGDYQRYFSDEDLHIDSSGLKVNEVIVDLKIIPTDEHYNKTEEFDEKWIDVFGDNIAVDANGHEFVAIRTKVQPDEIKGGFNTQRYYLNEWGEFEGWKEIVVNERRKVRTKVDAIPYICIEAQRDIHHELKDKSSYIGKVLSYIKYEDEDVTALEEMISSINETAVSRSEPLQSLKNSLQGLNQSFLGSSHTEITPFPKKIRDLSKQFTVHFGDEENHSFSMEYHGTGTRSWASMLTVQSFLSFMHERHELENKALHPIVGAEEPEAHLHPNAQRTLFKQLSSSQGQIILSTHSPYLSAMAEIEDIRSFIKKGDGVTVNCLKKRIEHDEKNALKREIMLTRGELLFSRALILCEGVTEEQLIPSMFELYFGRTMFSVGVNCVSVSGKNYPPFIKLASNLGIPVCIISDNDGDTHGEINRQVARLVREDGLVLNPDCFSLEFLKETNDIEAELYNELNIREEIIESLVLSETKASPNERYREAKKREIEDLQDSAIIEKMRDSKASYAGYLGVILAQNANGKRIEELLPESVIIAFNKVRGWLEL

SEQ ID NO: 66747 - protein, 632 aa, Citrobacter sp. MGH106; identical to SEQ ID NO: 63115

SEQ ID NO: 66748 - protein, 566 aa, Citrobacter sp. MGH109
MRIETVYIKGFRNYCDAVINFNETNLIIGANDVGKTNLLYAIRLLLDKSLSELDLEPKSNDFHVSSAGEQVENIEITIKFTDVSEDAVISKLGGYVSDEGETYIKYLASSLTMDYKILLSHEHNNFDEVPNRFYLKCLSLRYINSQRDLEKYIKIEKKHLLRLAQEVRSEKDTENDGAVFTELNKLLTEVNEKVKGISYVASATEELNEELRKLSYTHDRLTVQLDTGAIGIDQFIEKLELSANTNGKKLMLGGDGFNNQILLALWKAKSVREHDVDSEVVIYCIEEPEAHLFPHQQRKLAAYLIDKLPGQAIVTSHSPQIAVNFKPDSIIKLYYDDGETLAASNGCSDCISSAWDGMGYRMSIIPAEAFFANVVFLVEGPSEVIFYTELAKALNIDLDYYNISILSVDGIQFEVYRKILTALNINWIVRTDNDASKVPHKNEWQYAGVNRALALCGENKEPNSNIPIDSKALHAKWGTISPIINPNGVYISFFDLEGDLANDFSKHVLDYASKDNLDDAADYLRGKKAIRMRELIKEKKAFLTELKNKDIARPLIHALKIARGEL

SEQ ID NO: 66749 - protein, 540 aa, Citrobacter sp. MGH109
MKLTKEQLDAIDYDGNLVITACPGSGKTTILVHKIAACLSHSKDYQGVVALSYTNKSSEELKARCRKLGAELNSSFFGTIDKFFINEIILPFVRQVWGGNESTPEVVKYIDLSQELKDKTNKYFDRVDFYSNTSFEGMGSLRDIYLKGMLILDFLPHLAFYIVRTSYSCQRYLMAKYISFFVDEYQDTGYFTHQVFKFIPTLGMPLIIVGDLDQSIYLYSHRSSDSLKDFMNDSGFCHKEITVNHRCHPSIVNYANRIKDSECQLVPCDEIFVYRKCVDGNQIDIAKWIGEIINNVKNKFSISDNKEIAILVRSNACAELVSDNLVVSNRAYLDNDLTKAGGKVSGLVNDLLCYRYNLNKTAQSILEGVLGGSVKRSEATRIRKAIKQVRSVKDALLIDVINKIVVTLLGIEIEQHHKSALSEILVTPRMQNNYLDVRSDEVQIMTLHKSKGLEFDFVFHLDLYDWILPKRVFIEGSYDVVFENEQQCINLHYVGITRARKGIMLMHSTKRYNGSGDLKNGAPSQFLLKPGLDGLYKKIN

SEQ ID NO: 66750 - protein, 577 aa, Citrobacter sp. BIDMC107
MYIKNLSIRNFRNFQSTKLNFKKECVNTIVGENSSGKTNVFEAMRLILDDSLPYYKRFLTERDFHRGCLPVFGQWILISLELGDISGDEESEILCQLNTTVDAGGTGRVTYIYRPQFHIREKLFNLSSIADLQKRREAYDKLLKEYIIDKTTYEAWTVYQGTCDFSDENEYVRIAGDFSNFIFPNPSVEYIDLLGNRQRGYNLLDHISCTYARALRDVVSELKNNRFNPFQKLLDFISKDISNDEELTSNIIDVNNKISTISEVRKLSTGILTSITNAVGSTYSPLVNISSELPSDVKDLVKVLQLKAGDSLSDGYTADLSEMSLGGANLIYLALKLYEYEEGVSKNLLSNFLIIEEPESHIHTHIQKTLFSNLKNKKTQVFISTHSTHISSVSNISSTNVLVKKLGYTQACSPSSGLDEPTINKIERFLDAIRTDILFAKNVILIEGDAEEILIPHLVKNSFGVTLDELGVSLISVRGTGFELLSSLFHPSRITKKCAILTDDDINIYNEDKPEYITQVMYDDAISSEKSGKERVEALKLLTANNNLLKAYFTKHTFEIDLGKVRISRSFLPKLTR

SEQ ID NO: 66751 - protein, 563 aa, Citrobacter sp. BIDMC107
MDDEKKELLKIKKNLFVSACPGAGKTKFLLGMLGDNIRCDSGFKWHIVLTHTNAAADEINLRLDNQNILNDRVWCGTIHSFLLEWVVRKYAGAMARTKDGVRLISEREHRDLIRKIEKEKFPSTRLKFKWDEYGDPHVEPFCLLNEPEKIIDAQKNEAIVCEEYEKNKIDASLIDFNDILTLSLEFLTQNEKIAEYLSKLIGYIYLDESQDTSYIQLEVLSFITRYNKTIVLVVGDNDQAIYQDLGVSIKDEVSIKKILKLDELEVRQLTGCYRSTKSLVDYYKKYSYSKSNIESIREDLGKSPIIRHTLQTDLAGRVMNLIEAYNKSKGSVESLAIIGPNRYYLNDLINSIYERSNEFVFDFFSTNPLYTLKDTIYNDLVRLVLLDVSVNNYRARHALCISIKDKLPEFDGLSCSDLKKAVKQFNTKRTVFILWLKDFYEFLLSALPHSPKINSDYLICQSNLSAFPVKADIISIRKIINKEANVVKVTTIHGCKGEEYDYVISIGYHDQVVPHSSAVEKGAEYSESIAKRLMFVAFSRAKNHMNIYIDDRRVVSPYFIADT

SEQ ID NO: 66752 - protein, 712 aa, Citrobacter sp. BIDMC107; identical to SEQ ID NO: 63712

SEQ ID NO: 66753 - protein, 599 aa, Citrobacter sp. BIDMC107; identical to SEQ ID NO: 63713

SEQ ID NO: 66754 - protein, 712 aa, Enterobacter sp. BWH64; identical to SEQ ID NO: 64890

SEQ ID NO: 66755 - protein, 594 aa, Enterobacter sp. BWH64; identical to SEQ ID NO: 64891

SEQ ID NO: 66756 - protein, 594 aa, Enterobacter sp. BIDMC93
MYLSKLGIRNFRNFEAVDIPLAGNVVLLGESRVGKSNLLFAIRLVIDPTLPDSARQLKLSDFWDGCGLESNPQIEVHLEFTDFDSDPSLEALLTDFHIAEDPTVARLSYIFRKKEEVDGAPRSGEDCEFIVFGGGQESRTIPGRVRRRISIDMLDALRDAEAQLASWRNSPLRPLLEDAFSSLSRADLDRVATELQTATETMEKFPSIKELEDSLRDGILDLAGTAHDLDARLRFAPADPLRLMRSISMFIDDGKRGIIEASLGSANVALISLKLAEFAWRREKNERNFSLLCIEEPEAHLHPQLQRAVFDKLFHNADKDQSLIVTSHSPTLATIAPLRSIVRICRDPEGRSRAFSLAELPVTSEELDDIERYLTATRSELLFANGVIFVEGDAEEVLLPGFAQAMGINLDQLGITVCNVAGVNFEPYVKLAASLGLPFSVVTDWDPLDGTKQPMGKTRSIGIWQAFSEVSGKLKKLLPVNIIWLNNSSYEACKPVFERIGIFLNDQTFEVAVANTTGLKEALLDILDEQGFGVLRSSRIASWRAGMVPDPTQLLAMISDIGKGRLAGKLKQKAPGLAPPGYIASAIQYVVSNV

SEQ ID NO: 66757 - protein, 593 aa, Enterobacter sp. BIDMC93
MSDRRALSEALNELLPNREQYAAATYPGHCVVIAGPGSGKTKTLTTAMARALIEDVPDPRGVACITYNNECASELEGRLACFNVTGDDRNFIGTVHSFALNQVLIPYSRCIPGLLPDDFRVATIEEIRAAVEVAYRARFGAVGDPHARWKFAEEKRRRDVSRLLPAWRNNNPELADFIDGYEAELRRLGLIDFDDMPLIAFRIISEHEWVRSAIRSRYPVLFVDEYQDLGHALHELVLLLCFNGGIRLFAVGDADQSIYGFNGANPGLLDSLVSRADVRPFRLRFNYRSGAKIIRASLGALGEDRDYIGCDGNPEGELGFHGIKGDYDAQAHFIADDLTPSLFERGFQPERIGVLYRAAWLGDKVADEFKARNIAIIRADSNALIKRNSRLARFIEACSQWVTGGWKEASPPFNLLLSQALFLVYGRRASRAEEQLLTVQLIIVLRNGIDKAESAHEWLRRLNDEIITGWMAISQNTQQEWDVISELLKRTDPLRGLDVALDIFAGKVEGTGRITLSTLHSAKGREFDVAIMFGVNKYDFPSKLDLASDNALREARRLFYVGVTRPRKELHMVYEKGKHSPWIAELYHRSQQI

SEQ ID NO: 66758 - protein, 769 aa, Pluralibacter gergoviae
MSAADATTSLSGQISLRFVELCQFRRLGKVQLEIDPKTTILVGANNSGKTSILAALRHFLADGSPFGAFDISVSQWPKLRELGRAWDALEEDPSTSGASENEWVEQLGTLLSAMPTLDLWFDAKAGMFHYVSPFLSKFSWKGGGVGVRLRLEPATNIEDLKQLAWKYHLTRIPVKDMGKDSLAWPIDLLDFWLREPSLLGQVRAYKLDADNNPLDGIKTYVSQILDANSSPIDRKHLQKIIKVDFVAAQRGLGSEEADSRSASGPHRIGLFSNQLLKFARQHLNVAATGHGHRADLIKAVADAQQELDKKIHEAIGPSVEEVKELGYPGLHDPQEIRFRTRIQTAELLDHGTAVQYSMQKDSLEELLPEYSIGLGYQNLQSLSYQLVSFKAARLNPEKGAPVPVHLVMIEEPEAHLHVQVQRIFPGKAHKLISPNSSAESGLKSQLIISTHSSHLAHAENFDRLRYVRRVAKSEEQNMPTTEVVNLGQVFGDDKTTRQFAERYFRVQHTDLLFANAAIFVEGVAERMLLPLFIERDFAILNSRYLSFLDIGGSHAHRLKSLVERLRIPTVIITDIDPVEERPGKPKKNGEPTTTLVAVANTGQPGLQCGNPTLRGWHPKLQQLEDFKNPKDEHLVWNEIAECSVRFAWQLPVAEAGNQWPSTFEDSLILRNIPWFKALMNEKVDDGGKQLTPPKGALGSVARQVAENDNIPELLAALHKLMHGSFNKGDFAASIFEMVAADEPIVCPKYIVDALEWLQTQLEPSKEVMP

SEQ ID NO: 66759 - protein, 649 aa, Pluralibacter gergoviae
MTNSSILDGNDRDAGVVEEICGYLTDIPPRNYFLFAGAGSGKTRTLVEVLRRLTGVTEHEKGGQLARSLKMYGRSIRVVTYTKNAVSVINGRLGDNSLVCVSTIHSFCWELINGFNDDIRESLIAVKEAQLAKETAEAQAKPRGITAAKQRDLDEITNEIEVLRTTEVFKYHPDRNTYGPGALPHNYVLDATAWLLQNKPTLQSILKDRHPIILIDESQDTVKGVLDSLMVLAKKSERDLTLGLLGDHRQRIYMDGHADLPSIVPESWATPELKMNHRSQRRIVTLINKIWETEFEGRTQPTKGSAQHPRTEKAGGTVRLFLGDTSRSPEDKVLSERWCAERMFEISGLADWNQGQYQLLALEHKLVATRGSFLDVYEAMVLLDPNAAAPSGSGDNKGPSTVQILLNELAHLEACVSDEGIVNEFKATEVFRRYGGLDNMPEDSEARIERTDEMLEAIAIFAMACANPESTIAEVLAPVLSANLFEVDHRLLEAYADKSPAPQAPGRGEDESKQTRMRRGWCALFASPWKQLKCYRNYLAGISELATHQVVKGSEFNHVMVVMDDALAGGTLIKYDKIFGGTKLSPTDKKNAEAGKETTIDRTLRLLYVTCSRAQESLALVLWSSDPAAAMARIKESQWFAEDEIQIIT

SEQ ID NO: 66760 - protein, 769 aa, Pluralibacter gergoviae; identical to SEQ ID NO: 66758

SEQ ID NO: 66761 - protein, 649 aa, Pluralibacter gergoviae
MTNSSILDGNDRDAGVVEEICGYLTDIPPRNYFLFAGAGSGKTRTLVEVLRRLTGVTEHEKGGQLARSLKMYGRSIRVVTYTKNAVSVINGRLGDNSLVCVSTIHSFCWELINGFNDDIRESLIAVKEAQLAKETAEAQAKPRGITAAKQRDLDEITNEIEVLRTTEVFKYHPDRNTYGPGALPHNYVLDATAWLLQNKPILQSILKDRHPIILIDESQDTMKGVLDSLMVLAKKSERDLTLGLLGDHRQRIYMDGHADLPSIVPESWATPELKMNHRSQRRIVTLINKIWETEFEGRTQPTKGSAQHPRTEKAGGTVRLFLGDTSRSPEDKVLSERWCAERMFEISGLADWNQGQYQLLALEHKLVATRGSFLDVYEAMVLLDPNAAAPSGSGDNKGPSTVQILLNELAHLEACVSDEGIVNEFKATEVFRRYGGLDNMPEDSEARIERTDEMLEAIAIFAMACANPESTIAEVLAPVLSANLFEVDHRLLEAYADKSPAPQAPGRGEDESKQTRMRRGWCALFASPWKQLKCYRNYLAGISELATHQVVKGSEFNHVMVVMDDALAGGTLIKYDKIFGGTKLSPTDKKNAEAGKETTIDRTLRLLYVTCSRAQESLALVLWSSDPAAAMARIKESQWFAEDEIQIIT

SEQ ID NO: 66762 - protein, 769 aa, Pluralibacter gergoviae; identical to SEQ ID NO: 66758

SEQ ID NO: 66763 - protein, 649 aa, Pluralibacter gergoviae
MTNSSILDGNDRDAGVVEEICGYLTDIPPRNYFLFAGAGSGKTRTLVEVLRRLTGVTEHEKGGQLARSLKMYGRSIRVVTYTKNAVSVINGRLGDNSLVCVSTIHSFCWELINGFNDDIRESLIAVKEAQLAKETAEAQAKPRGITAAKQRDLDEITNEIEVLRTTEVFKYHPDRNTYGPGALPHNYVLDATAWLLQNKPTLQSILKDRHPIILIDESQDTMKGVLDSLMVLAKKSERDLTLGLLGDHRQRIYMDGHADLPSIVPESWATPELKMNHRSQRRIVTLINKIWETEFEGRTQPTKGSAQHPRTEKAGGTVRLFLGDTSRSPEDKVLSERWCAERMFEISGLADWNQGQYQLLALEHKLVATRGSFLDVYEAMVLLDPNAAAPSGSGDNKGPSTVQILLNELAHLEACVSDEGIVNEFKATEVFRRYGGLDNMPEDSEARIERTDEMLEAIAIFAMACANPESTIAEVLAPVLSANLFEVDHRLLEAYADKSPAPQAPGRGEDESKQTRMRRGWCALFASPWKQLKCYRNYLAGISELATHQVVKGSEFNHVMVVMDDALAGGTLIKYDKIFGGTKLSPTDKKNAEAGKETTIDRTLRLLYVTCSRAQESLALVLWSSDPAAAMARIKESQWFAEDEIQIIT

SEQ ID NO: 66764 - protein, 769 aa, Pluralibacter gergoviae; identical to SEQ ID NO: 66758

SEQ ID NO: 66765 - protein, 649 aa, Pluralibacter gergoviae; identical to SEQ ID NO: 66761

SEQ ID NO: 66766 - protein, 689 aa, Bacillus pseudalcaliphilus
MYISELKLSNFRVFSSETTVHFNDGINVIIGQNNAGKTAVIKALDLLFNPNSKKKLSINDFNRQIKVEELKTAPPKIEISAKLSKSNGEDDYSDELITVANWLTKIEDPYEAYIKFEFFLPETNVEEYQSLMNEINSTDINQYWKEIEHNFFRKYISKIYVGNPEHKNQIQADEINKFDFQFLTAIRDVERDLFKGNSSLLKEVIDFFMDYDIKSDLTLDKKEKARKIQGLKREFNQESSILIKTLQDRMELGNEEILKYVEKTGAGIDESKPLFDGEILDTELYSALRLIVEKESGIKLPAVSNGLGYNNLIYISLLLSKMQKNASSEYLGSNSKVFSILAIEEPEAHLHPNMQYKFLQFLKENRASNVNQVFITSHSPNITAAVDLDDIIILQKDRSSNIHIAYPGKVFNLKETEDIKSKNYVKRFLDVTKADLFFAESVILVEGVAEQVLLPELAMLLEDEIDLVDNHTSIINIGGRYFDHFLKLFDTSNSSYALRKKVACITDLDPVRKKRETEKARWVKCDPLLLNLQTDIYEYKACSNGLVSKDEYSETAHIEVFNQVIGESSTFEYDIFLKNPSDYLITESLSNIDELRKLILLLDEAKSLTELLDELGSGDFKTEVQELMEKSILLDDPIVRKKLVASRYLSSISKGEAAQELAYAISENKTQITPPEYIKEALEWICQKQ

SEQ ID NO: 66767 - protein, 562 aa, Bacillus pseudalcaliphilus
MDLSKAVKLEDSKELIPIEEHFKLYAGPGAGKTTFLTNHIKNVLGASDKLKHKRKIACITYTNAAVDNLRTRLDTSLESVEITTIHSFCYKHIVKPFLWLLDHCPVAIEKMEGHDEIKLRRSQIDKIKKEAKQSYLSNSSLMDALNKLQWLFKSNGKFELGYKRPFDGMVDGSYVAKIMYMKFKEAHWSEGRLSHDDVLYFAYRIILEHPQVREIIRGKFPYIFIDEFQDTSPLQVKIVKIISDKETVIGVIGDICQSIYSFQGASVGDFEEFEVKNMKLYILQENHRSSKEIVNILNHMRKDKDFQQETKIKLNNSRPTILIGDKSSSYEHIKKKSLIDLMILAYRNKTLDNLQKPDSINQDKEVNYLTDDSDSNRAWRIYHVIKALEYAKTQKIKEALKAMKMAYRKEDLSETEVFRNLKRLINIRDKIYNLTLTDFYNDHLFGHYNVKAKISRGVIKQIYDSALYSDAAVNINVVDEHNNFRSIHNAKGEEFENVFLIIPSVEKNELSFLLEPDMDKETHRVYYVALSRAIKGLFISVPSLTLDQKSQLEDLEFSIIET

SEQ ID NO: 66768 - protein, 732 aa, Pseudomonas stutzeri
MSLAGECDANNRNFRAWTLMHIAKLTLVNYRNFASADLMFTKGVNTIIGENGSGKTNLFRAIRLLLDDSMSRSASRLEEADFHRGLDNWRGHWIIISLEFDEVGPDEAIQALFLHGAGVIAGAAPIGRATYNLIFRPKKDVRLKLAKLANGDIAGLARVRESIEITDYETVITGRSTADFGSPATYSEIVGDFENCIISYETDDPRIGARVSPLLSVASEVSFTYIKALRDVVAEFHNNRTNPLLTLLKSKSGSISAPDMDPIVARVRELNESIVALNDVQVVRSDIRSTIKAAAGETYSPSSLSIRSDLPEEADKLFQSLKLFVGESDENYEGAIHELSLGGANLIFLTLKLLEFQYQRARQSIANFLLIEEPEAHIHTHIQKTLFDRISYADTQIIYSTHSTQISEVSKVSSVNVLGRRGAACEAYQPTTGLDPTAIDTVQRYLDAVRSNLLFAKSVILVEGDAEEILIPLMFKQVTGLSLDEIGVSLINIRSTGFQNVATLFHQSRIRKRCAIITDRDAAIIDTAHMPGDSEAEVRYKRKCHGSDVKGLARKLALDLFVRGNPWLSSHYADHTFEVDFIAAGNAAKVRALVPIIYVDPQTLVAADVELASGDKAQFGRRVLTMAANQGKGWFAIQLGRYLDSNTVIPLYIRDAIFFAQPTLSTELFSNIYRYRVSKAIQSGVLAAPDAEALHELIEQYRSGALPLADLKATLLAMLPNDQIHRLLANVA

SEQ ID NO: 66769 - protein, 598 aa, Pseudomonas stutzeri
MFAWSRHELNPEQEAAVLFAGSQLLIACPGSGKTRTLTYKIAYELSRLTSARQFVIAITYTNRAADEIRERIENLGVNTERLWIGTIHAFCLEWILKPYGLYHPDLAHGFRIIDLHEREKLLEQLCDPYRAQYVTFWDCDYYFTPRERVLGCSDTRKHAFIGNVLDELFATLKDKRQIDFELILFYAQRLVAAHPAISRNLSNLFSFVLVDEYQDTKEIQYAILGKIMSAGGGTTKLLMVGDPNQSIFGSLGGFPIDLNGLRAITGLEIESRTLSRNYRSSQRLIDYFENFNLYGMQIQASGPDRDFASLITYDATIHKDDLADEIAHLIQHNIEVLGVPPNEICVIAPQWPYLTAMTRALVVRLPEYRFDGPGIVPFARDTENFWYKVARLALTEPSPGGYLRRLRWAGDVIEDLSSAGVDVSAFNRKQFLAECNAVVIDETNGLRYLRRFFDTLFHRLQVPYIDFASLLEHHEAFFASSEARLQRLQTDGVAAASDVSFFKKAFQARSGILVSTIHGVKGAEFDVVIAHTLLQGMVPHFNDAGGDDSAKKLLYVIGSRARRHLHMFSETGRARGRRGDTWEATRLLKACVFPYDSQ

SEQ ID NO: 66770 - protein, 672 aa, Pectobacterium carotovorum subsp. brasiliensis ICMP 19477
MIFNHCILEDYNLYLSQIEISNFRLFKNLSLKLNRGLNVLVGENDSGKTALIDAIRYTLGTKSNDRAYLTEQDFHNDANDLKIRLKFSEVTPHAHRFVEHISHEEYEDENGERKLRSVFYVQLHAQITGLEKRGYPYIKTELRSGIDGNGLAIESEIRDFLASTYLKPLRDAEVELSSGRASRLSQILSSSKDIIEGMESILTIIARANDELLTDDAALKKSAENIQQKYLHELIFEKDKSKLGAFIDIAGIKEEDLSNLPKHVQKRHLRTLLEGLTLSLTNDQRTHGLGYLNLLFMGAELLLLEQEANNEYPLLLVEEPEAHLHPQLQMKLLQFINRTTKTEKKPDGVQCILTTHSPNIASKADPAEIIMLSEGGAWPLAVGETELAKDDYQFLRKFLDSTKANVFFAKAVILVEGDSENILLPELAKLLGRPLENYGVSIVKYDNSGSWKRFAKLFLRSGQDESPNAWHPTKICVLRDLDLWPDCAEEKDDGSNPYGFKKEHSRNQVYWRRNYPDAQQRKTEHIDQLNRQNVVVKISDDWTFEYCLAKYGLFSECYEATIGSNVGIDNIVGDDDTKATFILSKVSKTDFAYKLSSILQKQQDQKVDDTIASLSDEDASNNDISKSAQTRAKTEFAVELKQRLPNYLIEAIQYVTEPIEEDTEEVQHATVV

SEQ ID NO: 66771 - protein, 685 aa, Pectobacterium carotovorum subsp. brasiliensis ICMP 19477
MPQSFEGFITHDDITEIAETENLILQDDIRISILKAMNSIDVQACPGSGKTTLIATKLILLAKKWNSPHRGICVLSHTNVAKDEIISRLQRSTSKVAQRLLKYPHFIGTIQEFVHRFLALPYIRSRGIQDITVDNDIYTKQAIKLLELTQLSWFKGTLNGLGNTVEQEAFLRSTFRCISQNVEEINLDKISRRWSPDNNLQRAKRDLGRLKNYLDERGVFLYRDMYTHADKACTNNPELAEVIRARFPFVLIDEMQDTQKFQDELLSKVFPHNSSLIVQRFGDPDQSIFNNIGTEEPNQSFNGKLRDQMDYIIHKSHRFDRALSKKICKLSFNEIPLETELAEASLLDRAQAHTTRDRFTDTVIIFNDDSCETVIKHFAHIVSNQFAVEYKQNKKFTVKVVGAVGAKIASNDAQFRIGHYWPDFDKTKSKNNFKETYFIEAVRQCQENSTIDLADNYKLLLTCILKLMRMSNKMDDNERDFSSTTLRVYLIKIGNWTRFRKGLFYLLTETKATKPQHWEIACRTLISLLQLENIPEEATDYMAFHEDINPDKAKQAEHASSLILLKDNTLIHEDGFHIELSTIHAVKGETHDATLVIETKNHTFDLQTMLPYLTGELPSVEHPNANLPNKPNSRRAFKPNKVFMRQFYVAMSRPKHLLCLALHSDRISSEQIQLLQQRGWQVDII

SEQ ID NO: 66772 - protein, 659 aa, Pectobacterium atrosepticum ICMP 1526; identical to SEQ ID NO: 65712

SEQ ID NO: 66773 - protein, 615 aa, Pectobacterium atrosepticum ICMP 1526; identical to SEQ ID NO: 65713

SEQ ID NO: 66774 - protein, 666 aa, Bacillus firmus
MLISELHISNFRSFGADIQSIKIVNLTALIGSNSSGKTSMIIALLRLFGQRNNDRTLIKTDFHVSEYEDISNIEEINLSIEAKISFPELKFQNPEEIKTIPEFIKQLVVDEAGTEPYLRMRLVGKWVQGTTPEGDIDQELYYVKVPYGHEEQDALIKVPVHHNKLIQMIYVPAMRDPASQLKNASGTLLWRIFGGIDWPKNINQDIESLTNPIEELFSGVDGIKDVQKILNSQWNKYHKDRRYSKSQLKFNSSSLNDFLKNVEILFSPAVDGNSIKVDGLGDGLKSLFYITLVSSLLEIENKQEKEDKPLLNILAIEEPENHISQHILGRVVRNLKEIADRENAQVVLSSHNSSIIGKIDPEYIRHLQIWDSKSLVHNITLPAKHDEAFTYIKEAVKSYPDLYFSKLVVLGEGDSEEIVLPKLLSASNVYLDDFNISIVPLGGRHVNHMWKLLNDLSIPHVTLLDLDRERNGGGWGRIKYVLKQLNENNRCSKDLRTVYRGKEKEEYIYSIEEIEEFHNRDVDKLKSMGTWINKLEGADVYFSYPLDIDFSMLKSFQEEYQNTMINGPRIPADEQSSEYDDKLQGSIQATLKNKDAVAKTYSVEERKLMIWYNSLFLGRGKPSTHIAALKDVEDTALLADAPKELLRLLGKIKEKLDLTGGVNGEQ

SEQ ID NO: 66775 - protein, 626 aa, Bacillus firmus
MKLEDAALASIIEPYNVSIVAGPGAGKTELLAHKVGYLIETGVCTYPKKILAISFKVDAARNLQERVEKRYGKDVSSRFESKTFDSFAKGLLDQFLHALSEEYKPAKQYEIISNERLINDIIKGYITDTNVYYPTWQQEYNFSRVNKLLKETRLPLSTHDNDLYYWINERLWNILLKGKNNLNSSLTFPMISILVEYLLRDNPLIVKSLHATYSHVFLDEFQDTTYIQYDLLKTAFLDSQSIITTVGDNKQRIMGWAGALNNAFEIFNKDFNATQFSLLNNYRSAPRLIYIQNLFSKTLNKTSVDAIPAGKWSAEDGICEIWTFKNHKNEADILARKIKEWMDSEDLKPRDFCIIVKQQEHVYAAEIIKALSKLNIESRIEKEFQDLLSDELILLSLNFLKLCGEEKLPDLWLEFTETIIEIKYTSSDLEDINILNVEKEISKALKTIKDIFLNINEANFETEFQEIMNTVVEFLGEENIKTIYPKYNQKNYIEDRIQRMIKNLNYHEGASLKGLIQEFCGEYSIPIMTIHKSKGLEYKTVIFVGLEDAAFWSFKTQKEADKNAFFVALSRAKQRVIFTISKEREILKYGKPINTIQDLKEISELLKILVDANVPVVKENVHTISV

SEQ ID NO: 66776 - protein, 623 aa, Pectobacterium carotovorum subsp. carotovorum ICMP 5702; identical to SEQ ID NO: 65708

SEQ ID NO: 66777 - protein, 622 aa, Pectobacterium carotovorum subsp. carotovorum ICMP 5702; identical to SEQ ID NO: 65709

SEQ ID NO: 66778 - protein, 697 aa, Pectobacterium carotovorum subsp. carotovorum ICMP 5702
MKVSGVAIRNFRRLENVQIDLEDRESIFVGPNNSGKTSATAIFRCFLGGRDFKIHDFSVARMPDFDTFATTGDAAQLPKISLDIWFTIDPESIGFGRVFTLLPKLSDFTRVGIRLSYEVSEPKKLRDNYDAAYPPMEGGIRSKSLSQYLALGGNLGRHFAVCYSSLDEKIQEGAPPEILTNHLDPDEGKRLLKNLIRVEFVDAQRNINDDDSSRSNRLSSAFSTFYQKNLEQVGHAADAHKVIDDNNKQLTDHYAKQFAPLIDLIKHLGVPSINDRELQIISSLSPETALRGNTELLYIDPSRKHELPELYNGLGFKNLIFMAIQARHFHSQWVMTTENRPLCLMIFIEEPEVHLHAQVQQTFISNIWQVINQSAEAAGEPNLVPQLVVTTHSSHIMEAVDFEKVRYFQRCYSEGEIGATRIRNASMVRSLRTFQPEVEMVDGNLVSPSESLAFLKRYLRLTHCDLFFADAAILVEGAVEKLLMPSMIERAAGRLRTVYLTILEVGGAYAHRFEGLLSFLHIPYLVITDIDSVAPTGHPSACRADVVGARTSNASLKKLCGQTTIADLMALTSAEKQHTDKDRCIAFQTDILVTDGVTNATLRPRTLEEAIVYENLGLLRSGTLSIGTNVHVPLSDVYQVVYERVRSDSFKKTDFAMDILACTQEWTVPRYIAEGLSWLESRLLPQLSAAVDTEVVV

SEQ ID NO: 66779 - protein, 612 aa, Pectobacterium carotovorum subsp. carotovorum ICMP 5702
MVTWVESDADIQVRECIDDHRSFAMIAGAGAGKTSSLVDALSRVRHKEGHFLRKNGQRIACITFTKRAVEIIKGRLGFDELYRISTLHGFLWEQISRFHENIRQALCESRIPKLIEKAREDDNGGNSKKALNARAKIERLTEELELLSSIKHFDYADTSFSDYAKGQIGHDDVIEIASYLLANNETLRRIIGLRFPYIFIDEAQDTFEGIVSGLNLVSSGAELPLIGYFGDPWQQIYDRSAGNFAPPDKGEVIKKRENFRCSQSVIRLLNAYRGDVEQYAAGENAAREGSVEFLLIGAEEPSEPRRRYSEDQIERALARMDAAVEEWGWTDRDDVMKLFLARQMIARRLGFADLNRLFTGDFASSRAKDAFEEGTHFLLKPFLSTICPLIYAQRQGDERNIINLLRRDSPAFAIDGLNAEKSLKLMIETSRALLGQLQTLWDTETIGAILRFCIENQIIQPSERLSEHLDRAPRAELFDKDLHSLDKGDWLADSLFKMTPEMVSRYADFLNNNTAYSTQHGVKGEEYPKVLVVYDDVEAAWNQYSFSKTLTPLTAGEPSERQRSVTQKLAYVSFSRAEEDLRIVLFTSDPDGARDELIESKLLASDQIRIMA

SEQ ID NO: 66780 - protein, 588 aa, Bacillus paralicheniformis; identical to SEQ ID NO: 65702

SEQ ID NO: 66781 - protein, 458 aa, Bacillus paralicheniformis; identical to SEQ ID NO: 65703

SEQ ID NO: 66782 - protein, 662 aa, Bifidobacterium kashiwanohense JCM 15439 = DSM 21854; identical to SEQ ID NO: 65686

SEQ ID NO: 66783 - protein, 580 aa, Bifidobacterium kashiwanohense JCM 15439 = DSM 21854; identical to SEQ ID NO: 65687

SEQ ID NO: 66784 - protein, 672 aa, Xanthomonas sp. NCPPB1128
MYLKQIEAKNFRLLHDVRLLLEHRTTVIVGRNNSGKTSLTEVMKRLLSDASPSFSLEDFSFCCYDQFWDSHLRRAKGEDEIEIRKILPSIEVRLRFSYKNGEHLGLLSELVVDLDPECTEALGVVRYALKDGKLPELLGDFTETDENARPGFFRLLRDRVPSLYETTFVAIDPNDETNEKVIERSTLKKLCIGGFISAQRGLDDASQKERVVIGKVLENLFSTAKSNTDDTDSHAIAQELEVAVKAIQDKIGDDFNEKLDQLLPALSLFGYPGLNDPKLLTETTLDVAKLLTNHTKVRYTGSNGIHLPEAYNGLGTRNIILILLQLREFFKLYLAMEPRPSVHLVFIEEPEVHLHPQMQEVFIRKIADIALAFNKETGESWPVQFVVSTHSSHVANEAHFETIRYFLASADKNGIISTKVKDLRKGLAGKPEPDRTFLHQYMTLTRCDLFFADKAILIEGTTERLLLPKIIRILDKDFAEGKKLGSQYLAVVEVGGAYAHIFFDLVNFLELRTLVITDIDSVKANGAGKLVACQVSQGQKTSNACLKSWYDNNGITPAELLAVDDAARTKGRMRLAHQCPETEAGPCGRSFEDAFMLANPELFPLPGPSEQEKEAQAWEEAKELKKSAFALEHALSKGEWNIPHYIRSGLAWLAEGDLPPTPAPPGDAGAVA

SEQ ID NO: 66785 - protein, 584 aa, Xanthomonas sp. NCPPB1128
MNAVPEASPALIAAREAEALVVQCLRDHRNFLLEAGAGAGKTYSLVEALKHLIEHEGLKLRRNHQRIACITYTNAATAVINSRIDSNPLVFVDTIHAFCWSLIRKFQPALRSLVSAMSEWDEKLAEANGIGSRIVEYELGHRRATTDTVTLHHDDVLGLMVSLLPNVKFQALLAQQYPFVLIDEYQDTDVAVMTSMSGHLLGRATGPMIGLFGDHWQRIYDKTCGHVTNEALTEIGKKANFRSATKIVDVLNRMRPELPQAVKDESFVGSAIAFHTNAWQGERRSGAGGGHWKGDLPAEAAHAYLTTLIKKLESDGWDVAPQRTKVLMLTHNVLASEQGYDSITKIFSYTDQFIKKEDPLMAFFCDALEPACTAFHHKRFGEMFSLLGGLTPAVSSHADKVAWSSSMEGLTKIRLDGTIGQVLDYMFEHAHPRPPDAVLGAVSEAAEWHGEEGEEPPRRVQQIRQLRDVPYKEVIALDRFIDGHTPFATKHSVKGDEFENVLVVLGRGWNKYNFDQFLQWSAEGVPAGKQDAYERNRNLFYVCCSRPTTRLALLFTQELSNVSLARLDNWFDGAIEPAPAPQED

SEQ ID NO: 66786 - protein, 659 aa, Methylobacterium platani
MFIESLSLTNFRCFGPETISVSLTSGLTTFVGVNGAGKTTLMQALQRLFGVTGDQRRLRRQDFHVPAAELVAPLRRNFVLEAIIVFPELDADGTGGAAIPEFFHQMAAEEGGKLKCRLRLEATWTDDGSLDGAIEQKYWAVRTFGPFTVAECTELKATDRARIQMIYVPATRDGASQVTAFLRGRLWRAINWSQGVRDTFTNAGATLNGAFAGEPAVDVIAAAVTRRWQEVYTAGTDTTPVFRPLDLRFEHFIRKVEVVFRLDEAGRERALDDLSDGQRSLFHLAMTAATLDVEAGIVADPAGAGFQAGGVPLPALTLIAIEEPENNLAPFYLSRIVRQIQDLTKSPQAQAVVSSHSPSILARVDPTQVRHFRLAPQDRTARIRPITLPFGEEEASKFIREAVRTYPELYFARFVVLGEGASEEVVLPRLAEAMGLDIDRSFVAVVPLGGRHVNHLWRLLTSLDIPYATLLDLDWGRSGGGWGRIKTVCTQLLANNVTPQSIFGQHLDPLGPAANLLAFDALPITDIVNITRWMIWLRQFNVFFCTPLDLDYSMLSAFPLAYQVIEPGRQGPSRAGEPRTSVLGDDGLPHLYDASHDTVMRWYRYLFLGRGKPSTHVRVLSAHDSVAVAAGAPEELRALLTSIVARLTPPPPPLPPEGP

SEQ ID NO: 66787 - protein, 627 aa, Methylobacterium platani
MRLIRPEDWRPSGIDDLEPAAWSALRHVGSACVVAGPGAGKTEFLAQRADYLLETGLCRAPHRVLAISFKTDAANNLASRVRQRCPPEFAHRFVSVTFDAFTKSLVDRFLNAIPTEWRPTRPYEIAIPKRRVVENFLTLARLNAPLQWQAEIAGYSASDFEAKIVGSYRLPVGPTAPQSAAEFAIARWWVTQLRPGQPSLLTFVGINRLAELLLRANPHIRRALVATYPFVFVDEFQDTTYAQYDFLHSAFSGEQTIITGVGDDKQRIMVFAGARKDAFHRLQADFIAARFPLLFNFRSSPDLVAIQHVVARALDPNTVQTVARTARQVNGDVAQVWSSQTMAAEATYLAKWIANDMATRGRAPRDYALLVKQKSDDYEHELAGAFAAHGLRIRNESHTLGKTSLQDLLSDELSRLAIAIFRLGASRRAPAAWQLVSTSVLALRATGPDDDARAAKVETELTAFLAALRTDMAATTPSKKSAVDFATRVFEYLDLDAIARTYAEYGVGDQLQIILEAFCIHFLGCADGAPNWTSCLDAFEGLNQIPMMTVHKSKGLEYDTIIFVGLDDRAWWSHTPGDPEGIAAFFVALSRAKQRAIFSFCQQRGQRNNIAELYQLLTKAGVPEIAI

SEQ ID NO: 66788 - protein, 659 aa, Methylobacterium platani; identical to SEQ ID NO: 66786

SEQ ID NO: 66789 - protein, 627 aa, Methylobacterium platani; identical to SEQ ID NO: 66787

SEQ ID NO: 66790 - protein, 696 aa, Lactobacillus rhamnosus; identical to SEQ ID NO: 62508

SEQ ID NO: 66791 - protein, 595 aa, Lactobacillus rhamnosus; identical to SEQ ID NO: 62509

SEQ ID NO: 66792 - protein, 540 aa, Mycobacterium chlorophenolicum
MRLTHFEVRGHRVLQDMTVDVRDHLVIIGANDVGKTWILRLLHALLGASVQQLFQTFTLTDIREGEDELSVVARLEDLDADELALFPFETSVEAGEPNYLVLQLEVRPSEEDPDNVAITRFFPDSGTRRGPSRNQLLAIGWRYLPATRSSGPEFMDGRTSPFRTMLDSADLGDEIEDFGALLQEFNNKLEENTALLELRKTIATHLSRSVPKTYTEDALAIRTSADPVDQPLQDVTIYLREGDRFKSLSEQSDGMRQLMALTFFDLAQVRSNIVAVDEPEIHLHASSQRTVAALFAESPKQRIVVTHSPYIVHRFEPKHVLVINPASEARQLAEENFSDVEKEMLHWWSPYLLESLTARRVLLVEGLADRILIEAAARALGIGLDRIGVSVLALDGADKFSHVLKILGRNGFRLPVCGLCDEDREQSWAGTLGLRPRALEQNGFFVARKDLEHEYVRAAGVKKVVDALIAAKVARTEGITQSTGAADIDSVTPDQLGTFLSSVDSRKVPAARAVAPILTPEIVAASPSLMGLISFLKADA

SEQ ID NO: 66793 - protein, 327 aa, Mycobacterium chlorophenolicum
MCSRNITYVGDPHQGIFGWAGADPVHVLQDIRSRADQTIDLDVNFRSSPAVLRVINSVSSSLGSAPLHAAEPEEWKSGDHAYAVQYATDSDEAAGIVSLTDYLAEKCPEDTVGVICRAEYRRSALNSAYENARYTPQFWDYALDNPRVTRLLKRHSKHVDAGLTFDQQVDELRERATGSFNPADVDAISEVHEACEQLMQHTDSNLPLSEFMNRLRDTTMSAISPGVHVLNAHVGKGQQFDWVVVMGLEEGHVPSSYSTTPAQVLEDQRILLVMLSRARKGVFLTCARSNRNQYGRLFHNEASRWWTDMESSCQPLSPSVAVAMRVM

SEQ ID NO: 66794 - protein, 640 aa, Mycobacterium obuense
MKITALRISNFQCFGPLPTTLELDRVTYVLGPNGAGKTAVLEALSRLFSPLQGQRRIRASDFHVPIGQSPGDVQAGEPVLWIEVDVEIPEAADDGQHASVPPSFGHMRIESADGIPRIRVRLSAKLALDGYIDEKIEYVLEANQAGEPTKSAEMHRYDRGHIEVYYLPARRDPSDHISYTTASLIGRSLRAADWTHERKTINELSAKITESIVGNTAVNSIGIRLTGEWSGLHSGAYFKDPSIAFGRGELEGILRQITVTFSPSHEGSPLPFERLSDGQKSLLYISLVLAWQALARRVLNREEMGLDADRLRPPVHTIIALEEPENSLAPHYLGRIVRQLRTACDVGDVQALIATHAPTLLRRVDPHTIRFLRLDPSRQTTVKRIVLPDDDELAAKYVREAVEAFPELYFSRFVVLGEGDSEQIVLPRIFAAAGIAEDDASVVVTPLGGRHVNHFWRLLNELEIPHATLLDLDAGRHGGGWGRVRNAMKQTNVVRPNTFDEDKISQSPKWDDDVPFPQRENGKGALTELEKQGVFFADPVDLDLMMMAAYPDAYGVEPADPDDKTISAVLGKAHRNETRLPVNVRRLFDDYHKKFDLGSKPVTHLGAMANLTDEQLLDKLPDVLARLVECVDTRLAELTE

SEQ ID NO: 66795 - protein, 553 aa, Mycobacterium obuense
MIHPDAWRPVGGLKLEPNAQKAVTMVGRNVVVAAGPGAGKTELLAQRADFLLRTGICSYPRRILAVSFKVDAARNLRERVRARSGTRLGARFDSFTFHAFAKRLIDSFRPALAGQNALDADYRIDLTDRIEREQITLNDLVPLALEILESNKYAVGGVRQAYSHVFLDEFQDCTKAQYELIKVAFGQSMPAITAVGDTKQQIMAWAGALDGVLETFAEDFAGVPLPLYQNFRSAPRLRRMQNRMIADMDPGAITPWAELVGEEGVVDVLSFDTEFDEAENVSHLIEEWLNDGIDPSEIGILIRQEPHLVAAELGRKLTERGIAFRNEQESQDLGAEPVAALLLNFVRVIADERQPTAYTELMRVMKRSNGSEEEASRHDSRVKRMLLESRRIVRAPGFEPAEIGSWRPIVEEFLDLVSLPVLTALSPGYQQGTRLMDLIESTLSAFQRELSVDGDAIKALKRLSEVDAIRFLTIHKCKGLEFEKVVVLGVETKFFWGNAVAAMSEYFVAISRAKNHLVLTHAGHRVRPDGVPAWRWPEQRIAQSKMLGYATES

SEQ ID NO: 66796 - protein, 696 aa, Lactobacillus rhamnosus; identical to SEQ ID NO: 62508

SEQ ID NO: 66797 - protein, 595 aa, Lactobacillus rhamnosus; identical to SEQ ID NO: 62509

SEQ ID NO: 66798 - protein, 692 aa, Bacillus cereus; identical to SEQ ID NO: 63636

SEQ ID NO: 66799 - protein, 581 aa, Bacillus cereus; identical to SEQ ID NO: 63637

SEQ ID NO: 66800 - protein, 692 aa, Bacillus cereus; identical to SEQ ID NO: 63636

SEQ ID NO: 66801 - protein, 581 aa, Bacillus cereus; identical to SEQ ID NO: 63637

SEQ ID NO: 66802 - protein, 296 aa, Lactobacillus farciminis
MIISHSPEVAVSAFEMNFQIIIGRSHGGITRFITWDNLGSNNPLSKQKLKKLILNYNAELLFADKLIAIEGDSERILLNSIMRKINPTLLSEKIAIIPVGTNFKGFKDSLADLLFDKILLITDIDFSEKDTEDNNIYSTNKNIQLLFSSNLDTTIKDHPLNKTLKQEKSFLTKEWNLMPNGNLTNSDNDSISSNFKIVTEGYSNEFKFWPRTLESAMVTASHQNFDLYKKNELLRNDVKVSLDKNPYLLNDIEGKLLRSTVKKADFALNTLDFINNKTFRIPQYLKKGLEWFGNND

SEQ ID NO: 66803 - protein, 517 aa, Lactobacillus farciminis
MVIMIDDTYLTKKNGIYEVRGAAGSGKTYQLTKDIRKLSLSSNSIFIISYSNAAVDELKSRLNNPVLSISTIHSFCWKILSNLSLKIIKYNKDNNFSPDAFKDIKFNPQIIKKVTYEEGIPFFNNETGELFLSHNDIINLFIYSIKEIPELRMSISNTIDYLLIDEYQDTNGKFLQSIFEYLSPNCTIGLYGDPCQSIYLNEDTINISSRYDITSESLKNNYRSRSTLVEFFNEFRNTFDKLDQVPQRTETTKIHVFARNGSLNDETVTSIENKTNVHNETILSLTNILRTKIVGLERIAKKLKKDFPKKNKVAWEKIMNPNSNEYTNIMNSYACIFQDNNYLAIKSLLKIFTKDSLEKVGLDSVKNLITKKKKKNDPSIKEFLDLNLEMNAGLDSFKETINLFNLTDLNEIVEFYKVFDSTTTKNITIFKSKGLEFENVLLNIDYGFYRKRNWNNINFNHKENDNRDTDQDIMYYLFYVGITRAKNNLNIYINSKQNKEFLNKFTVKFPDIEIQYI

SEQ ID NO: 66804 - protein, 678 aa, Yersinia aleksiciae
MQLKKIFISGFKSISNQHPQTINLEHELTTFIGHNGTGKSTAMEALNKLFSVDQSLRSLSINDFYNADVEKDEKNRTLIIEAWFSFPKPNEGKISIPSLIEHLTIDKSDGIILFRVRLEGKLSFDANPIGDIDEDIWVISSSDDVVEDSSKQKLSAAVRNAIQVSYVPANRDPSLQLKYSSKAVLGRLLKAIEWVGGSQKIIEEQAAKLNALTKSNTALNEIAAAINASWGRIYKGRYLSRASLNFPLANIDEILKLIQLQFNPDEVGNTVNVDRLSDGQKSLVYFSLIKAMFDIDKKTRDLISLGESSNFNPEKMRLPIFSMISLEEPENHLSPHYLGRIIKLVKDYGRNELCQVIISSHSSSLLSRIEPEQIRHFRLDQHSKSTVVSALTLPDKADELSKFIKEAVKAYPEIYFSKLVIFGEGDSEEIIIPKVLELHSTEIDSHSISVVPLGGRHVNHFWRLLKSLKVPFITVLDFDIDRNGGGFGRLKYAIDQLAEIGESGSTYIHKDIAKEIPSWNDERDPTKFTIKNANGVKINIVDELENCNVYFSSPLDIDYAMIEAFPDIFCVKDEVYGERGPLNIKKKEGADEEKKELIKAVLKKGNSGVRYVFSADYLKYFLWYRYRFLSNKSKPASHVRMFSKIEEMYTPDEINAKLPPVLIRIAEKTVTILEEVIE

SEQ ID NO: 66805 - protein, 559 aa, Yersinia aleksiciae
MMMQWQPSEGITPTPELMDIILCDQSVSVLAGAGAGKTELLAQKSNYLLQTGKCMWPKRILCLSYKKEAQENIKERVMKRCGQKGDRFDSYTFDAFFKSIVDRFKDVLSMDKRPLNSYDLVFSSKESNGKDKLSFDLIRQLALEILKIRADIVDLFSLTYSHVFIDEFQDTRSDQYELIKLLFKDKGTQLLAVGDINQSIMLWAGARKTVFEDCEKEFNTTKKLLVQNFRASDEIQEVLRCFIHFVQNDVNFSPITRSVDSCTIHHYDNEFSEADDLANKIENFIASGIEEKEICVLAKQQSEQYTEKLRDKLTTKGIRNLDMSELQDVLKEPLGRIFSSLFKVCTSRSPSSYTELCDLYLALHRVNHGDEKEDGLIKSLSDKIAENREKLINSANPDLFILCIKDIIKFFGVNKIMGRWNQYKSTNYWDKLWSSLEQHLRYTVGATQSFKEAALMFQAENSVQIMNIHKCKGLEYKVVIFLGLEDQAFWNYKKAKFENDCALYVALSRAKEKILVTTAENREHRVNNGYDNRNSKYQLVKPIYSFLTSHCKFKSIWYP

SEQ ID NO: 66806 - protein, 706 aa, Vibrio crassostreae
MYISQLSIVNFKNFERSNFYFEKDSVNTVIGENASGKTNVFQAMRLILDDSLPANSKFLSADDFHRGIGEPFGHWVVITLHFEGLTDSEEQQVLSNYILNDEGKKVDSSNGTYSFIYRPKFSIRQDLYELTCKHDDKIARSEAIQGYLKSKAITRDTYEPVAFVRTKLDFTDDNTYKATVGDFDEYKFPDPSKESEATFGNKKPPYFSLLNEVACTYVKALRNVVADLRYYKTNPLYKLLTLKSKEIEDDKSVVDDIIDINNKISSIPEIKALSEDISSSLVSTIGSTYSPKIRVSSQLPEDFVELVQSLGLVVEDSLDYQGTGRIEDLSLGGANLIYLALKLYEYEVIRDSDDHITHFLMIEEPEAHIHTHIQKTLFENFNFKNTQVFVSTHSTQISSVSKISSMNILSRKQTKTEVYLPSNMLERDNIQCIERYLDAVRSDILFAKSVILVEGDAELILIPALVKSTLGVSLDEMGVSLIKMDGTVFKHISDLFHKERIRNYCAILTDLDEAFVTETNDTFATDDFVKSQMNADKSGKERKEALDEYVEDNPYVKAFYAQNTFETELVKLTQNFDLFTKLMDSNYKKGKRLTSVKSEIKDKDLRVRYNRALKFAKKIGKGWLATQMAGHTQINNLLPDYILRSIKFSLTGKNLDDILLKMMAFNLEEMNAEEKAAINEVDTFDEKLKVYKSFYDGDTFVRFVEI

SEQ ID NO: 66807 - protein, 582 aa, Vibrio crassostreae
MPYRNLTLEQMDAVTYVDDMLLSACPGSGKTKTLVSKLYHILDNSDDLLIGKRKVVAITYTNIAADTITERLLSYGVESNSLWVGTIHAFCLQWIVRPNINNIPRLCGGFVVIDEHEREAKLVELKIHYKKKGYDQIVTSLNCDYEPVYKKGSVEYKIVIDYHRYLATNGYIDFDLILNISYRLLVANPQIARRLAKLLYHVLVDEYQDTSAMQYEILKLIISHKQTKLTMIGDKEQAIYTGLGAVVKGKKELEHFFDLDKGIEEKRLTGCFRSSQKVINHYLRYQDAGYEVSALSELKEFPSVVHLESTVDKTQLPEYVKGIIETHLAQGIEGQDIAVVCPSWFDVMALSTGIDALAKSFDIDGFLISPIPKNQDNLWLPLIRLVLLKVNMNNFVKRRRLAIELSDKLYDAGSTQDRIDPRVLLKTVNSISLNMNSEIEPWIELVIEKACENLEIDLYETTEACKAKQSILSATTERMAKYGMDYKASDLSRFFSSSNGVKITTCHSTKGDEYDVVICTGLLNGKVPHWNDIIDCSRSHQNYVARRLLYVISSRARKHLYLISESGHKTTNGNPYRPTSQL

SEQ ID NO: 66808 - protein, 741 aa, Vibrio crassostreae
MKISFVDIQNFRKLKRCRVEFAKEQTLLVGANNSGKTSATDALICFLDKGKKITSTDFTLCNWVALNEFAESWMKQGATLAELPEWQPYCPSLDVWIDADVREVQRVSHLIPTLKWDGEPLGVRLIYQPKDLDRLRENYVRERDAVVKVNKDKQLSLWPRDFKDYLKEKLHVEFEIKAYLLDPSKKDETQTLSNDSICFESDPFKGIFRVDTIEAQRGFSDPHSDLGKSTSSLSSQLNEYYKRHLNPSDMPEAEDLDALEAVEKAQIEFDSRLDKAFEKTLGEIKELGYPGFTDPDIKLSSRLNPIDTLEHDAAVIFDVRKQNFGDNTFSLPEQYNGLGYKNLIHIIFQLITFRDRWLKVGKIGKKRSEEDAAIEPIHLVLVEEPEAHLHAQVQQVFVRKAYKVLREYGSVEANLTTQMVISTHSSYVAYEAGFESLRYFKRKPASKEQPTPQAEVVNLATVFPSERKNETDVSSTNKFVSRYLKTTHCDLFFANGVILVEGAAERMLLPHFISNHHQDLRRSYISILEIGGAHAQRLRPLIELLGLPTLVITDTDACDSLGKKARPKRGASLEFGSETLKSWFEFGNLTLDDLLDLPPEQKVQSNVRVSFQYGIQTKFTPKARTTKEVIPYTFEDAVALTNLELFRKLSKPTGMVKKMHLATKMTTLNACCNAMYKALDGEKAKMALDLLYDVEPNELLVPEYISEGLVWLEGELETMSLEYTWAPEDQASEIMEEMIGE

SEQ ID NO: 66809 - protein, 619 aa, Vibrio crassostreae
MSKPNSLIGVDHEIYGYLNLDNPKSFLLFAGAGSGKTRSLVNVLQEIREKNLGRLIQNGQRVGVITYTNAACNEIQRRLSYDPLFHVSTIHSFVWEMIKPFTEDIKGWLRTKLSADIEELDLKISNARDINGKTAQQNIRKKEAKATRLDELRLVRKFSYSPTSNRIERGTVSHEEVIQITATLLNESPLLQNILTNRYPILLIDESQDTRKELMEAFIQTQSLNRSKFSLGLFGDLMQRIYGGGKHDLESSLPDDWKTPSKTINYRCPQRVVELINSIREEDDKKKQEPKAGASLGVVRLFIVDSDTAHKRDVEASIRAKMSAISEDSLWLEPNQIKALTLEHAMAAIRGNFDKFYLPLATVDSLRDSLLNGTNASLRFLCSSLLPLVDAIRVRDEFAIANIIKKYSGVISSTNADFCLDPISTLKNTDQSVEEIRAIVSELDPPLAQVLLLIKAYKLLYIPDELNALLVESSSLKNDDEEENLSKRSIAWNQALLAPISHLANYALYINEELGYGTHQGVKGLEFDRVMAIMDDNSANGFLFRYEKLFGAQELSQTDIRNQSEGKDSVLSRTRRLFYVICSRAEKSLAVVAYTKDPKAVKKKSLESGWFTQDEIEMM

SEQ ID NO: 66810 - protein, 706 aa, Vibrio crassostreae; identical to SEQ ID NO: 66806

SEQ ID NO: 66811 - protein, 582 aa, Vibrio crassostreae; identical to SEQ ID NO: 66807

SEQ ID NO: 66812 - protein, 706 aa, Vibrio crassostreae; identical to SEQ ID NO: 66806

SEQ ID NO: 66813 - protein, 582 aa, Vibrio crassostreae; identical to SEQ ID NO: 66807

SEQ ID NO: 66814 - protein, 706 aa, Vibrio crassostreae; identical to SEQ ID NO: 66806

SEQ ID NO: 66815 - protein, 582 aa, Vibrio crassostreae; identical to SEQ ID NO: 66807

SEQ ID NO: 66816 - protein, 706 aa, Vibrio crassostreae; identical to SEQ ID NO: 66806

SEQ ID NO: 66817 - protein, 582 aa, Vibrio crassostreae; identical to SEQ ID NO: 66807

SEQ ID NO: 66818 - protein, 565 aa, Vibrio sp. J2-31
MYIRKVTINNYRSFRTFEAKLQQLTVVIGENDTGKTNFFTALSLPLSGNLIDFNQKRLSVSDINKDSVIDFLTSVVNDDTEENQLKKIPKVSVTVEFADPKDAYETALLAKWIVADGNKETYKIRYDFKPKDDKDLLEVVKKSFAGKILDDINWFTLPVELYDYQVVSVNNEKPIAYSDLKHVSLHSINAERDDFSESSSMKSNSIFTKLLMNTLNDDDKGQINTAYSEFFSAIEKTETFDKVIRTNDDFENYDSIIKQLECTPNLPNLKNILSNITLKYGNEFLYQKGLGQRNLIYILILFAYYKSCGDTFNLCCIEEPEAHLSVNNLRLVRDFIEKSSSNSGSLVQTIISTHNPSIINKLKISNVLAFTGEKAISLSDTPTKLVDYLRKRPNFDILKLLFANKVILVEGPTEEMLISTYLSKQPALNDIDIIPIGQRGYATFLDIWLALNKDNQNKKIGVVRDYDNSDAAKAKHDAYDTAHANVTVRTTTNYTLEIDLVEAEDNLALLNDLFEMEGDLDAVSKHMINGKTARMLDVCDAMVDEENPLDIKLPAHIAEVIEAVS

SEQ ID NO: 66819 - protein, 458 aa, Vibrio sp. J2-31
MIEVQIAGAGAGKTYGLAKTLIEHIEACTSHKKTFALTYTNSATAKIEQEIIKQHGFIPSNLCIQTVHSFLLNEIIYPFSSFTLGDVYNDASIMMLPSDARFKNWHLKRLKDKNIIHAESVYNIAKQIVDETTSKHNNRAKKAKVRRLLAILGSCFDKIFIDEVQDLDKDALRFFEVLGSNDIDIYMIGDPKQAIKFPQDLDAFVQKLAQKKYATILPINNQTRRVPREILTVSNSFCYENQQQESLSEMVGELMYIESTDGRYDDLLTHYLDTKQLVCIDKKNGRYTTSSKHKHSFPREIEEMIRDSNHKKDKALFVKAAFSDFMDDAINEDNKKAISKLIARHSLALNKQHFAQLHELCNSCTKNDVQFKVQSIESIKGLDADVCVIILSPNTLKYLTQNGISKANRFNKEWKKIYVALTRAKKRLVLALDHDLLAKEDMAAVRDSIGELGFVTHN

SEQ ID NO: 66820 - protein, 706 aa, Brenneria goodwinii
MYINKLAIRNYKNFRSSNFYFVKDSVNTIIGENASGKTNLFNAMRLILDDSLPMNSRVLLDEDFYRGLNEPFGHWIIITLYFDDLSESEEEQVIANYTINNGNEEALKEGNYTFIYRPRYHIRQKLYELTIDNKNLDSRLEAFRELKSTCIISKETYEAVAFVRTKVDFNDDEVYKKVVGDFDKYIFSNPNEDDATVIGVKKPPYFALGSEVACTYVKALRNVVADLKYYKTNPLYKLLTLKSKQIDDRKDISENVKNINEQISAIPEIARLSNKISTSLLNTVGSTYSPKILVSSQLPEDFTELIQSLGLVVEDSLDYDGSGRIDDLSLGGANLIYLALKLYEYEEIRDAEEHITHFLLIEEPEAHIHNHIQKTLFDNFNFQNTQVFVSTHSTQISSVSKISSMNILARQRGYTDIYQPSNGLELKEISSIERYLDAIRSDVLFAKSVILVEGDAELIIIPELIKVTLGISLDELGISLIKLDGTVFKHISNLFHEDRLKRNCAILTDKDLAYVKEPDEIFDADFIKSLKNAEIDGLRRERELAEYVEDNDFVSVFYAENTFETELARHDENCDLFKNVIETTYKRSSDITRVVAGIESDDLRVRFRTALFFANKIGKGWLATQMVEHLSNECRVPDYILEAIHFALKDRDLNAVLNKMLTYNMSLMGSHWGGVCENINSEPDFDKKMEMYKNHFNDSFAKFWEL

SEQ ID NO: 66821 - protein, 583 aa, Brenneria goodwinii
MPYRNLTSEQLDAVRFDGNLLLTACPGSGKTKTLVSKLCFILENNELFDIGKKKIVALTYTNVAADTILERINSYGINSDSLWIGTIHSFCLNWIIKPNIDRIPRLCKGFNVIDEYEKEFILNDLKDRYNLSPYNKINTLLDFSFTPLYSRDTTEYSVVKAYHAYLHENRLIDFDLILNLTCNLLLKNDVLCERLSLIMRCILVDEYQDTSYIQYEILRLIVSKKNSLITFIGDKEQAIYTGLGAVVKNRKELFDYFNLEELEEMRLTGCFRSSQSIIDFYSKYKDDAYYINSLSELKTFPSVILKENSVDITQLSVYVSGIIRTHLEHGISPSEIAVLCPSWFDVIKLSNEIRSLNADIEIDGVMVSPIPKNNENFWLNLVKLALIKKNPSNYIVRQKLLRDLLKELNDLEPYTQFLSPKQIIKQINKIEFAMNYNCEIDVWINDLITKFCNSISLDINNESYAYKEMNCLIDATKKRMVKYNMSYKANDLHSFFNFKSGVKITTCHSTKGDEYDVIICTGLLNGKIPNWNDIIDCSSVHQNYVARRLLYVIGSRAKKHLYMISESGHKTQKGYPYQITPQL

SEQ ID NO: 66822 - protein, 679 aa, Proteus vulgaris
MLLKKAVISGYKSISTDHPQTIEFDEQLTVFIGHNGTGKSTALEALNKLFSTDHSLRGIIPSDFHLPDEMNPETPRNLMIEAWFSFADTEGNLSLPILINGLTATSSTEEIIFRVRLEASLSFDYNPLGDVDENIWIIDGDMNFPEEGNKHRLSAAQRNAIQINYIPANRDPLVQLKYSSKAVLGRLLKSIKWSDTEKLSFEQQAEALNLLALNNLALTEITQAINRNWQTIYKGRHLNQADLSFPVGNIDEILKLIQLQFMPDATRKKVDISRLSDGQKSLVYFSLMKALFDIDKATRELSDITVSNFDVERMKLPIFSLILLEEPENHLSPHYLGRILKLVKDYGATKYCQAVISTHSASLVGRIKPSQIRHFRLDNKNKCTSIQKLLLPKNDDEQFKYINEAIKAYPEIYFSKLVILGEGDSEQVIIPKLIEHLKKDIDGYSISVVPLGGRHVNHFWRLLNSLKIPFVTLLDFDIDRNGGGFGRLKYAIEQLCILGDTNNIYINNSIKEHIPDWDNDKNPVTFSLKYTDNQTKRIVDELEKCNVFFSSPLDIDYSMINSFPEIFCEKDIYYGERGPLEGKEDEEEKDIVEREKALIKAVLKKGHIGKRFNFGNDWERNFLWYRYRFLSNKSKPASHVRMFTKIENKYTSEQILEKLPVELKRMMGRVVYLLEQVIE

SEQ ID NO: 66823 - protein, 398 aa, Proteus vulgaris
MMNNWKPTDGIDETKELMDIITFDNSVAVLAGAGAGKTELLAQKANYLFSTNKCIWPKRILSLTFKTEAQINIKERINKRCGNKSNRFDSFTFHAFSKSIVDRFKSLLPEEKRPSDNYDIVFNKKHLSGNNKVLMSELLSLTISILKERDDIRKIFSYSYSYIFIDEFQDTTDEQYELLKILFKGSDAKILAVGDINQSIMLWAGARKTVFTDFLKDFNAKNKFLVKNYRASVEIQNVLELLLEFIKNKDNELKEISDIPQNCSLHLFNDEYKEARFIAKRISTLVKNGVEANKICVLTKQESSSYTRVLRDELTKLDITSLDMNELKDALKEPLGKIFSLFLTALISSNPKSMAELFLLVLSLNNIDDEIKENKIIISLQEFIFKKKGFNERNRYCR

SEQ ID NO: 66824 - protein, 671 aa, Longilinea arvoryzae
MYLQKIAIKNFRCFDETGIVFTFQPGVNIIIGENNSGKSSLIDALRIVFSLGIGKREIFVTTSDFHLDENGIYASEISFDLNFIDLNEDEQAGFYELLVVEGAVFTAQLHIRVKKESTKGFEKINTQIWGGEKQGQPVSYGTLEFINHYYLGALRDAESDLRPGKGSRIGKLVRKLIENDDEKEAILAHIKTANRKILNEPKVKQASTVINDHLLDIEGNRLKQNINLGLVLPDFGRVTDSLRALLPPNNNKTKAVLNQKTWQSMIAQNNSLEQILNGKITVVGNSVYISISELSEQEKENIGLEIYSEILEHTIYFELDQNGMGYNNLIYMGTVLGDLQELKKVETCSYNTLLIEEPESHLHPQLQNLVFDFFKRVCSNQNGGAAPNSVQVFVTSHSPTLVSRADIDNIQLINHNEEDKVIVTGLINCPLLPDQKDDLRRYLDTTKSQLFFSRGVIFVEGISEALLLPIFANRMNRRLDQNAIEVVNISGTAFEPFALLFNDPDENKRINIRSVIMTDDDRCTSKDDVNRITDEMSPEEILTKLPNGHISPRAERAQSLQNENLLVKMAYKTFEFELAQIDLNLPVLLSALDPIHPRKTAELRGLFAAIDDPSLKAIYFWQACKDTKAEFAQRLATILNKRNQQGNFVTQFTIPQYIIEVIEHVAVIETD

SEQ ID NO: 66825 - protein, 597 aa, Longilinea arvoryzae
MVILSPEQLPAVTRAGKFVVIACPGSGKTLTVSTRFMRRMKDWKRQSSGIATLSFTNVAHSEISGDLINDGFSPSPPFPHFLGTIDHFINTFIFLPFGHLVMGCSGRPNLIGMGSNVWNQKELNLYWGNQKCYSCKLENFSYDINGRLIGGLVNCPFDFTHCRILKNRFNRMGLATQSDAEYFTMRILERYPGIAKSLSTRFPEMIIDEAQDTSEIQMRIIDLLVMNGLSEVMLVGDPDQAIYEWRDARPDIFMRKTSQLEWQEPYYLDQNRRSSQLICNLTKNFSSSLRNISQAIGTDANFSLPPKLVTYDPNHLSTIKNDFINLCERQGLEIKPSEISVLVRTNRQLLKLRDIIDMGDPWNHAITRLLAQVAYYRDKGDIIRSHNSSEAALVRILFGDRYISKFDLENQIEARNLNPGWPLGIWQIMKLLPNSGDALRLWLINGTRKLHEWFDAHPSWREVDRGKLDLSIKQYQVMNRHKFTAYYDEPVSKLFSDPESVVDGITIETIHAAKGKTYEAVLYIVNDSTRGGAKGNITQITTNDLNNEEVRTAYVAMTRPRKILVIGVPIGTQENLLRNRFPDWMIDQLNIPLQDFG

SEQ ID NO: 66826 - protein, 624 aa, Tetrasphaera australiensis Ben110
MLVRQLEIENFRGVASGQVLFTRNTLLVGGNNVGKSTICESLDLALGPERLNRRPSVDEHDFFASKYLREDGEPVLIKIRVVLTELSDEALRRFGGHLRRWNDDTCTFIDEGVDGADHADDDNVVWALPILFRARYDPEEDDFEADTFFDHPLEDPADLDEEVAASLGAGRDRFTRTHKRLCGFVFLRTLRTGSRALGLQRGSLLDTVLRLSNEGAAEMWMDTLKQMRELDPAVGDVSDLAEMRKQIRERLGAFVNLAPGADATAFFASDLTREHLREVVRLFIATGPSNHPVPFTRQGTGSINLLVFALLTMIAQLKGNKTVVFAMEEPEIALPPHTQRRVIRFVRNEMGQTIVTSHSPYVIEQFDPEDIVMLGRESDGSLMGVPIDPAGVKLKSYRSQRRQFSEAILSRAVLVVEGQTEASIMPIVSSVLEASGNGYTHLDLAGVSIFTANGDGDVPRWGPIFRALGKTPFALYDQQTTPFGAEAQADLMAYEEHWESPANSIEDLLVTQVPVAVLRRFLDNVVERGDFPAHQASYDATKPEAELPTIAGKVLKARKGDAWGYAAMLVEHCQDRSELPAFLVDAFDRINELVAPPMIPEEAARVEGHEEGAQGDAAADPQPS

SEQ ID NO: 66827 - protein, 572 aa, Tetrasphaera australiensis Ben110
MTFRLSDEAARALEHEGSILVTGGPGSGKTTLALLKAKQLTPTLQPGQKILFLSFSRAAMRQVLTRTKDVLKYAERREIVVMTYHAFCLGLLKSHGRLLTGTAPRILFPGPERLTRAKHEGDWNHEVLRLATEEGRYAFSTFAGSSAVLLRRADSVRRLISDAYPIIILDEFQDTDDSQWALVQELAKGSLLITLADPDQRIFEYQDNIDPLRLHYFRQALKPAEFDLGGDNHRSPNAGILQFADAILKNESPTPSDDVKQVTYYASSRNGMVHAAVIWMLRRLRKQGIDVPTVAVLARSNPFVADVSIVLSTPNTFKNRELKPVDHHVVWDAELTAAAAQVVASILEWPLHDEVHGVAITLDAVAHFYDVKYAEKPSASAASSASAFRSAAEAVRGGRTPRIQAAKLLLALHVEDPGYNGDTAADWFVARRIIEAIPKLSEVATSARFVRLFRATDEIGGRLAAQWASTGTYTDARTIVRRTLEVGRVAANEQEATGVVLMTMHKSKGKEFDGVILVEGQYRGPFFNTRSEPWPYAASRRLLRVGITRARHRVMILRPNGALPLYQPQEMA

SEQ ID NO: 66828 - protein, 648 aa, Vibrio nigripulchritudo AM115
MYLSNLKAEGFRCFGKEFNIQLTDGLNVIVGENGAGKTAVISAIRQLFHDSESGRYSVTSDDFFSPFVAEGNSAASLSICAEFDGLDVKDKVAFLPWVGASDTALLNLQAENKEIRGRFKKVIWGGAAKNSQFDPELLDLVQCIYLPPLRDAESKLSNGRQSRLSKLLKALNRKQLKQCREDGELHPLEASLKNFNESLATDDKLSIKDANKLITDNLTKAIGHHFGQKTSIQFAESDFTKIAESLTLMFFPDLSVEDQSLFRDLSQNSLGYNNLLYIASIMAELTLDDEDEEQPLFKLLLIEEPEAHLHPQLQIRLLNHLKSVAKQNENVQVIVTTHSTVLASSVEFESIIHLSKSPTPVATPLRSCGLSEASSQFINRWLDVTKSNLLFSSGVILVEGIAEQMIIPALAKIVLKEQKEGHKNLEDLGISTINLNGIYFKHFMQLYCNVSKPDDTEGAAFVRSIPVRCSGITDRDPPKTIKKKIPDPEKDGEEKEVSEDFLPYEGNIHNGTNHAIDLVSSINKSTNSRLYVSKYKTLEYDLAMEGNNASLMSEIIASLWPEPTKRKGTVITEFTEMSKQDWTKKQPHEVAEAAHKILKKIDDDNIGKGLFAQVLTDRIQMDGYDFSVPEYIKKAIMWASSVDIEEEE

SEQ ID NO: 66829 - protein, 585 aa, Vibrio nigripulchritudo AM115
MEVEFTDEQLKYVDSSIEEHTFLEACPGSGKTEVVAAKLAKEVSSWKKRPGGLAALSFANSATDELTIRVSEYLPFGRSMFPHFLGTFDSFIYKNIVSPLSTELTKYVGEGGDSSIRIIEPTTHIGYRTEYSYAKRGNIYANRYSLDLKNNKLIFDSGDSVLDKTLGALTLTDWQVRDFIQTKDRMLKGGFATYRDIENLALEVLRNEKYQSFVKLLVRRYPLFIVDECQDLSEEQLLIFQSLADNGAKLHFVGDLHQAIYGFRDVDPAKVKDFVMDNNFTRLQLTRNFRSCQNIVSICAKLTGRGNIKGNMSRLNPRCLVLQYNNCPTELIETFEEKCNGFNNTVVVSRGHSTLNKFQTSVDKPTHIQNLTLAIKLYNPQDMERLNQSLLKFSEFLRFHLKETCKPNSFNCPQSITSNLSWRKFLNNSLSYMIDNGLQKVDVQWSSWAKDAKTLIRSLPKQSFCSEAITSILTPLESINLVSPSGSAKLEVASSLAVTNKPAFQFSKRTIHGAKGETHGATIVISSSRSGSGSHWKDWLKDPNSEAARFAYVASSRPKELLIWAVKTLKPLEREQLESVGFTIA

SEQ ID NO: 66830 - protein, 569 aa, Vibrio nigripulchritudo BLFn1; identical to SEQ ID NO: 65460

SEQ ID NO: 66831 - protein, 493 aa, Vibrio nigripulchritudo BLFn1; identical to SEQ ID NO: 65461

SEQ ID NO: 66832 - protein, 569 aa, Vibrio nigripulchritudo ENn2; identical to SEQ ID NO: 65460

SEQ ID NO: 66833 - protein, 493 aa, Vibrio nigripulchritudo ENn2; identical to SEQ ID NO: 65461

SEQ ID NO: 66834 - protein, 648 aa, Vibrio nigripulchritudo FTn2; identical to SEQ ID NO: 66828

SEQ ID NO: 66835 - protein, 585 aa, Vibrio nigripulchritudo FTn2; identical to SEQ ID NO: 66829

SEQ ID NO: 66836 - protein, 648 aa, Vibrio nigripulchritudo Pon4
MYLSNLKAEGFRCFGKEFNIQLTDGLNVIVGENGAGKTAVISAIRQLFHDSESGRYSVTSDDFFSPFVAEGNSAASLSICAEFDGLDVKDKVAFLPWVGASDTALLNLQAENKEIRGRFKKVIWGGAAKSSQFDPELLDLVQCIYLPPLRDAESKLSNGRQSRLSKLLKALNRKQLKQCREDGELHPLEASLKNFNESLATDDKLSIKDANKLITDNLTKAIGHHFGQKTSIQFAESDFTKIAESLTLMFFPDLSVEDQSLFRDLSQNSLGYNNLLYIASIMAELTLDDEDEEQPLFKLLLIEEPEAHLHPQLQIRLLNHLKSVAKQNENVQVIVTTHSTVLASSVEFESIIHLSKSPTPVATPLRSCGLSEASSQFINRWLDVTKSNLLFSSGVILVEGIAEQMIIPALAKIVLKEQKEGHKNLEDLGISTINLNGIYFKHFMQLYCNVSKPDDTEGAAFVRSIPVRCSGITDRDPPKTIKKKIPDPEKDGEEKEVSEDFLPYEGNIHNGTNHAIDLVSSINKSTNSRLYVSKYKTLEYDLAMEGNNASLMSEIIASLWPEPTKRKGTVITEFTEMSKQDWTKKQPHEVAEAAHKILKKIDDDNIGKGLFAQVLTDRIQMDGYDFSVPEYIKKAIMWASSVDIEEEE

SEQ ID NO: 66837 - protein, 585 aa, Vibrio nigripulchritudo Pon4; identical to SEQ ID NO: 66829

SEQ ID NO: 66838 - protein, 569 aa, Vibrio nigripulchritudo SFn27; identical to SEQ ID NO: 65460

SEQ ID NO: 66839 - protein, 491 aa, Vibrio nigripulchritudo SFn27
MIEVQIAGAGAGKTYGLAKKIIAHYDLKSHKKIFAITYTNSAAKNISQAIIKHLGYLPENIMVCTVHTFLLNEIIYPYSPFVLNEKHTTSSRCKTFSNFPPGKTEEQKKRETASTISRLKKSGVIHVDETYAAAWRVVDENYSKHSSQKKKSKVRKVHNILSSAIDKIFLDEAQDLDETALKAFQKIGELSVDIYMVGDPKQAIDYPKSFKGWLAANKANEKVKVLPNIKTSRRVPQRILDISNNFCPRGQAQTSLSEVEGHLTYITSEDEHYDQILCHHIKNGSLVSIFRKEGNYSTKKAGSLPEFDPEVEGLLTVKFPEYEEGVVIYSLQRYFASLLSNNDNKTSIRIFLNKLEIPYEKELFKKLCRSAEQYDSSKDNSAKYAISSIQITKGLESKVCVLILTPAIFKYLMQDGVEKFNKTWNMVYVALTRAQSELVVAVDMDLLGKKYKHDDIVEGLKSIGFEELNPNHPNHKTEEKFGSIISTKDNY

SEQ ID NO: 66840 - protein, 569 aa, Vibrio nigripulchritudo SFn135; identical to SEQ ID NO: 65460

SEQ ID NO: 66841 - protein, 491 aa, Vibrio nigripulchritudo SFn135; identical to SEQ ID NO: 66839

SEQ ID NO: 66842 - protein, 597 aa, Sinorhizobium meliloti RU11/001; identical to SEQ ID NO: 63218

SEQ ID NO: 66843 - protein, 607 aa, Sinorhizobium meliloti RU11/001; identical to SEQ ID NO: 63219

SEQ ID NO: 66844 - protein, 637 aa, Sinorhizobium meliloti RU11/001
MQIKRIKISNFRSIQRADIELGPVTVLIGTNNAGKSAILEAIRIALTRRWGQRGTGFTEYDVHLCDGRPDPKVGDPVVIEVELQEGVANEWPEDLQGELEDIIQLDPVSGKASIIMRVSCSWDAAEESFVPRWEFLNVDRNPLAGRGARAVNLQEFFQFLPVFYLEALRDVSDEFSSRSQFWGKLLRTVQIPETIEQKSKRIFDLLNRRLLDADPLLANLATGLSHISRVAAADVPGQADLRLLPLNTWDILSKAEVIYQTEGGKPWLPLARHGQGVQSLSVMFLFKAFVELILSDLYRPESSAVLALEEPETHLHPQAARSLWRHISELPGQKIVTTHSPYFLQHVPFRDIRVVRVEANGTTVSSLPREFRAAVPYIPALEPIIAASGGLITYDRGLNELVLSGILPQNQYQQLILAYGGRPDTVALHAALRQVCDASKEFVSDAELDQLETFARRIRGEIFFARRWLLVEGQSDYHLVHGIAKGLDYDLDENGVSVIDFQNCGNPEIFAVLARALHYPWLIVVDGDAAGQGYLAKIASRSFSQQEMERRAFSLPAGYLEQQLVADGLQAELKAILVSLGNAAAANLDDAALITTLKKDKSGYAAVLAKQCAENPALAQRMPAPFRNAILSLRGLT

SEQ ID NO: 66845 - protein, 638 aa, Sinorhizobium meliloti RU11/001
MTESALSVALSELTDAQAVAVEWRDGPMFVLAGPGSGKTRVLTTRVAKLLADTPDRSFRVLALTFTNKAADEMSARVTALVPEQERRALIGTFHSFCMQMLQQHGSHIGINPDFAIYSLDVDRQEILRDAIKRAGLDADDIRLLSTIDKLKSQLVQPKGSARHFRNPSDGARVEQVYAAYEAALTQANALDFGSLIAQAHRLVTSFPGIAARYRKTYAYWMFDEFQDTTDGQYELIRALAGNEFTNIFAVADDDQIIYQWNGASYQQIQRFRTDFSPQELQLPTNYRCPPAIVAAANHLVVHNVQRTAAKRPLEAGKTSLRYPNEQHIRVLRYSTDEVEAASIADGISKMDRSRWGEVAVLARTRYLLEKLQAALTQKQVAAVISQRRDDFRSPQFLWLAAVLRQALRPLDRRALEILTGAFNRWFGTDTRADLIITASELTERSFLDEWTVAVKAASGPNPNAAELADLAAKFGKEPTRFKPFIEAVLAKIPAQDDESSDIAEDRAAWFDLARNISKTIGRHAPLEQFLQELAIRSKEAPVGNNTVTLMTIHGAKGKEFDHVYVVGLAEDILPSFQSLKAGENSAEMEEERRNCFVAITRAREWLCLSYADSYRGWAKQPSRFLREMGFILPDQPMQ

SEQ ID NO: 66846 - protein, 548 aa, Afipia felis
MRLSKLSIRNFRNFRSVDVPLSGDVVLLGENRVGKSNLLFAIRLILDPTLPDSARQLKLSDFWDGAPPDFSEAIEVHLEISDFTSDLGLLALLTDFRTALDPTIARLSYVFRKKADVTGVPQSSEDCEFIVFGGGDEARPVPAKVRRRIAIDVLDALRDAEGQLGSWRSSPLRHLLEEAIAGIGRADLDAVAAELDKATKTLEGFATVKALEDELRAGILHLSGKAHDIDARLRFAPSDPLRLFRAIAMFIDGGKRGIAEASLGSANVALLALKLAEFTWRRKKNERNFSLLCIEEPEAHLHPQLQRSVFKKLLGGGDAAQALIVTSHSPTLAAVTPLRSIIRLKMQEGSTQAYSLANLPVTSDELDDVETYLDATRAELLFARGVIFVEGDAEEALVPVFSSAAGHNLDDLGITVCNVAGTNFGPYVKHAEALGMPYAVITDWDPLDGTKPPLGRKRTIDLWAAMLQVRGKPPLTPAQHMEWNVKPYPEFATTAAGSGIFLNDQTFEVSVANTPALLVPLLDILGDQGFGSIRTKRIANWRAGAAPG

SEQ ID NO: 66847 - protein, 629 aa, Afipia felis
MVADIGKGRLSAKLSKKRPSALVRQNTFPTRSRSWWAVSSSLPLLRAIDELSANPEQLAAVRETGHCVVLAGPGSGKTKTLTTAMARALAEDVVDPRGVACITYNNECAIELETRLARLGVAAGDRAFIGTVHGFALSQVIAPYARCVAVELPADFRVATRTESRAAVEIAYAAVIGGSDDPHRRWGFASEKRRRDVDRTQPAWQGRNPELAAFVEAYESELRKQGLIDFDDMPLLAYRMIKEHTWIREALRARFPVLFVDEYQDLGHALHELVLLLCFGGGIRLFAVGDADQSIYGFTGANPELLESLTRRGDVRTIRLRFNYRSGRRIVRASLGALGEERDYREVAGAPEGELTFWSVPLGLDMQAQAVAATVIPKLVEKGIALDEVAVLYRAAYLGDKIALALKRAGIPYVRTDGNAIVRRSSRLARLIEDCARWVEGGWRNAEPRFGRLLDQGVALVYGRHATEEEEQRLSDRLMGFLQATIGFDGSTHEWLQRFDHELIAGWRTTSRNAEQEWDVCRKMITNTDPAADLDIPLPHFAGRVEGTGRVSLSTLHSAKGREFDAVVMYGVNAGDFPSDRDKRSATGLREARRLFYVGVTRPRKELSLIFQEHHHSPWVKELFDRSQA

SEQ ID NO: 66848 - protein, 710 aa, Yersinia similis; identical to SEQ ID NO: 65078

SEQ ID NO: 66849 - protein, 598 aa, Yersinia similis; identical to SEQ ID NO: 65079

SEQ ID NO: 66850 - protein, 643 aa, Pseudomonas putida
MKLCSLRISGFQSFGQDITDITFDGVTYLLGPNGAGKTATLQALARMFGFEPGLRRLRRSDFHVPLNEQEVPAQRSLWIEADFTFDETLDDAEDDTVPPFFTQMTLQTADGVPRIRYRLEGILHPDGEVEERLHYVTRMDEHGQPTTLKPVAKRERDEIHVHYLPARRDPADHIAFGASALLGRLLRAVNWSDDRDSIKQLTEQITECLSENESIKTLSAGLSGAWQRLHKGDFFANPSLTFANSEIEAILRHLSISFTPGHGESNVDYARLSDGQKSMLYLSLVLTSLTIGREVRSGQNTSFDPLKLKPAAYTILAVEEPENSLSPHYLGRIVSSLKSSVGVDAQALIATQAPSMLRRVEPDQIRYLRLNSKRETDVSTIVLPDKHSDAYKFVREAVQAFPELYFARLVVLGEGDSEEIVLPRILQAKGAPVDEYAVAIAPLGGRHVNHFWRLLNALGTPHMTLLDLDVGRHQGGWGRVNYVRTQLDVFDPTRSIPDHWTRHSWDDAERPIRTHHWFDNGNETQSSLFQELESRDVFFSDPLDLDFAMLKAFPDAFGAELSAPTPHDHVTVLGKSHFNPGQYNAEEQQLFAAYHKLFKLSSKPAAHLDALGNLTDTELLASLPPSLNRLADRVKAKLEESPE

SEQ ID NO: 66851 - protein, 552 aa, Pseudomonas putida; identical to SEQ ID NO: 62489

SEQ ID NO: 66852 - protein, 638 aa, Acinetobacter baumannii; identical to SEQ ID NO: 65068

SEQ ID NO: 66853 - protein, 587 aa, Acinetobacter baumannii; identical to SEQ ID NO: 64057

SEQ ID NO: 66854 - protein, 565 aa, Acinetobacter baumannii; identical to SEQ ID NO: 66066

SEQ ID NO: 66855 - protein, 541 aa, Acinetobacter baumannii; identical to SEQ ID NO: 66067

SEQ ID NO: 66856 - protein, 565 aa, Acinetobacter baumannii
MKISSVSLKGFRNFKDSIIKFNGDTLIIGANDVGKSNLLHALRLLLDKTLSDSDIEPTELDFYISPCEAMNILEITICFEDIQEDAVLSILKGNVSSEAKTFLRYQAVKNNLSYQILIGPSLENLELINSRFYLKYVNLKYIQSQRDLQRFIQKEKRKLLKLSQSNLTESQREEDTDLLNEIGFDLKEINEKITQLYYVDHATKEVNEELKKLAYHHSEYSVQLDSGAIQVSDFIDNLQLGANVHGSNILLGGDGRNNQILLALWKAKSIAEHDINHEVVFYAVEEPEAHLHPHQQRKLANYLIEELPGQAIISSHSPHIASHFLPDSIIRLLVKNYSTVAASGGCSDCISECWDEMGYRISIIPAESFFSNGVFLVEGPSEVLLYTALAKALEIDLDYYNISILSVDGIAFEVYTNILNALEIPWVMRTDNDVSKVPRKNEWQYAGINRCLRAIGLAEWPHSTISINHIDVINDKRWNSFHASIRDKGVFISNVDLETDLINSLEASILPILDKDNKQDAIKFMQQKKAIRMSNLLKQIKEKLIDLENDNLTEPLKYLKSLIIG

SEQ ID NO: 66857 - protein, 541 aa, Acinetobacter baumannii; identical to SEQ ID NO: 66067

SEQ ID NO: 66858 - protein, 652 aa, Clostridium sp. 1_1_41A1FAA; identical to SEQ ID NO: 64336

SEQ ID NO: 66859 - protein, 444 aa, Clostridium sp. 1_1_41A1FAA
MKNSKKSQEILEKLLDDNEKRLDDLKKLKCKFFKKGFYLYEDIEFLVYILLLKNRDIAKFIANRFPIILIDECQDLSYIQLKIIGLLNKQGCKIHLIGDLNQSIYKFRNIDPQDTLNFINKLDFKQMNLNQNYRSCQEIVDISQVIINEDDDVQAISKKVVEKPLLAILYEKDKEIDVYNKFKDLIRDNGLDLNKSRIIVRNNTLKYKLLGLKKQEGNNNRLETLARAMYMWKNVNNISEFRMTFNLFAKSVQSIYFSGIEHKGEKFFYKPCELDMDEWKGLVNKIKQRLLLYDNLLDFSLTWEKWKKELKKIIDDDINSISELENREYDLGRIRSGNKNKTLEEILSDKESNIIDCKIETIHSCKGMSLDSVLFMSSYKKSNNQDSGTFWREWFDLEYIGEKNRLAYVAFSRARHLLVLGIPKSSKFTDKDKETLINFGFKVI

SEQ ID NO: 66860 - protein, 685 aa, Clostridium bolteae WAL-14578; identical to SEQ ID NO: 62832

SEQ ID NO: 66861 - protein, 635 aa, Clostridium bolteae WAL-14578; identical to SEQ ID NO: 64113

SEQ ID NO: 66862 - protein, 649 aa, Sphingobium yanoikuyae; identical to SEQ ID NO: 65632

SEQ ID NO: 66863 - protein, 549 aa, Sphingobium yanoikuyae; identical to SEQ ID NO: 65633

SEQ ID NO: 66864 - protein, 607 aa, Salmonella enterica subsp. enterica serovar Typhi
MNILIDKVRISGFRGISNIEITLPRVTVLLGQNNAGKTSVIKAMQLAMGDYSRYLSDEDFHIGEDEKRQEAITVDLRFIAVDGETRIKEFSENWQQVFGEKIQSEPDGSQFVCIRTTAKPDRVKGGYVVERFHLDIWPERMNWQDARVNNKNRLGKRLEFVPFIPIDAQRDIHSELKEKSSFVGRVLSSVEYDDKDVAELERMVAEINKEAIEKSEPLKRLKNHLDNLNQSFEGSGQTELTPFPKKIRDLSKRFSVNFGESDKSSFSMEYHGMGTRSWASMLTVKAFTELLVKNHEEEAEPFFPIMAAEEPEAHLHPNAQRTLYRQLVDAPGQVIISTHSPYIAGLAELHEIRFLSKQGNSVCVYQLRDKFDGDDLRKLRREVVHSRGELLFSKAIVLSEGETEEQALPELFEAYTGKHPFSLGINFVGVNGSGAKYRPFLILAKDFNIPVFIFSDGEEQTVKDLKKNYEKVFGVTDIMNAANITILEGTDFEGYLLSQGFDQLIEKTIHEIDGDDAIDKWIEKKNGTSLKRIRTDKPNCGTCNQPIFEDVLRNYIGDDGRVRAILEILDSSKPLYAKAITDNLIKLPKEKFPQKIIELFKQIESGV

SEQ ID NO: 66865 - protein, 630 aa, Salmonella enterica subsp. enterica serovar Typhi; identical to SEQ ID NO: 62591

SEQ ID NO: 66866 - protein, 607 aa, Salmonella enterica subsp. enterica serovar Typhi; identical to SEQ ID NO: 62590

SEQ ID NO: 66867 - protein, 630 aa, Salmonella enterica subsp. enterica serovar Typhi; identical to SEQ ID NO: 62591

SEQ ID NO: 66868 - protein, 607 aa, Salmonella enterica subsp. enterica serovar Typhi; identical to SEQ ID NO: 66864

SEQ ID NO: 66869 - protein, 630 aa, Salmonella enterica subsp. enterica serovar Typhi; identical to SEQ ID NO: 62591

SEQ ID NO: 66870 - protein, 585 aa, Streptococcus pneumoniae
MEFKKLVIENFRNFSSIEVALSNKNVIFGMNDSGKTNLLFAIRYLLDRTIRNKGFIKSDYHRHDTSRPIKIQLELDLSDRKMEGDEESLKSSHSRLLISTVAGARNNSSLDTFFISLEAVYNEKELFGNPVLSWGSTLDNLVEVPQYGTRSDIDKIFQIVYVNPAIELDSFFKRNRRILFSDDSKTDEDVKLEEEIENNIEKLNENISNLHLITSVQSQLTEAYKSYRKENLEIKIRSEISISGYLDNLTPYINWNDDTHNYPTSGDGRKKLLSYAINHLISEKQYNKKVIIYLIEEPENSLHRSVQISLSKQLFVQNIYEYFFLTTHSAEVLYEMDNTQLIKITNQQDATGQSVYYTVPNEFSNLKKKLNKSLAQSIFYDRILLVEGPSEYYLFSAIFEYVSPNFEADGKYLLQVDGINFKPYSELYKALGIDFWIKTDNDLKASRGDKHVFSPIGLNRCIDLLDHSATPILDNYRIDFSSKDERKQNIKSKKEELYLTNHNLVLQLNADGIFISEIDLENDLAQVLSDSERNEMSKLDFVNWLQSSKQYNMLEYISNHLTKEIALKIVESGYFKVLAEFLDYE

SEQ ID NO: 66871 - protein, 512 aa, Streptococcus pneumoniae; identical to SEQ ID NO: 62977

SEQ ID NO: 66872 - protein, 689 aa, Streptococcus pneumoniae; identical to SEQ ID NO: 62612

SEQ ID NO: 66873 - protein, 605 aa, Streptococcus pneumoniae; identical to SEQ ID NO: 62783

SEQ ID NO: 66874 - protein, 689 aa, Streptococcus pneumoniae; identical to SEQ ID NO: 62612

SEQ ID NO: 66875 - protein, 605 aa, Streptococcus pneumoniae; identical to SEQ ID NO: 62613

SEQ ID NO: 66876 - protein, 689 aa, Streptococcus pneumoniae; identical to SEQ ID NO: 62612

SEQ ID NO: 66877 - protein, 605 aa, Streptococcus pneumoniae; identical to SEQ ID NO: 62783

SEQ ID NO: 66878 - protein, 695 aa, Streptococcus pneumoniae; identical to SEQ ID NO: 64780

SEQ ID NO: 66879 - protein, 605 aa, Streptococcus pneumoniae
MVKSDDWLPKGDIILENAALEAVKNVNNCLVIAGPGAGKTELLAQKLDYLFSTNECISPKKILALSFKTDAAANMKNRVKKRYGDEYASRFTSLTYSAFEKMILDQYINALPEEIRPDRDYLVDDWDVIKATLIKNGINVNGRRMSDIRKSVEKTVLNDEANLKFKKDLLKGTRNNKAVLLYKQITKLATYIIYTNKYIRKALQMTYEFVFLDEFQDTTYDQYNLLKTCFLGSTCKLTAVGDNKQAIMRWAGANPDIFQDYKLDFKANEYQLLMNHRSVPKLIEFQKEVHQILNSNHSSIQSNYYPEFQEGEITLFEFENESLESKLIANDIESKIQGGIRPSEICILAKQKVDDYSSKLIITLSSKGIKARIENEYQELLKDPTCNLLLDLISCSQGKRDPLIWENISNFYGNINGIDELTDELILAKSYKEIDNIVSDITYLISNVIPDKDRMLNLINCIIEKIDEKRIISNFSTYNRKSDLDIIVKNFSKLLYKEYSQTQGEWLDTVSSFKGENSIPIMTIHKSKGLEYEVVYFLGLEDSAFWSFNDQPEEDKSAFFVALSRAKSHLIFTYCKLRNNSPQNNRNINEIYSLLTQSNLVDVIN

SEQ ID NO: 66880 - protein, 695 aa, Streptococcus pneumoniae; identical to SEQ ID NO: 64780

SEQ ID NO: 66881 - protein, 605 aa, Streptococcus pneumoniae; identical to SEQ ID NO: 66879

SEQ ID NO: 66882 - protein, 695 aa, Streptococcus pneumoniae; identical to SEQ ID NO: 64780

SEQ ID NO: 66883 - protein, 605 aa, Streptococcus pneumoniae; identical to SEQ ID NO: 64781

SEQ ID NO: 66884 - protein, 699 aa, Streptococcus pneumoniae; identical to SEQ ID NO: 64132

SEQ ID NO: 66885 - protein, 605 aa, Streptococcus pneumoniae; identical to SEQ ID NO: 64133

SEQ ID NO: 66886 - protein, 699 aa, Streptococcus pneumoniae; identical to SEQ ID NO: 64132

SEQ ID NO: 66887 - protein, 605 aa, Streptococcus pneumoniae; identical to SEQ ID NO: 64133

SEQ ID NO: 66888 - protein, 585 aa, Streptococcus pneumoniae; identical to SEQ ID NO: 62976

SEQ ID NO: 66889 - protein, 512 aa, Streptococcus pneumoniae; identical to SEQ ID NO: 62977

SEQ ID NO: 66890 - protein, 641 aa, Salmonella enterica; identical to SEQ ID NO: 62984
  subsp. enterica serovar Typhimurium str. DT104

SEQ ID NO: 66891 - protein, 553 aa, Salmonella enterica; identical to SEQ ID NO: 62985
  subsp. enterica serovar Typhimurium str. DT104

SEQ ID NO: 66892 - protein, 689 aa, Streptococcus pneumoniae; identical to SEQ ID NO: 62612

SEQ ID NO: 66893 - protein, 605 aa, Streptococcus pneumoniae; identical to SEQ ID NO: 62783

SEQ ID NO: 66894 - protein, 699 aa, Streptococcus pneumoniae; identical to SEQ ID NO: 64132

SEQ ID NO: 66895 - protein, 605 aa, Streptococcus pneumoniae; identical to SEQ ID NO: 64133

SEQ ID NO: 66896 - protein, 689 aa, Streptococcus pneumoniae; identical to SEQ ID NO: 62612

SEQ ID NO: 66897 - protein, 605 aa, Streptococcus pneumoniae; identical to SEQ ID NO: 62613

SEQ ID NO: 66898 - protein, 695 aa, Streptococcus pneumoniae; identical to SEQ ID NO: 64780

SEQ ID NO: 66899 - protein, 605 aa, Streptococcus pneumoniae; identical to SEQ ID NO: 64781

SEQ ID NO: 66900 - protein, 699 aa, Streptococcus pneumoniae; identical to SEQ ID NO: 64132

SEQ ID NO: 66901 - protein, 605 aa, Streptococcus pneumoniae; identical to SEQ ID NO: 64133

SEQ ID NO: 66902 - protein, 689 aa, Streptococcus pneumoniae; identical to SEQ ID NO: 62612

SEQ ID NO: 66903 - protein, 605 aa, Streptococcus pneumoniae; identical to SEQ ID NO: 62613

SEQ ID NO: 66904 - protein, 624 aa, Yersinia kristensenii
MYLAELTIKNFRKLREATLKFQPGLNVLVGPNNVGKSAAIDALRTLLAGHDENYPRLDGSDRHRPHEGDPTGDINFHFVFRDLSLEDEADFIAALKPNGDKTMEAHIHVQYTDMDKTGRFKVRRWCGDHPEVSLTSDIMENLRGVYLQPLRDAAQGLRPNRNSQLARLLHLLTDDAGRDTINTALKQLDETLKQDKSIQSTHKAISTRHDSMMGAQLAQELAVGLSVTDFQRLSSRLTLTAEAMEIEKNGLGFNNLIFMAVVLSELAKNTDSAFRSLIIEEPEAHLHPQLQRVLLQYLAGIPTGEGEKPVQLFVTSHSPNFASNSKLDSLVCLIENEVGVETFFPRDIKFEKGKREKLERYLDVTRAELFFARRVIFVEGAAELMLIDALAKKMNFDLREYGVSLISVEGLNFDSFLPLFGEQGLRIPVAVVTDADPFEEEEVEAVAEDEQAEEEIDDLLSEAAYQEETDAPDDEELAGNAEKKKKVKRKEVYPALGDQVRLSANTIKMKNLEDDFVKVFHGLKTLEYDLALIEANRDPMLTALADPHPKISKALRNIVDAQPDNTAKTKALFCGMFERKGNGNIQKGRFAQALAEQISKENGFEVPEYLKKAIQHVCQGVVKP

SEQ ID NO: 66905 - protein, 575 aa, Yersinia kristensenii
MKPSKEQIDIIEAPLGPIAVTACAGSGKTATAIRRLIAIRQKMQNSRGRVVLLSFSNVAVNTFNAGYAELAAGLPDDANRRRVEVDTLDGFFTKHVLRPHAYRTMTAPQAAYLVSGLEPFLARFKYWREGHPPLPLKDIKISILDGDFVFYSDVRNDLEILDKGKVLKIIHDLGRLGAYTHEIGRYWVYRTLDSQPAVVRALAARYPQILVDESQDLGTLHEEILKLLIAAGVQVTLIGDVNQGIYGFAGADGEFLNSYEERAEVTGYKLTRNYRSLPPIINIANLLSGRQDEPYRLGEQGGAYFIGYKDSELPKLIDAFKARIDELGMQHQDAVLLCRGADRAAVIAGRTAPPGQGMVKVLAEASLLRDQHSNYHGCFNLVCRAILSLLEDIPHGLSSRLQGVSHDAEMKGLKRLLWCFSRNADLGLPSSALVAKTDWHSKLLTNVKVLLAEIEKHYGYKVAGNVGTKLTKKLLPDQTLTSAVSAQGHGLRVETVHQVKGESIGAVMYVAKKSNIKALLSGTGDEEGRIGYVAITRAKNLFWLAVPQSCLKELKEDLIKAGFQEWIKLAVIDPA

SEQ ID NO: 66906 - protein, 689 aa, Streptococcus pneumoniae; identical to SEQ ID NO: 62612

SEQ ID NO: 66907 - protein, 605 aa, Streptococcus pneumoniae; identical to SEQ ID NO: 62783

SEQ ID NO: 66908 - protein, 689 aa, Streptococcus pneumoniae; identical to SEQ ID NO: 62612

SEQ ID NO: 66909 - protein, 605 aa, Streptococcus pneumoniae; identical to SEQ ID NO: 62613

SEQ ID NO: 66910 - protein, 689 aa, Streptococcus pneumoniae; identical to SEQ ID NO: 62612

SEQ ID NO: 66911 - protein, 605 aa, Streptococcus pneumoniae; identical to SEQ ID NO: 62783

SEQ ID NO: 66912 - protein, 695 aa, Streptococcus pneumoniae; identical to SEQ ID NO: 64780

SEQ ID NO: 66913 - protein, 605 aa, Streptococcus pneumoniae; identical to SEQ ID NO: 64781

SEQ ID NO: 66914 - protein, 695 aa, Streptococcus pneumoniae; identical to SEQ ID NO: 64780

SEQ ID NO: 66915 - protein, 605 aa, Streptococcus pneumoniae; identical to SEQ ID NO: 64781

SEQ ID NO: 66916 - protein, 699 aa, Streptococcus pneumoniae; identical to SEQ ID NO: 64132

SEQ ID NO: 66917 - protein, 605 aa, Streptococcus pneumoniae; identical to SEQ ID NO: 64133

SEQ ID NO: 66918 - protein, 695 aa, Streptococcus pneumoniae; identical to SEQ ID NO: 64780

SEQ ID NO: 66919 - protein, 605 aa, Streptococcus pneumoniae; identical to SEQ ID NO: 64781

SEQ ID NO: 66920 - protein, 729 aa, Staphylococcus aureus; identical to SEQ ID NO: 62500

SEQ ID NO: 66921 - protein, 597 aa, Staphylococcus aureus; identical to SEQ ID NO: 66639

SEQ ID NO: 66922 - protein, 699 aa, Streptococcus pneumoniae; identical to SEQ ID NO: 64132

SEQ ID NO: 66923 - protein, 605 aa, Streptococcus pneumoniae; identical to SEQ ID NO: 64133

SEQ ID NO: 66924 - protein, 699 aa, Streptococcus pneumoniae; identical to SEQ ID NO: 64132

SEQ ID NO: 66925 - protein, 605 aa, Streptococcus pneumoniae; identical to SEQ ID NO: 64133

SEQ ID NO: 66926 - protein, 689 aa, Streptococcus pneumoniae; identical to SEQ ID NO: 62612

SEQ ID NO: 66927 - protein, 605 aa, Streptococcus pneumoniae; identical to SEQ ID NO: 62783

SEQ ID NO: 66928 - protein, 689 aa, Streptococcus pneumoniae; identical to SEQ ID NO: 62612

SEQ ID NO: 66929 - protein, 605 aa, Streptococcus pneumoniae; identical to SEQ ID NO: 62613

SEQ ID NO: 66930 - protein, 689 aa, Streptococcus pneumoniae; identical to SEQ ID NO: 62612

SEQ ID NO: 66931 - protein, 605 aa, Streptococcus pneumoniae; identical to SEQ ID NO: 62783

SEQ ID NO: 66932 - protein, 607 aa, Salmonella enterica subsp. enterica serovar Typhi
MNILIDKVRISGFRGISNVEITLPRVTVLLGQNNAGKTSVIKAMQLAMGDYSRYLSDEDFHIGEDEKRREVITVDLRFIAVDGESRTKEFSENWQQVFGDKIQSEPDGNQFVCIRTIAKPDRVKGGYVVERFHLDIWPERTNWQDARVNSKNRLGKRLEFVPFIPIDAQRDIHSELKEKSSFVGRVLSSVEYDDKDVAALERMVAEINKEAIEKSEPLKRLKNHLDNLNQSFEGSGQTELTPFPKKIRDLSKRFSVNFGESDKSSFSMEYHGMGTRSWASMLTVKAFTELLVKNHEEEAEPFFPIMAAEEPEAHLHPNAQRTLYRQLVDAPGQVIISTHSPYIAGLAELHEIRFISKQGHSVCVYQLRDEFDGDDLRKLGREVVHSRGELLFSKAIILSEGETEEQALPELFESYTGKHPFSLGINFVGVNGSGAKYRPFLILAKDFNIPVFIFSDGEDKTVKELKKNYEKVFGVTDIMNAANITILEGTDFEGYLLSQGFEQLIEKTILEIDGDGAIDKWIEKKNGTSLKRIRTDKPNCGTCNQPIFEDVLRDYIGDDGRARAILEILDSRKPLYAKAITDNLIKLPKEKFPQKIVELFKKIESGV

SEQ ID NO: 66933 - protein, 630 aa, Salmonella enterica subsp. enterica serovar Typhi
MNLSNAQRQIVEAPMDIAIQVLASAGSGKTRVLTERVRYILNNTKRDAVIALTFTNKAAEEMSTRLSDFDPDEDRAWIATIHSVAQHILEKYGHTVGLPSDLYIYDRDKDRMEVFMQSLREDGIDIDEYLSIADSKELKNRERNLQSYMDIFSKIKRELLTEFDVSELYPNNNIWKIYKDYQASLLNSGGIDYDDILVYAHRILLTHDWIAKIYRSKYKHICVDEAQDLNKAQYEFIKVLCGDVIKSILMVGDPNQMIYGFNGSSKDYFCENFINDFYPNQFELKENYRSTKAIIRAANKLRPGSQAEIDYALEGGVRISEFASEEDEAEMVVATIKHLLELKVHDEIEGNISLNNMVVISRNRFVFGKLENCLKNNSIPYSLRKGERALEPSTRFGKVLDYAIRLKLNSKDWVDGKKLCQVLGISEPAGWTPDVLRELAAQISSSTDDYSVVFEKLLTTIDSLNIENPKIPKLIKEFNDLLTSLVENHNGISDDKIEDVKLSIEELKEFSGMWTRFKRKGLGDSLVAFRNALALGQLAESSMDEGLTLSTVHTMKGLEKDIVFLIGMCEGVFPDYRARTTKELEEERNNAFVAVTRAKRWLYVSYPKQRMMPWGDLRFQRKSRFVSEIE

SEQ ID NO: 66934 - protein, 695 aa, Streptococcus pneumoniae; identical to SEQ ID NO: 64780

SEQ ID NO: 66935 - protein, 605 aa, Streptococcus pneumoniae; identical to SEQ ID NO: 64781

SEQ ID NO: 66936 - protein, 695 aa, Streptococcus pneumoniae; identical to SEQ ID NO: 64780

SEQ ID NO: 66937 - protein, 605 aa, Streptococcus pneumoniae; identical to SEQ ID NO: 66879

SEQ ID NO: 66938 - protein, 695 aa, Streptococcus pneumoniae; identical to SEQ ID NO: 64780

SEQ ID NO: 66939 - protein, 605 aa, Streptococcus pneumoniae; identical to SEQ ID NO: 64781

SEQ ID NO: 66940 - protein, 689 aa, Streptococcus pneumoniae; identical to SEQ ID NO: 62612

SEQ ID NO: 66941 - protein, 605 aa, Streptococcus pneumoniae; identical to SEQ ID NO: 62613

SEQ ID NO: 66942 - protein, 585 aa, Streptococcus pneumoniae; identical to SEQ ID NO: 62976

SEQ ID NO: 66943 - protein, 512 aa, Streptococcus pneumoniae; identical to SEQ ID NO: 62977

SEQ ID NO: 66944 - protein, 689 aa, Streptococcus pneumoniae; identical to SEQ ID NO: 62612

SEQ ID NO: 66945 - protein, 605 aa, Streptococcus pneumoniae; identical to SEQ ID NO: 62783

SEQ ID NO: 66946 - protein, 699 aa, Streptococcus pneumoniae; identical to SEQ ID NO: 64132

SEQ ID NO: 66947 - protein, 605 aa, Streptococcus pneumoniae; identical to SEQ ID NO: 64133

SEQ ID NO: 66948 - protein, 695 aa, Streptococcus pneumoniae; identical to SEQ ID NO: 64780

SEQ ID NO: 66949 - protein, 605 aa, Streptococcus pneumoniae; identical to SEQ ID NO: 64781

SEQ ID NO: 66950 - protein, 699 aa, Streptococcus pneumoniae; identical to SEQ ID NO: 64132

SEQ ID NO: 66951 - protein, 605 aa, Streptococcus pneumoniae; identical to SEQ ID NO: 64133

SEQ ID NO: 66952 - protein, 689 aa, Streptococcus pneumoniae; identical to SEQ ID NO: 62612

SEQ ID NO: 66953 - protein, 605 aa, Streptococcus pneumoniae; identical to SEQ ID NO: 62613

SEQ ID NO: 66954 - protein, 695 aa, Streptococcus pneumoniae; identical to SEQ ID NO: 64780

SEQ ID NO: 66955 - protein, 605 aa, Streptococcus pneumoniae; identical to SEQ ID NO: 66879

SEQ ID NO: 66956 - protein, 771 aa, Yersinia frederiksenii
MHLRKLAVRNFRRLHDVVIDLASDISIFVGANNSGKTSVGHALQLFTGKSRFNIHDFNAECWTDIVTFGEGADAASLPSLELDIWFEVTPNDVHRVVDLLPSLSWSGSLVGMRVAFSPINPEEIRSRFLAVRQLAIDATPKDENGTPKYDPSPRNLWEYLRDRLNDEYEFRYFVLDPARFNAEMISEEGYEPTPLTGRDRSGREILNSLIQINFLNAQRHLSDGSGGSRSEDLSRVLSRFYGRNLEQKGEDYEALIALAASESAFNQHLERVFAPTLKSLAKLGYPGLSNPRMMIRSALDPAQIMNNQNGAVIHYALGEDDGNPTPPTLPDSYNGLGFKNLIFMVVELLDIHNQWLAIEENRPPVHLIFIEEPEAHLHAQLQQAFIRKIMDLLAMESQELMHYTTQVVVTSHSTHILYERGFRPIRYFRRKRSSNMSATDVLNLSVFYDNTDPEIRDFLERYLKLTHCDLFFADGAVLVEGNVERLLLPQMIATAAPRLKSSYLTVLEIGGAFCYRFQKLIEYLGLTTLIITDLDSVYCTPPVQDATEARADELDALAENPAANDDGEEPDDDEEEQANTETPGKACIASHPGAMTSNQTLRQWLPKCDTVAALWEATEEMKIQSRTAECDALVRVAYQCQTDVTWKEETLALAGRTLEEAFALENLSWCQDVSCKPLKLRIARAVSMDLLQLAQRIHKRVQSKSFSKTDFALNLLLKKPDEWSVPTYIAEGLKWLEAEIAPPELEVAEGQEEDVEDMSVVLAETDGGRVA

SEQ ID NO: 66957 - protein, 625 aa, Yersinia frederiksenii
MTSRIGSPDTQADIDVRTCLDSSPPRSFVMVAGAGSGKTTSLIKALAHLADTRGSALRRAGQKISCITYTEVAVGEIAADVGNSQLFHISTIHSFLWSVIRPFHLDIAKWVVARIHEKIAEKQARYDRPRTQAKTKSRLEDEIAYLSAQLECIDDVDKFIYGTGSNYAKGILGHDDILKLVPACIKAHPLLRRIVAKRFPFVFVDESQDTDPDVIYALRTIANDNPDMCIGFFGDPMQKIYMSGAGAIPLSDGWSEITKPENFRCPTSVLGVINSIRASGDGLQQIRGRITIVDGVEQTVSGTVNLFILPSNVERSAYLTSVRRYLANETSDEQWLSDTRESDVRLLVLVHRMAANRLGFPNLFAALTDKAPMSLSEGVNDGSAWPLRPFVQHILPIFAAAQASDQFQIMSIMRNECPKLEPSRLHGQAIVAVLNELQQGINGLLTLLEEGSQATVRDILLHIRDCELLRLDDRFDNHLSDEPVNDGNDDFENVQNYLRCNAHELWAYRRYLSEESPFATHHGVKGAQFERVLVVIDDEEARFSQYSYGKYFQYIPISDNDLANLEEGKESVLDRTRRLFYVCCSRALKDLAVVIFVPDVAVAQSAIVGQNLFPASVILGAHDLD

SEQ ID NO: 66958 - protein, 689 aa, Streptococcus pneumoniae; identical to SEQ ID NO: 62612

SEQ ID NO: 66959 - protein, 605 aa, Streptococcus pneumoniae; identical to SEQ ID NO: 62783

SEQ ID NO: 66960 - protein, 689 aa, Streptococcus pneumoniae; identical to SEQ ID NO: 62612

SEQ ID NO: 66961 - protein, 605 aa, Streptococcus pneumoniae; identical to SEQ ID NO: 62613

SEQ ID NO: 66962 - protein, 699 aa, Streptococcus pneumoniae
MKLTKMVINNFRSFGEYQAINFNNQTVLIGNNSSGKTTVLQALSKLFSDKQSDRIIRKSDFHLPKGLRPGENTRNFFIETIFEFDELDGTVYGSAIPTFFEHFTVSQDGAKPFLRIRLESSWEDDGTVEGSIDTQIYYISSDEDTIRDEDKHRAPRKDLDKIRVLYVPASRMPEKELGNASGSMLSRLVNSINWTEDEINEIKDKIDELNKTFLSENGALTQINNEIQKSWELYHEDNRFSQAELIINSSEMAAALRQIALKFSPTTTEEAFTVSDLGDGLRSIFYFSLVDSILDIELEITKDREENPDNPRFKLVPPILTILAIEEPENHIAPHHIGKLIKRFKQLGNNDNSQLILTSHSPVIVKRIDPEDLRYLRIENNDSVLQTIVSDIQLPQSSDESYKYIKGAIQAYPELYFAKLVVLGEGDSEELLLPKFFDLLGLEIDSSQISVVPLGGRHVNYFWKLLNALRIPHITLLDLDNERYGGGWGRIQYAIKQLILNGVAKEKLVTVTTESQKSRVLDDDEIDRIKDWKIDRPDNQWLEGWIKMLEKFNVFFSAPLDIDFLMLQHYKNYYLDMLSSKEGPVVSYADSGGNSKKVKLTDLDCIDKLQLEGLEKRIEEAKIATLKDKSGPGDSFTREEKELMIWYQYFFLGRGKPTTHMQFLLSISDDELTRNLPPVFEKIVNRAEELLGDIEHGKE

SEQ ID NO: 66963 - protein, 605 aa, Streptococcus pneumoniae
MVKSEEWFPKGDIILEETALGAVKDVTNCLVIAGPGAGKTELLAQKLDYLFSTNKCVSPKKILALSFKTDAASNLKERVKKRYGDEYASRFTSLTYSAFEKRILDQFRDVLAEDIRPSRDYLIEDWDTIKELLSMNGSNVNGWRMSYIRNFVENIILNDGNAHKLKKDLLKGTQDNKPVLLYRQITKLSTQIIATNEYIRKALQMTYDFVFLDEFQDTTYAQYNLLKTCFLGSSCKLTAVGDNKQAIMRWAGANPDIFPDYIRDFNSNEYQLLMSHRSVPKLVEFQKEVHQILNSNHSSIQTNNYPEFQEGEIILFEFENESLEAELIASDIESKIQGGIRPSEICILAKQKVDDYSSKLITTLNSKGLKARIENEYQELLKDPTCNLLLDLISCSQGKRDPLIWENISNFYGNINGIDEFTDELILAKSYNEIDNIVSDITYLISNFIPNEESMLELIDCIIEKIDEKRIISNFSTYNGKSDLDIIVKNFSKLLYIEYSQTQGEWLDTVSSFKGENSIPIMTIHKSKGLEYEVVYFLGLEDSAFWSFNDQPEEDKSAFFVALSRAKSHLIFTYCKLRNNSPQNNRNINEIYSLLTQSNLVDVIN

SEQ ID NO: 66964 - protein, 689 aa, Streptococcus pneumoniae; identical to SEQ ID NO: 62612

SEQ ID NO: 66965 - protein, 605 aa, Streptococcus pneumoniae; identical to SEQ ID NO: 62783

SEQ ID NO: 66966 - protein, 689 aa, Streptococcus pneumoniae; identical to SEQ ID NO: 62612

SEQ ID NO: 66967 - protein, 605 aa, Streptococcus pneumoniae; identical to SEQ ID NO: 62783

SEQ ID NO: 66968 - protein, 585 aa, Streptococcus pneumoniae; identical to SEQ ID NO: 66870

SEQ ID NO: 66969 - protein, 512 aa, Streptococcus pneumoniae; identical to SEQ ID NO: 62977

SEQ ID NO: 66970 - protein, 695 aa, Streptococcus pneumoniae; identical to SEQ ID NO: 64780

SEQ ID NO: 66971 - protein, 605 aa, Streptococcus pneumoniae; identical to SEQ ID NO: 66879

SEQ ID NO: 66972 - protein, 689 aa, Streptococcus pneumoniae; identical to SEQ ID NO: 62612

SEQ ID NO: 66973 - protein, 605 aa, Streptococcus pneumoniae; identical to SEQ ID NO: 62613

SEQ ID NO: 66974 - protein, 689 aa, Streptococcus pneumoniae; identical to SEQ ID NO: 62612

SEQ ID NO: 66975 - protein, 605 aa, Streptococcus pneumoniae; identical to SEQ ID NO: 62783

SEQ ID NO: 66976 - protein, 624 aa, Yersinia kristensenii
MYLAELTIKNFRKLREATLKFQPGLNVLVGPNNVGKSAAIDALRTLLAGHDENYPRLDGSDRHRPHEGDPTGDISFHFVFRDLSLEDEADFIAALKPNGDKTMEAHIHVQYTDMDKTGRFKVRRWCGDHPEVSLTSDIMENLRGVYLQPLRDAAQGLRPNRNSQLARLLHLLTDDAGRDTINTALKQLDETLKQDKSIQSTHKAISTRHDSMMGAQLAQELAVGLSVTDFQRLSSRLTLTAEAMEIEKNGLGFNNLIFMAVVLSELAKNTDSAFRSLIIEEPEAHLHPQLQRVLLQYLAGIPTGEGEKPVQLFVTSHSPNFASNSKLDSLVCLIENEVGVETFFPRDIKFEKGKREKLERYLDVTRAELFFARRVIFVEGAAELMLIDALAKKMNFDLREYGVSLISVEGLNFDSFLPLFGEQGLRIPVAVVTDADPFEEEEVEAVAEDEQAEEEIDDLLSEAAYQEETDAPDDEELAGNAEKKKKVKRKEVYPALGDQVRLSANTIKMKNLEDDFVKVFHGLKTLEYDLALIEANRDPMLTALADPHPKISKALRNIVDAQPDNTAKTKALFCGMFERKGNGNIQKGRFAQALAEQISKENGFEVPEYLKKAIQHVCQGVVKP

SEQ ID NO: 66977 - protein, 575 aa, Yersinia kristensenii; identical to SEQ ID NO: 66905

SEQ ID NO: 66978 - protein, 699 aa, Streptococcus pneumoniae; identical to SEQ ID NO: 64132

SEQ ID NO: 66979 - protein, 605 aa, Streptococcus pneumoniae; identical to SEQ ID NO: 64133

SEQ ID NO: 66980 - protein, 695 aa, Streptococcus pneumoniae; identical to SEQ ID NO: 64780

SEQ ID NO: 66981 - protein, 605 aa, Streptococcus pneumoniae; identical to SEQ ID NO: 66879

SEQ ID NO: 66982 - protein, 695 aa, Streptococcus pneumoniae
MKLTKMVINNFRSFGECQAINFNNQTALIGNNSSGKTTVLQALSKLFSDKQSERIIRKSDFHLPKGLKPGENTRNLFIETIFEFDELAGTVYGPAIPTFFEHFTVSQDGAKPFLRIRLESSWEDDGTVEGSIDTQIYYISSDEDTIRDEDKHRAPRKDLDKIRVLYVPASRTPEKELGNASGSMLSRLVNSINWTKDEINEIKDKIDELNNTFLSENGALTQINNEIQKSWELYHEDNRFSQAELIINSSEMAAALRQIALKFSPTTTEEAFTVSDLGDGLRSIFYFSLVDSILDIELEITKDREENPDNPRFKLVPPILTILAIEEPENHIAPHHIGKLVKRFKQLSNNDNSQVILTSHSPAIVKRIEPEELRYLRIESNGRVLQTIVSDIKLPQDTDESYKYIKGAIQAYPELYFAKLVVLGEGDSEELLLPKFFDLLGNEIDSSQISIVPLGGRHVNYFWKLLNSLKIPHITLLDFDNERYGGGWGRVQYVIQQLLKIGIARNDLVRMKDGRILDDQDIARISSNQISDILSQPLLSWINHLEKFNVFFSAPLDIDFLMLQYYKDYYLETLSTNEGPVVSYTDENSDNKKIKITKMDRTNDYQLIGFKNRISEAIQATLKDKSGPGDSFTEEEKELMIWYQYFFLGRGKPTTHMQFLLSIRDEELIESLPSVFEKIVKRAKELLGDIEYGEE

SEQ ID NO: 66983 - protein, 605 aa, Streptococcus pneumoniae; identical to SEQ ID NO: 66879

SEQ ID NO: 66984 - protein, 695 aa, Streptococcus pneumoniae; identical to SEQ ID NO: 64780

SEQ ID NO: 66985 - protein, 605 aa, Streptococcus pneumoniae; identical to SEQ ID NO: 66879

SEQ ID NO: 66986 - protein, 695 aa, Streptococcus pneumoniae; identical to SEQ ID NO: 64780

SEQ ID NO: 66987 - protein, 605 aa, Streptococcus pneumoniae; identical to SEQ ID NO: 66879

SEQ ID NO: 66988 - protein, 641 aa, Salmonella enterica; identical to SEQ ID NO: 62984
  subsp. enterica serovar Typhimurium str. DT104

SEQ ID NO: 66989 - protein, 553 aa, Salmonella enterica; identical to SEQ ID NO: 62985
  subsp. enterica serovar Typhimurium str. DT104

SEQ ID NO: 66990 - protein, 695 aa, Streptococcus pneumoniae; identical to SEQ ID NO: 64780

SEQ ID NO: 66991 - protein, 605 aa, Streptococcus pneumoniae; identical to SEQ ID NO: 64781

SEQ ID NO: 66992 - protein, 689 aa, Streptococcus pneumoniae; identical to SEQ ID NO: 62612

SEQ ID NO: 66993 - protein, 246 aa, Streptococcus pneumoniae
MISILNSKGIKARIENEYQDILKDPTCNLLLDLISCSQGKRDPLIWENISNFYGNINGIDELTDELILAKSYKEIDNIVSDITYLISNFIPNEESMLKLIDCIIEKIDEKRIISNFSTYNGKSDLDIIVKNFSKLLYIEYSQTQGEWLDTVSSFKGENSIPIMTIHKSKGLEYEVVYFLGLEDSAFWSFNNQPEEDKSAFFVALSRAKSHLIFTYCKLRNNSPQNNRNINEIYSLLTQSNLVDVIN

SEQ ID NO: 66994 - protein, 695 aa, Streptococcus pneumoniae; identical to SEQ ID NO: 64780

SEQ ID NO: 66995 - protein, 605 aa, Streptococcus pneumoniae; identical to SEQ ID NO: 66879

SEQ ID NO: 66996 - protein, 729 aa, Staphylococcus aureus; identical to SEQ ID NO: 62500

SEQ ID NO: 66997 - protein, 597 aa, Staphylococcus aureus; identical to SEQ ID NO: 66639

SEQ ID NO: 66998 - protein, 689 aa, Streptococcus pneumoniae; identical to SEQ ID NO: 62612

SEQ ID NO: 66999 - protein, 605 aa, Streptococcus pneumoniae; identical to SEQ ID NO: 62613

SEQ ID NO: 67000 - protein, 695 aa, Streptococcus pneumoniae; identical to SEQ ID NO: 64780

SEQ ID NO: 67001 - protein, 605 aa, Streptococcus pneumoniae; identical to SEQ ID NO: 66879

SEQ ID NO: 67002 - protein, 699 aa, Streptococcus pneumoniae; identical to SEQ ID NO: 64132

SEQ ID NO: 67003 - protein, 605 aa, Streptococcus pneumoniae; identical to SEQ ID NO: 64133

SEQ ID NO: 67004 - protein, 695 aa, Streptococcus pneumoniae; identical to SEQ ID NO: 64780

SEQ ID NO: 67005 - protein, 605 aa, Streptococcus pneumoniae; identical to SEQ ID NO: 64781

SEQ ID NO: 67006 - protein, 699 aa, Streptococcus pneumoniae; identical to SEQ ID NO: 64132

SEQ ID NO: 67007 - protein, 605 aa, Streptococcus pneumoniae; identical to SEQ ID NO: 64133

SEQ ID NO: 67008 - protein, 699 aa, Streptococcus pneumoniae; identical to SEQ ID NO: 64132

SEQ ID NO: 67009 - protein, 605 aa, Streptococcus pneumoniae; identical to SEQ ID NO: 64133

SEQ ID NO: 67010 - protein, 689 aa, Streptococcus pneumoniae; identical to SEQ ID NO: 62612

SEQ ID NO: 67011 - protein, 605 aa, Streptococcus pneumoniae; identical to SEQ ID NO: 62783

SEQ ID NO: 67012 - protein, 689 aa, Streptococcus pneumoniae; identical to SEQ ID NO: 62612

SEQ ID NO: 67013 - protein, 605 aa, Streptococcus pneumoniae; identical to SEQ ID NO: 62783

SEQ ID NO: 67014 - protein, 699 aa, Streptococcus pneumoniae; identical to SEQ ID NO: 64132

SEQ ID NO: 67015 - protein, 605 aa, Streptococcus pneumoniae; identical to SEQ ID NO: 64133

SEQ ID NO: 67016 - protein, 689 aa, Streptococcus pneumoniae; identical to SEQ ID NO: 62612

SEQ ID NO: 67017 - protein, 605 aa, Streptococcus pneumoniae; identical to SEQ ID NO: 62783

SEQ ID NO: 67018 - protein, 641 aa, Salmonella enterica; identical to SEQ ID NO: 62984
  subsp. enterica serovar Typhimurium str. DT104

SEQ ID NO: 67019 - protein, 553 aa, Salmonella enterica; identical to SEQ ID NO: 62985
  subsp. enterica serovar Typhimurium str. DT104

SEQ ID NO: 67020 - protein, 699 aa, Streptococcus pneumoniae; identical to SEQ ID NO: 64132

SEQ ID NO: 67021 - protein, 605 aa, Streptococcus pneumoniae; identical to SEQ ID NO: 64133

SEQ ID NO: 67022 - protein, 695 aa, Streptococcus pneumoniae; identical to SEQ ID NO: 64780

SEQ ID NO: 67023 - protein, 605 aa, Streptococcus pneumoniae; identical to SEQ ID NO: 66879

SEQ ID NO: 67024 - protein, 585 aa, Streptococcus pneumoniae; identical to SEQ ID NO: 62976

SEQ ID NO: 67025 - protein, 512 aa, Streptococcus pneumoniae; identical to SEQ ID NO: 62977

SEQ ID NO: 67026 - protein, 689 aa, Streptococcus pneumoniae; identical to SEQ ID NO: 62612

SEQ ID NO: 67027 - protein, 605 aa, Streptococcus pneumoniae; identical to SEQ ID NO: 62613

SEQ ID NO: 67028 - protein, 689 aa, Streptococcus pneumoniae; identical to SEQ ID NO: 62612

SEQ ID NO: 67029 - protein, 605 aa, Streptococcus pneumoniae; identical to SEQ ID NO: 62783

SEQ ID NO: 67030 - protein, 699 aa, Streptococcus pneumoniae; identical to SEQ ID NO: 64132

SEQ ID NO: 67031 - protein, 605 aa, Streptococcus pneumoniae; identical to SEQ ID NO: 64133

SEQ ID NO: 67032 - protein, 689 aa, Streptococcus pneumoniae; identical to SEQ ID NO: 62612

SEQ ID NO: 67033 - protein, 605 aa, Streptococcus pneumoniae; identical to SEQ ID NO: 62613

SEQ ID NO: 67034 - protein, 699 aa, Streptococcus pneumoniae; identical to SEQ ID NO: 64132

SEQ ID NO: 67035 - protein, 605 aa, Streptococcus pneumoniae; identical to SEQ ID NO: 64133

SEQ ID NO: 67036 - protein, 689 aa, Streptococcus pneumoniae; identical to SEQ ID NO: 62612

SEQ ID NO: 67037 - protein, 605 aa, Streptococcus pneumoniae; identical to SEQ ID NO: 62613

SEQ ID NO: 67038 - protein, 699 aa, Streptococcus pneumoniae; identical to SEQ ID NO: 64132

SEQ ID NO: 67039 - protein, 605 aa, Streptococcus pneumoniae; identical to SEQ ID NO: 64133

SEQ ID NO: 67040 - protein, 689 aa, Streptococcus pneumoniae; identical to SEQ ID NO: 62612

SEQ ID NO: 67041 - protein, 605 aa, Streptococcus pneumoniae; identical to SEQ ID NO: 62613

SEQ ID NO: 67042 - protein, 641 aa, Salmonella enterica; identical to SEQ ID NO: 62984
  subsp. enterica serovar Typhimurium str. DT104

SEQ ID NO: 67043 - protein, 553 aa, Salmonella enterica; identical to SEQ ID NO: 62985
  subsp. enterica serovar Typhimurium str. DT104

SEQ ID NO: 67044 - protein, 641 aa, Salmonella enterica; identical to SEQ ID NO: 62984
  subsp. enterica serovar Typhimurium str. DT104

SEQ ID NO: 67045 - protein, 553 aa, Salmonella enterica; identical to SEQ ID NO: 62985
  subsp. enterica serovar Typhimurium str. DT104

SEQ ID NO: 67046 - protein, 689 aa, Streptococcus pneumoniae; identical to SEQ ID NO: 62612

SEQ ID NO: 67047 - protein, 605 aa, Streptococcus pneumoniae; identical to SEQ ID NO: 62783

SEQ ID NO: 67048 - protein, 699 aa, Streptococcus pneumoniae; identical to SEQ ID NO: 64132

SEQ ID NO: 67049 - protein, 605 aa, Streptococcus pneumoniae; identical to SEQ ID NO: 64133

SEQ ID NO: 67050 - protein, 689 aa, Streptococcus pneumoniae
MKLTKVIINNFRSFGESQIIELNNQTVLIGNNSSGKTTVLQALSKLFSDKQNDRIIKKSDFHLPKGSRPGENTRNLFIETIFEFDELDGTPYSQAIPSFFEHFTVSKDGAKPFLRIRLESFWEDDGTVEGSIDTQFYYISSDEDTIRDEDKHRAPRKDLDKIRVLYVPASRTPEKELGNASGSMLSRLVNSINWTEDEINEITDKIDELNNTFLSENGALTQINNEIQKSWELYHEDNRFSQAELIINSSEMAAALRQIALKFSPTTTEEAFTVSDLGDGLRSIFYFSLVDSILDIELEITKDREENPDNPRFKLIPPVLTILAIEEPENHIAPHHIGKLIKRFKQLGNNDNSQVILTSHSPAIVKRIDPEDLKYLRIENNDRVLQTIVSDIQLPPAIDESYKYIKGAIQAYPELYFAKLVVLGEGDSEELLLPKFFDLLGKEVDSSQISIVPLGGRHVNYFWKLLNALRIPHITLLDFDNERYGGGWGRIKYISQHLYELNTEFQEWFHTQRLDFNEIGSRGCESIGAQRLINWFNKLEEFNVYFSSPLDIDFLMLQHYKDNYLNTLSPIEGPVVSYNDSDGSSKKVKLSDLDCLDRLQLEGFNKRKEEAIRATLKDKSGHGDSFNEEEKELMIWYQYFFLGRGKPTTHMQFLSSISDDELTRNLPPVFEKIVNSAEELLGDIQHGKE

SEQ ID NO: 67051 - protein, 605 aa, Streptococcus pneumoniae; identical to SEQ ID NO: 62613

SEQ ID NO: 67052 - protein, 695 aa, Streptococcus pneumoniae; identical to SEQ ID NO: 64780

SEQ ID NO: 67053 - protein, 605 aa, Streptococcus pneumoniae; identical to SEQ ID NO: 64781

SEQ ID NO: 67054 - protein, 689 aa, Streptococcus pneumoniae; identical to SEQ ID NO: 62612

SEQ ID NO: 67055 - protein, 605 aa, Streptococcus pneumoniae; identical to SEQ ID NO: 62783

SEQ ID NO: 67056 - protein, 699 aa, Streptococcus pneumoniae; identical to SEQ ID NO: 66962

SEQ ID NO: 67057 - protein, 605 aa, Streptococcus pneumoniae; identical to SEQ ID NO: 66963

SEQ ID NO: 67058 - protein, 689 aa, Streptococcus pneumoniae; identical to SEQ ID NO: 62612

SEQ ID NO: 67059 - protein, 605 aa, Streptococcus pneumoniae
MVKSEEWFPKGDIILEETALGAVKDVTNCLVIAGPGAGKTELLAQKLDYLFSTNKCVSPKKILALSFKTDAASNLKERVKKRYGDEYASRFTSLTYSAFEKRILDQFRDVLPEDIRPSRDYLIEDWYTIKELLSMNGINVNGWRMSDIRRYVENIILNNGDNHKFKTDLLKGTQDNKPVLLYRQITKLSTQIIDTNEYIRKALQMTYDFVFLDEFQDTTYAQYDLLKTCFLGSSCKLTAVGDDKKAIMRWAGAKPDIFPDYIRDFNPNEYQLLMNHRSVPKLVEFQKEVHQILNSNHSSIQTNNYPEFQEGEITLFEFENESLEAKLIANDIELKIQGGIRPSEICILAKQKVGIYSFELISILNSKGIKARIENEYQDILKDPTCNLLLDLISCSQGKRDPLIWENISNFYGNINGIDELTDELILAKSYKEIDNIVSDITYLISNFIPNEESMLKLIDCIIEKIDEKRIISNFSTYNGKSDLDIIVKNFSKLLYIEYSQTQGEWLDTVSSFKGENSIPIMTIHKSKGLEYEVVYFLGLEDSAFWSFNNQPEEDKSAFFVALSRAKSHLIFTYCKLRNNSPQNNRNINEIYSLLTQSNLVDVIN

SEQ ID NO: 67060 - protein, 585 aa, Streptococcus pneumoniae; identical to SEQ ID NO: 62976

SEQ ID NO: 67061 - protein, 512 aa, Streptococcus pneumoniae; identical to SEQ ID NO: 62977

SEQ ID NO: 67062 - protein, 695 aa, Streptococcus pneumoniae; identical to SEQ ID NO: 64780

SEQ ID NO: 67063 - protein, 605 aa, Streptococcus pneumoniae; identical to SEQ ID NO: 64781

SEQ ID NO: 67064 - protein, 695 aa, Streptococcus pneumoniae; identical to SEQ ID NO: 64780

SEQ ID NO: 67065 - protein, 605 aa, Streptococcus pneumoniae; identical to SEQ ID NO: 66879

SEQ ID NO: 67066 - protein, 695 aa, Streptococcus pneumoniae; identical to SEQ ID NO: 64780

SEQ ID NO: 67067 - protein, 605 aa, Streptococcus pneumoniae; identical to SEQ ID NO: 66879

SEQ ID NO: 67068 - protein, 689 aa, Streptococcus pneumoniae; identical to SEQ ID NO: 62612

SEQ ID NO: 67069 - protein, 605 aa, Streptococcus pneumoniae; identical to SEQ ID NO: 62613

SEQ ID NO: 67070 - protein, 689 aa, Streptococcus pneumoniae; identical to SEQ ID NO: 62612

SEQ ID NO: 67071 - protein, 605 aa, Streptococcus pneumoniae; identical to SEQ ID NO: 62783

SEQ ID NO: 67072 - protein, 689 aa, Streptococcus pneumoniae; identical to SEQ ID NO: 62612

SEQ ID NO: 67073 - protein, 605 aa, Streptococcus pneumoniae; identical to SEQ ID NO: 62613

SEQ ID NO: 67074 - protein, 689 aa, Streptococcus pneumoniae; identical to SEQ ID NO: 62612

SEQ ID NO: 67075 - protein, 605 aa, Streptococcus pneumoniae; identical to SEQ ID NO: 62783

SEQ ID NO: 67076 - protein, 689 aa, Streptococcus pneumoniae; identical to SEQ ID NO: 62612

SEQ ID NO: 67077 - protein, 605 aa, Streptococcus pneumoniae; identical to SEQ ID NO: 62613

SEQ ID NO: 67078 - protein, 746 aa, Streptococcus agalactiae; identical to SEQ ID NO: 63142

SEQ ID NO: 67079 - protein, 672 aa, Streptococcus agalactiae
MTYTISTENKQLELDIQKDINECLDNFESFCFDAGAGAGKTYALQKSIEHILKTEGENLKLRNQKILCITYTNAAKDEILSRIGKNSAILASTIHEFLWGFISIQQELLTIEHEKKIKEELNGIEQKIIDNPLFGSVNLVDFHNAISDEEFLKVFYSTPISPAGDFKSMIKGYSEYFSPYLSNVNKFSSLVKNVDKKYKLEETLKEIKNKKSKKIIYNPIRNRDKLENYVISHDTLLLYCRNIITSQNLLKRLFSDRYPYVLVDEYQDTDEKVVDIIDSIRKFTICKKNFVVGFFGDTLQNIYSSGVGKLPNKEEYKSITKIFNRRSSNQIVELIEKIRNDNFGQQSIYTDFDNGSYNFYIADDDFDLDIFLQEKNLVSNTACLLMKNDDIARVRGFDVLLAIIKKFPRFGGNNFDNVNNEFLQKNLQHMGWFLREILTFIDFIQKSSDYNSTVKEIVQFIGPSKSTITFGEMKQFISSLRGINLSTLTIDECINKIANIQERISGEDILRKIFSIDDTTENILLNIKNRAYDYFYYLQDSEEYSEREMIVIDNFFRLDVTQFIKWYKYIFDDLKNEEISYYTLHGSKGLEFDNVVVVLQDNFAGKRNYCKYFFENYNNLIDSDLQFQEVRNLLYVACSRAKIKLCVIYISDTLEDALKNIESIFGEIQYLA

SEQ ID NO: 67080 - protein, 689 aa, Streptococcus pneumoniae
MKLTKVIINNFRSFGESQIIELNNQTVLIGNNSSGKTTVLQALSKLFSDKQNDRIIKKSDFHLPKGSRPGENTRNLFIETIFEFDELDGTPYSPAIPSFFEHFTVSKDGAKPFLRIRLESSWEDDGTVEGSIDTQFYYISSDEDTIRDEDKHRAPRKDLDKIRVLYVPASRTPEKELGNASGSMLSRLVNSINWTEDEINEITDKIDELNNTFLSENGALNQINNEIQKSWELYHEDNRFSQAELIINSSEMAAALRQIALKFSPTTTEEAFTVSDLGDGLRSIFYFSLVDSILDIELEITKDREENPNNPRFKLIPPVLTILAIEEPENHIAPHHIGKLIKRFKQLGNNDNSQVILTSHSPAIVKRIDPEDLKYLRIENNDRVLQTIVSDIQLPLAIDESYKYIKGAIQAYPELYFAKLVVLGEGDSEELLLPKFFDLLGKEVDSSQISIVPLGGRHVNYFWKLLNALRIPHITLLDFDNERYGGGWGRIKYISQHLYELNTEFQEWFNTQRLDFNEIGSRGCESIGAQRLINWFNKLEEFNVYFSSPLDIDFLMLQHYKDNYLNTLSPIEGPVVSYNDSDGSSKKVKLSDLDCLDRLQLEGFNKRKEEAIRATLKDKSGSGDSFTEEEKKLMIWYQYFFLGRGKPTTHMQFLSSISDDELTRNLPPVFEKMVKRAEELLGDIEHDEE

SEQ ID NO: 67081 - protein, 605 aa, Streptococcus pneumoniae
MMRSEEWHPKGDIELEKAALGAVKDVTNSLVIAGPGSGKTELLAQKLDYLFSTNKCISPKKILALSFKTDAASNLKERVKKRYGEEYASRFTSLTYSAFEKRILDQFRDALPEDIRPARDYLIDDWDVIKETLYENDINVHGMRMSDIRRYVENIILNNGDNHKFKTDLLKGTQDNKPVLLYRQITKLSTQIIDTNEYIRKALQMTYDFVFLDEFQDTTYAQYDLLKTCFLGSSCKLTAVGDDKQAIMRWAGAKPDIFPDYIRDFNSNEYQLLMNHRSVPKLVEFQKEVHQILNSNHSSIQTNNYPEFQEGEITLFEFENESLEAKLIANDIESKIQGGIRPSEICILAKQKVGIYSFELISILNSKGIKARIENEYQDILKDPTCNLLLDLISCSQGKRDPLIWENISNFYGNINGIDELTDELILAKSYKEIDNIVSDITYLISNFIPNEESMLKLIDCIIEKIDEKRIISNFSTYNGKSDLDIIVKNFSKILYIEYSQTQGEWLDTVSSFKGENSIPIMTIHKSKGLEYEVVYFLGLEDSAFWSFNDQPEEDKSAFFVALSRAKSHLIFTYCKLRNNSPQNNRNINEIYSLLTQSNLVNVIN

SEQ ID NO: 67082 - protein, 585 aa, Streptococcus pneumoniae; identical to SEQ ID NO: 62976

SEQ ID NO: 67083 - protein, 277 aa, Streptococcus pneumoniae
MSDIATQDKNVKKELLEYQGNILILANAGSGKTTFLTKKLKSDSKRLNNYQKLAAITFTRNATEEIKQKLVDIPDNVVVSTIDSFLDKEIILPFLNQKYEIQTSVQFSFRIDHNFSDYSTGIKQILQDGIFGTYDFPTSKHGKNFKCEVALDILKTIDSASEYIKYKFNTLYIDEFQDCDQSMNDLFLYLKNELGIPLFIVGDDKQSIYQWRGASPKYINNLWKNKNDFRKKRFIGNFRSLPRIVDFSLALTPEVTVDNIREEGSILYLEPNQDYPK

SEQ ID NO: 67084 - protein, 689 aa, Streptococcus pneumoniae; identical to SEQ ID NO: 62612

SEQ ID NO: 67085 - protein, 605 aa, Streptococcus pneumoniae; identical to SEQ ID NO: 62783

SEQ ID NO: 67086 - protein, 689 aa, Streptococcus pneumoniae; identical to SEQ ID NO: 62612

SEQ ID NO: 67087 - protein, 605 aa, Streptococcus pneumoniae; identical to SEQ ID NO: 62783

SEQ ID NO: 67088 - protein, 689 aa, Streptococcus pneumoniae; identical to SEQ ID NO: 62612

SEQ ID NO: 67089 - protein, 605 aa, Streptococcus pneumoniae; identical to SEQ ID NO: 62613

SEQ ID NO: 67090 - protein, 699 aa, Streptococcus pneumoniae; identical to SEQ ID NO: 64132

SEQ ID NO: 67091 - protein, 605 aa, Streptococcus pneumoniae; identical to SEQ ID NO: 64133

SEQ ID NO: 67092 - protein, 689 aa, Streptococcus pneumoniae; identical to SEQ ID NO: 62612

SEQ ID NO: 67093 - protein, 605 aa, Streptococcus pneumoniae; identical to SEQ ID NO: 62783

SEQ ID NO: 67094 - protein, 695 aa, Streptococcus pneumoniae; identical to SEQ ID NO: 64780

SEQ ID NO: 67095 - protein, 605 aa, Streptococcus pneumoniae; identical to SEQ ID NO: 66879

SEQ ID NO: 67096 - protein, 695 aa, Streptococcus pneumoniae; identical to SEQ ID NO: 64780

SEQ ID NO: 67097 - protein, 605 aa, Streptococcus pneumoniae; identical to SEQ ID NO: 64781

SEQ ID NO: 67098 - protein, 695 aa, Streptococcus pneumoniae; identical to SEQ ID NO: 64780

SEQ ID NO: 67099 - protein, 605 aa, Streptococcus pneumoniae; identical to SEQ ID NO: 66879

SEQ ID NO: 67100 - protein, 585 aa, Streptococcus pneumoniae; identical to SEQ ID NO: 62976

SEQ ID NO: 67101 - protein, 512 aa, Streptococcus pneumoniae; identical to SEQ ID NO: 62977

SEQ ID NO: 67102 - protein, 689 aa, Streptococcus pneumoniae; identical to SEQ ID NO: 62612

SEQ ID NO: 67103 - protein, 605 aa, Streptococcus pneumoniae; identical to SEQ ID NO: 62783

SEQ ID NO: 67104 - protein, 695 aa, Streptococcus pneumoniae; identical to SEQ ID NO: 64780

SEQ ID NO: 67105 - protein, 605 aa, Streptococcus pneumoniae; identical to SEQ ID NO: 66879

SEQ ID NO: 67106 - protein, 689 aa, Streptococcus pneumoniae; identical to SEQ ID NO: 62612

SEQ ID NO: 67107 - protein, 605 aa, Streptococcus pneumoniae; identical to SEQ ID NO: 62783

SEQ ID NO: 67108 - protein, 689 aa, Streptococcus pneumoniae; identical to SEQ ID NO: 62612

SEQ ID NO: 67109 - protein, 605 aa, Streptococcus pneumoniae; identical to SEQ ID NO: 62783

SEQ ID NO: 67110 - protein, 689 aa, Streptococcus pneumoniae; identical to SEQ ID NO: 62612

SEQ ID NO: 67111 - protein, 605 aa, Streptococcus pneumoniae; identical to SEQ ID NO: 62783

SEQ ID NO: 67112 - protein, 689 aa, Streptococcus pneumoniae; identical to SEQ ID NO: 62612

SEQ ID NO: 67113 - protein, 605 aa, Streptococcus pneumoniae; identical to SEQ ID NO: 62613

SEQ ID NO: 67114 - protein, 695 aa, Streptococcus pneumoniae; identical to SEQ ID NO: 64780

SEQ ID NO: 67115 - protein, 605 aa, Streptococcus pneumoniae; identical to SEQ ID NO: 66879

SEQ ID NO: 67116 - protein, 641 aa, Salmonella enterica; identical to SEQ ID NO: 62984
  subsp. enterica serovar Typhimurium str. DT104

SEQ ID NO: 67117 - protein, 553 aa, Salmonella enterica; identical to SEQ ID NO: 62985
  subsp. enterica serovar Typhimurium str. DT104

SEQ ID NO: 67118 - protein, 689 aa, Streptococcus pneumoniae; identical to SEQ ID NO: 62612

SEQ ID NO: 67119 - protein, 605 aa, Streptococcus pneumoniae; identical to SEQ ID NO: 62613

SEQ ID NO: 67120 - protein, 736 aa, Yersinia enterocolitica
MHITKLSLVNYRNFKNVRLCFNKGINTIIGENGSGKTNLFRAMRLLLDNSMPRFATKLAEGDFCRALGNWRGHWIIISIEFSDIASDEASQSLFLHGLGNAEDEVVTRATYNLIFRPKANIRQALTQIPQGNVDALKNYLDIITIDDYETVLTGKSVADFNDPIVYKSIVGDFERVMFPERLNNSDAGIKLPNILNMPNEVSFTFIKALRDVVSDFHSNRSNPLLTLLKRKSGGISHDDFQPIADLIGTLNSNIEGLSEICDVRDDIVSTIGDTVGDTYSPDSISIRSGLTDDSDQLFQSLKLFVGESNDGHEGTINEMSLGGANLLFLTLKLLEFKYQHANQSIANFLLIEEPEAHIHTHIQKSLFDNISYENTQIIYSTHSSHISEVSNISNMNIIGFVDGVCEVFQPAAGLIEQKVGFVQRYLDAIRSNLLFARSVVLVEGDAEEFLIPILLKKVLGLSLDEIGVTLVNIRSTGFENIAMLFDNERIKKRCSIITDLDKAFFDTTIFPTDSDQDKKKKGKAIGSQETGFARKVRLDVFCQNNPWISTFYAENTFEVDFIKSSNSNYLEKIVGDVYTQQATINTAKSELSSTDIGISGSRALTMANYQGKGWFALNLGKVIDFKVTIPEYIFDAIKFAHGDFNKALIFKILKHRYYSIIEHVAFGKETIERLNVEGNVALKQEWETYLTPYVSGLARFTPKWEAFSPVDGDIDALKVDLMGDLPYEKNGILTRI

SEQ ID NO: 67121 - protein, 600 aa, Yersinia enterocolitica
MFLWDENDLNNEQVAAVCELNNVFLIACPGSGKTRTLTYKIAFELSSLKDPKKWVVAITYTHRAADEIRERIEILGINSSQLWIGTIHAFCLEWILKPYGLYHDKLKNGFKIVNSYDSEEIISRICSSIRTERIKYVECSHYYTPRGLTLTCAGSKISLVRQILDDYHYHLAENAQIDFEQILYFSYEILSSNSAVAKILANLFSYILIDEYQDTKEIQYSIVASIIKASQRLLRSFIVGDPNQAIYGSLGGYAITQLELEQLAEVSFTPMSLDKNYRSSRKIIDYYRNFNVTPSATVAAGEHCDHPSIITYDKITQKDNLVEQVSRHIEHSVQNLGIFEKEICVIAPWWMHLAALTRNLVNRLPDYHFDGPGLVPFSRDIDNFWFKLTQIILTEPSPNMYVKRLRWASDILNDMELALVDVHSILPKNFLKTVNSISIDEYDGIAYLRAFFEALFSELGIDFTLYPMLKEHHESFFKSTQNRIDRLRNENAFFATGIDAFRKAFKPRTGIKVSTIHGVKGGEYDVVISFGLLQELVPNFNDLSVESAKKLLYVIGSRARKNLHLISETGRFSGSGRYRREYQPTEILHQLNFSYDPNLI

SEQ ID NO: 67122 - protein, 689 aa, Streptococcus pneumoniae; identical to SEQ ID NO: 67050

SEQ ID NO: 67123 - protein, 605 aa, Streptococcus pneumoniae; identical to SEQ ID NO: 62613

SEQ ID NO: 67124 - protein, 689 aa, Streptococcus pneumoniae; identical to SEQ ID NO: 62612

SEQ ID NO: 67125 - protein, 605 aa, Streptococcus pneumoniae; identical to SEQ ID NO: 62613

SEQ ID NO: 67126 - protein, 695 aa, Streptococcus pneumoniae; identical to SEQ ID NO: 64780

SEQ ID NO: 67127 - protein, 605 aa, Streptococcus pneumoniae; identical to SEQ ID NO: 66879

SEQ ID NO: 67128 - protein, 695 aa, Streptococcus pneumoniae; identical to SEQ ID NO: 64780

SEQ ID NO: 67129 - protein, 605 aa, Streptococcus pneumoniae; identical to SEQ ID NO: 64781

SEQ ID NO: 67130 - protein, 695 aa, Streptococcus pneumoniae; identical to SEQ ID NO: 64780

SEQ ID NO: 67131 - protein, 605 aa, Streptococcus pneumoniae; identical to SEQ ID NO: 64781

SEQ ID NO: 67132 - protein, 689 aa, Streptococcus pneumoniae; identical to SEQ ID NO: 62612

SEQ ID NO: 67133 - protein, 605 aa, Streptococcus pneumoniae; identical to SEQ ID NO: 62613

SEQ ID NO: 67134 - protein, 689 aa, Streptococcus pneumoniae
MKLTKVIINNFRSFGESQIIELNNQTVLIGNNSSGKTTVLQALSKLFSDKQNDRIIKKSDFHLPKGSRPGENTRNLFIETIFEFDELDGTPYSQAIPSFFEHFTVSKDGAKPFLRIRLESSWEDDGTVEGSIDTQFYYISSDEDTIRDEDKHRAPRKDLDKIRVLYVPASRTPEKELGNASGSMLSRLVNSINWTEDEINEITDKIDELNNTFLSENGALTQINNEIQKSWELYHEDNRFSQAELIINSSEMAAALRQIALKFSPTTTEEAFTVSDLGDGLRSIFYFSLVDSILDIELEITKDREENPDNPRFKLIPPVLTILAIEEPENHIAPHHIGKLIKRFKQLGNNDNSQVILTSHSPAIVKRIDPEDLKYLRIENNDRVLQTIVSDIQLPPAIDESYKYIKGAIQAYPELYFAKLVVLGEGDSEELLLPKFFDLLGKEVDSSQISIVPLGGRHVNYFWKLLNALRIPHITLLDFDNERYGGGWGRIKYISQHLYELNTEFQEWFHTQRLDFNEIGSRGCESIGAQRLINWFNKLEEFNVYFSSPLDIDFLMLQHYKDNYLNTLSPIEGPVVSYNDSDGSSKKVKLSDLDCLDRLQLEGFNKRKEEAIRATLKDKSGHGDSFNEEEKELMIWYQYFFLGRGKPTTHMQFLSSISDDELTRNLPPVFEKIVNSTEELLGDIQHGKE

SEQ ID NO: 67135 - protein, 605 aa, Streptococcus pneumoniae; identical to SEQ ID NO: 62783

SEQ ID NO: 67136 - protein, 695 aa, Streptococcus pneumoniae; identical to SEQ ID NO: 64780

SEQ ID NO: 67137 - protein, 605 aa, Streptococcus pneumoniae; identical to SEQ ID NO: 64781

SEQ ID NO: 67138 - protein, 689 aa, Streptococcus pneumoniae; identical to SEQ ID NO: 62612

SEQ ID NO: 67139 - protein, 605 aa, Streptococcus pneumoniae; identical to SEQ ID NO: 62783

SEQ ID NO: 67140 - protein, 356 aa, Yersinia intermedia
MLYLSLVLSSQAIGRAVLAEEDVSFDPDKLRPPVFTLVALEEPENSLSPHYLGRIVSSLNVMTKNLDAQALIATHAPTMLRRVAPEFIRYLRLNESRETQVTCIKLPDETDEAHKFVREAVQAFPEVYFSRLVVLGEGDSEEIVLPRLLQAKGAPVDESAITIAPLGGRHVNHFWRLLTALKIPFFTLLDLDVARHGAGWGRIKYVNDQFSKRQRRYKLPESHGIPKWDDEKHKIRGFEHYLDMLEERGVFFSYPMDLDFAMLLAYPEAYNVEEEKPDNATIKAVLGKSHYDSSQYRDVELALFNTYHQRFKLGSKPAAHIEALTQLNDADLLKSMPDSLNRLADAVIAKLSELPE

SEQ ID NO: 67141 - protein, 554 aa, Yersinia intermedia
MITVEEWQPADGLTLEPNAKRAAKASKRCLALTAGPGAGKTEMLAQRADFLLRTGTCRYPKRILAISFKVDASRNLTERVERRCGRDLASRFDSFTFHAFAKRIIDRFRPVLTGEYALDAGYTIVDKKSGASRHEIAFGDLVPCAIKILQTSQIARNAIRQTYSDIFLDEFQDCTNLQYDLVKLAFQGTKIRLTAVGDTKQKIMAWAGALDGIFQSFTKDFNAVPLNMYRNFRSKPTLLRVQNEIIRKLDPDSVMPDDQLKGDEGEVFALKFEDSQTEAIYLADLIDGWINKEQLPPAEIAVLVSRQPDLYADHLFRELEQRGIPYRNEQQMQDITVEPLARLIVDYLSCLYAQREPKAWIRLMNQLVPFADEEIQTSVRKGLDQLIRKHRKEVSDAKKTEMPFSEWWRFGRALLKHIGLQTLVALSPDYESPERLKQVIRDARERIKDLLEIESDLPLALKRFADDQAVRILTIHKSKGLEFDSVVIMAVENETFFGKEEENRCAFFVGVSRAKRRLILTHTNKRDEPANAKHWKVLRTARLEYFDYVLPFVR

SEQ ID NO: 67142 - protein, 695 aa, Streptococcus pneumoniae; identical to SEQ ID NO: 64780

SEQ ID NO: 67143 - protein, 605 aa, Streptococcus pneumoniae; identical to SEQ ID NO: 64781

SEQ ID NO: 67144 - protein, 689 aa, Streptococcus pneumoniae; identical to SEQ ID NO: 67080

SEQ ID NO: 67145 - protein, 605 aa, Streptococcus pneumoniae; identical to SEQ ID NO: 67081

SEQ ID NO: 67146 - protein, 689 aa, Streptococcus pneumoniae; identical to SEQ ID NO: 62612

SEQ ID NO: 67147 - protein, 605 aa, Streptococcus pneumoniae; identical to SEQ ID NO: 62783

SEQ ID NO: 67148 - protein, 695 aa, Streptococcus pneumoniae; identical to SEQ ID NO: 64780

SEQ ID NO: 67149 - protein, 605 aa, Streptococcus pneumoniae; identical to SEQ ID NO: 66879

SEQ ID NO: 67150 - protein, 689 aa, Streptococcus pneumoniae; identical to SEQ ID NO: 62612

SEQ ID NO: 67151 - protein, 605 aa, Streptococcus pneumoniae; identical to SEQ ID NO: 62613

SEQ ID NO: 67152 - protein, 689 aa, Streptococcus pneumoniae; identical to SEQ ID NO: 62612

SEQ ID NO: 67153 - protein, 605 aa, Streptococcus pneumoniae; identical to SEQ ID NO: 62783

SEQ ID NO: 67154 - protein, 641 aa, Salmonella enterica; identical to SEQ ID NO: 62984
  subsp. enterica serovar Typhimurium str. DT104

SEQ ID NO: 67155 - protein, 553 aa, Salmonella enterica; identical to SEQ ID NO: 62985
  subsp. enterica serovar Typhimurium str. DT104

SEQ ID NO: 67156 - protein, 689 aa, Streptococcus pneumoniae; identical to SEQ ID NO: 62612

SEQ ID NO: 67157 - protein, 605 aa, Streptococcus pneumoniae; identical to SEQ ID NO: 62613

SEQ ID NO: 67158 - protein, 585 aa, Streptococcus pneumoniae; identical to SEQ ID NO: 62976

SEQ ID NO: 67159 - protein, 512 aa, Streptococcus pneumoniae
MSDIATQDKNVKKELLEYQGNILILANAGSGKTTFLTKKLKSDSKRLNNYQKLAAITFTRNATEEIKQKLVDIPDNVVVSTIDSFLDKEIILPFLNQKYEIQTSVQFSFRIDHNFSDYSTGIKQILQDGIFGTYDFPTSKHGKNFKCEVALDILKTIDSASEYIKYKFNTLYIDEFQDCDQSMNDLFLYLKNELGIPLFIVGDDKQSIYQWRGASPKYINNLWKNKNDFRKKRFIGNFRSLPRIVDFSLALTPEVTVDNIREEGSILYLEPNQDYPKEDIIKYLIDNGDINLQEKNYFLIGINKDIEETATHLNDILSNKVDYVRKNPFIDCTNSNFLQSMAQYYFLEDFSEYDVLNNLFPEYNDEFRKELLKKLKRLRQRPTQSLIEEIASYLDVSITNYEDKLESQILLEILSNLDNKKMFDTNLMSNNLLMTTHASKGLAADTVVIFVEYLIDWRTGLKFEDHCVAITRAKSKVIIIDNRTIYTSEINRLLSNNNGNFSFEDFIERRYI

SEQ ID NO: 67160 - protein, 689 aa, Streptococcus pneumoniae; identical to SEQ ID NO: 62612

SEQ ID NO: 67161 - protein, 605 aa, Streptococcus pneumoniae; identical to SEQ ID NO: 62613

SEQ ID NO: 67162 - protein, 585 aa, Streptococcus pneumoniae; identical to SEQ ID NO: 62976

SEQ ID NO: 67163 - protein, 512 aa, Streptococcus pneumoniae; identical to SEQ ID NO: 62977

SEQ ID NO: 67164 - protein, 689 aa, Streptococcus pneumoniae; identical to SEQ ID NO: 62612

SEQ ID NO: 67165 - protein, 605 aa, Streptococcus pneumoniae; identical to SEQ ID NO: 62613

SEQ ID NO: 67166 - protein, 693 aa, Yersinia frederiksenii
MRIEKVRVEGFRLLQDVEIMLEDTSTVIVGRNNSGKTSFTEIFERFASDNGARFRLEDFSPVQRDKFLSAKLLREQGAKAEDVLAMLPTLSLTLTFRYDSTSPNLGPLSPFIIDLDTESTTAIVCIEYKTSPADLHILFDIQPAPEGVEPRAYFFRSLRETLLKAYGTYVSAIDPTDPKNRRSFDGCADLATLMQCNFVRAQRTLDHAKNGDADVIGKLLSTLFKTASTPTAASRDQELAGKLREAVEGVERSMQGSFDEMLKNLLPAMEVLGFPSLNDTELRPETSLNVEALLTGHTKVVYTGTDGVHLPEGYNGLGTRNLIYMLLQLESYHKLYRARPVCPATHLIFIEEPEAHLHPQMQEVFIAQLNAAIKKLSASYPNEPVWNVQFIISTHSPHVANAASFEAVRYFLNEAPTPKKPRQTKVKDFKKGLDSISAEDQNFLHQYMTLTKCDLYFADKAILVEGTTERLLMPKLCELVDKSLDDKHKLARQYITNVEVGGAYAHIFYPLLDFLELKTLVITDIDSIQPVEKLNQRGKKITSWEKCPVAEGQRTSNAAIKRWFRPEEHPDDEQWHITPAELLSKTATEKLKGFRRIAYQIAENPETGISARSYEDALVLANPELFTWTKEQDAAIEAWEIAKTLGKADTALQFAIREKEWVVPRYIHEGLAWLSEPLLVPEQTNEQAALEAV

SEQ ID NO: 67167 - protein, 576 aa, Yersinia frederiksenii
MTKGKDNPALIAAEKAQRKINDALDAGQSFRLEAGAGAGKTYSLVAALKRLIEEQGATLVRHGQKVACITYTEVARNEIAQEIEEHPAILVNTIHGFSWAFLRSFQKTLRELLEEMDDKKEKIEQGGGIGTKPVEYDMGFFGVDENKISLSHDDIPNMMAKLLQREKFRQIFSQQFPVIFIDEYQDTHRQFMEAITEYFLKPATGPLVGLFGDHWQTIYRSEYELAKYPIKEIAKGSNFRSVPAIVKVLNNLRPELRQEVHNPEAKGEARFFHTNNYKGERTNDRHSKQDLSSDLTRQTRIALMERLQAEGWNLSKTKVLMLTHNVLAAEQGYPGIVEVFNGRNDLFAKKEDPVIKFFAENVEPMCEAYCASRYGDMFRIYGSAPAITQHQDKASWRRDMDILRTLRKEGTIGQVIDHLKTTRRPAPPDRVLRRDEELNSLDSAPVPEGASALKRYSKLRDVPYKEVIEIAKFIEKQTAFATQHSVKGAEFENVLVVLGGGWNHYNWPLFLELIKTKALTEKNTKGFYRARNLFYVSLSRPMVRLAVLATQTMSDKALESAEELFGSENVEGLIIS

SEQ ID NO: 67168 - protein, 695 aa, Streptococcus pneumoniae; identical to SEQ ID NO: 64780

SEQ ID NO: 67169 - protein, 605 aa, Streptococcus pneumoniae; identical to SEQ ID NO: 64781

SEQ ID NO: 67170 - protein, 689 aa, Streptococcus pneumoniae; identical to SEQ ID NO: 62612

SEQ ID NO: 67171 - protein, 605 aa, Streptococcus pneumoniae; identical to SEQ ID NO: 62613

SEQ ID NO: 67172 - protein, 645 aa, Yersinia enterocolitica
MKLGTIRLSGFQSFGQESTELSLEDTTYLIGPNGSGKTAVLQALCRLFAFDPVLRRIQRSDFHVPFDENEAPQERQLWIEADFLFPELAVDEDNSTVAPYFGHMRLDEQEGIPRVRFRLTATMGPDGDIEETLVYVLDINTDGSPQSSARVPRAERHNIQVHYLPARRDPADHIAYGANALLGRLLRAVRWDDERDTIKGLTDQISDSLAENPSVNAFSERLKMTWATLHKGKFFADPKITFVASEIEALLRHLSVSFTPSHDGSLVDFSRLSDGQKSMLYLSLVLSSQAIGRAVLAEEDVSFDPDKLRPPVFTLIALEEPENSLSPHYLGRIVSVLNTMAKNADAQALIATHAPTMLRRVAPELIRYLRLTEERKTRITCIKLPAKTDEAHKFVREAVQAFPEIYFSRLVVLGEGDSEEIVLPRLLQAKGAPVDESAVTIAPLGGRHVNHFWRLLSVLQIPYLTLLDLDVARYAAGWGRIKYVNDQFAVFEPRKLLPAEWVISRWNNDETPIRTHHFFNNAAQTELLDIFIELQDRGVFFSSPMDLDFSMLLAYPEAYGVVEEEPDESIIKAVLGKSYFDASQYSEEEKKLFVTYHKSFKLGSKPAAHIDALAKLNDAELLAEMPESLSSLADAVIAKLAELPE

SEQ ID NO: 67173 - protein, 557 aa, Yersinia enterocolitica
MIAVEKWHPANGLTLEPNALRATKEHEHCLALTAGPGAGKTEMLAQRADFLLRTGICRYPKRILAISFKIDASRNLKERVERRCGPNFASRFDSYTFHAFAKRIIDRFRPVLTGEYALDADYTIVDKKISPSRTQIEFGDLVPLAIQILQNSKIAKNAIRQTYSDIFLDEFQDCTNIQYDLVKLAFQRTGIRLTAVGDTKQKIMGWAGALDGIFQTFTNDFNAVPLNIYRNFRSKPQLLRVQNEIIRTLDPASVMSDEQLDGDEGEVYAWHFKNSQEEAVCLADMINGWINTEKLPPAEIAVLVSKQLDLYADHLMVELEARGIPYRNEQQMQDIAVEPAARLIVDYLSCLYGQREPKAWIRLMNQLIPFADEEVQSSARKDLDRLLKKQRKEASIAELFDLPYSGWWAFVEAFLKHIGSETLVALSPDYESRKRLLEVVRDTKTRVEDLLQIEPDLPQALERFADEQTVRILTIHKSKGLEFDSVIIMAVENEIFFGNQDENRCAFFVGVSRAKRRLVLTHVDQRERPANSKRWNVRRTVQSEYVGYITPFVREQR

SEQ ID NO: 67174 - protein, 699 aa, Streptococcus pneumoniae; identical to SEQ ID NO: 64132

SEQ ID NO: 67175 - protein, 605 aa, Streptococcus pneumoniae; identical to SEQ ID NO: 64133

SEQ ID NO: 67176 - protein, 689 aa, Streptococcus pneumoniae; identical to SEQ ID NO: 62612

SEQ ID NO: 67177 - protein, 605 aa, Streptococcus pneumoniae; identical to SEQ ID NO: 62783

SEQ ID NO: 67178 - protein, 699 aa, Streptococcus pneumoniae; identical to SEQ ID NO: 64132

SEQ ID NO: 67179 - protein, 605 aa, Streptococcus pneumoniae; identical to SEQ ID NO: 64133

SEQ ID NO: 67180 - protein, 695 aa, Streptococcus pneumoniae; identical to SEQ ID NO: 64780

SEQ ID NO: 67181 - protein, 605 aa, Streptococcus pneumoniae; identical to SEQ ID NO: 66879

SEQ ID NO: 67182 - protein, 689 aa, Streptococcus pneumoniae; identical to SEQ ID NO: 62612

SEQ ID NO: 67183 - protein, 605 aa, Streptococcus pneumoniae; identical to SEQ ID NO: 62783

SEQ ID NO: 67184 - protein, 695 aa, Streptococcus pneumoniae; identical to SEQ ID NO: 64780

SEQ ID NO: 67185 - protein, 605 aa, Streptococcus pneumoniae; identical to SEQ ID NO: 64781

SEQ ID NO: 67186 - protein, 699 aa, Streptococcus pneumoniae; identical to SEQ ID NO: 64132

SEQ ID NO: 67187 - protein, 605 aa, Streptococcus pneumoniae; identical to SEQ ID NO: 64133

SEQ ID NO: 67188 - protein, 699 aa, Streptococcus pneumoniae; identical to SEQ ID NO: 64132

SEQ ID NO: 67189 - protein, 605 aa, Streptococcus pneumoniae; identical to SEQ ID NO: 64133

SEQ ID NO: 67190 - protein, 689 aa, Streptococcus pneumoniae; identical to SEQ ID NO: 62612

SEQ ID NO: 67191 - protein, 605 aa, Streptococcus pneumoniae; identical to SEQ ID NO: 62783

SEQ ID NO: 67192 - protein, 585 aa, Streptococcus pneumoniae; identical to SEQ ID NO: 62976

SEQ ID NO: 67193 - protein, 512 aa, Streptococcus pneumoniae; identical to SEQ ID NO: 62977

SEQ ID NO: 67194 - protein, 699 aa, Streptococcus pneumoniae; identical to SEQ ID NO: 64132

SEQ ID NO: 67195 - protein, 605 aa, Streptococcus pneumoniae; identical to SEQ ID NO: 64133

SEQ ID NO: 67196 - protein, 689 aa, Streptococcus pneumoniae; identical to SEQ ID NO: 62612

SEQ ID NO: 67197 - protein, 605 aa, Streptococcus pneumoniae; identical to SEQ ID NO: 62613

SEQ ID NO: 67198 - protein, 689 aa, Streptococcus pneumoniae; identical to SEQ ID NO: 67080

SEQ ID NO: 67199 - protein, 605 aa, Streptococcus pneumoniae; identical to SEQ ID NO: 67081

SEQ ID NO: 67200 - protein, 689 aa, Streptococcus pneumoniae; identical to SEQ ID NO: 62612

SEQ ID NO: 67201 - protein, 605 aa, Streptococcus pneumoniae; identical to SEQ ID NO: 62613

SEQ ID NO: 67202 - protein, 689 aa, Streptococcus pneumoniae; identical to SEQ ID NO: 62612

SEQ ID NO: 67203 - protein, 605 aa, Streptococcus pneumoniae; identical to SEQ ID NO: 62783

SEQ ID NO: 67204 - protein, 689 aa, Streptococcus pneumoniae; identical to SEQ ID NO: 62612

SEQ ID NO: 67205 - protein, 605 aa, Streptococcus pneumoniae; identical to SEQ ID NO: 62613

SEQ ID NO: 67206 - protein, 689 aa, Streptococcus pneumoniae; identical to SEQ ID NO: 62612

SEQ ID NO: 67207 - protein, 605 aa, Streptococcus pneumoniae; identical to SEQ ID NO: 62613

SEQ ID NO: 67208 - protein, 689 aa, Streptococcus pneumoniae; identical to SEQ ID NO: 62612

SEQ ID NO: 67209 - protein, 605 aa, Streptococcus pneumoniae; identical to SEQ ID NO: 62783

SEQ ID NO: 67210 - protein, 689 aa, Streptococcus pneumoniae; identical to SEQ ID NO: 62612

SEQ ID NO: 67211 - protein, 605 aa, Streptococcus pneumoniae; identical to SEQ ID NO: 62613

SEQ ID NO: 67212 - protein, 695 aa, Streptococcus pneumoniae; identical to SEQ ID NO: 64780

SEQ ID NO: 67213 - protein, 605 aa, Streptococcus pneumoniae; identical to SEQ ID NO: 66879

SEQ ID NO: 67214 - protein, 706 aa, Yersinia mollaretii
MKICSIEIKNYRLLTEFRLDLEDNLSLVIGKNNTGKTSLLSALEKLYAETRKISFDDFNVKLRDRLKAFVGGEKALPNEDVYEPLGVELRLVLVYEDEDDLGQVSPLIMSLDPDDKSILLGFEYKISHSQLVSFCNDFLEERDNYDDDVLLYMAEKHKKYFGGISRRSYLSNDLSVFTDLIKEKISLDEVISFKAISAKRNVTNRENDKTLSGQTADIYKITEESEEQKDTVNRFKKTLRGADKNLNGIYEEMFSKVLKSVERFGGISQYETSITIASTLQHQELLDGNTTVFYRHETHDLPEHYNGLGYMNLISMIFEIELLMTSFRRSLLERPAAVNLLFIEEPEVHTHPQMQYVFIKNIKDLLEEGVVREDGLVVNLQTVISTHSSHIVAECNFDDIKYMKRKGGVVNCSNLKDLKKEYDREDSKGIDGHYKFLKQYLTLNRAELFFADKAIFVEGDTERVLLPAMMKKIDEEYPENEVAPLTSQNVSIVEVGAHSQVFEKFISFLGIKTLILTDIDTGKTVPDLDSAGNHKRTQKDEPKYTTEKCSPMDSDVSHTSNNALCFFHSKEREDIKYFLSLFKDDKKFLFDGEKWVRDKIGQIFTAFQIEEEGYRGRSFEDAFFHVNKEFLGTDSVVFPSLIAKHFELYVAGHTTAYEFAEKGVDKKTTLAIDILLNSQTQETPKRTFSNWNTPAYIREGLEWLRK

SEQ ID NO: 67215 - protein, 571 aa, Yersinia mollaretii
MAAQMKKKSYSDETVKILNAVSEGKNFLLSGGAGSGKTYSLIESISGLLENNPLAKVACITYTNTATNEIENRIDNECLKVSTIHDFLWSSIKHFQKELKTVLIDLINDEEKNLFNVISATGEPEKILCIAGDIEYKEFVKLRDGIVSHDQIPVLAHVMFSKFPKLCRILNDSFKFILVDEYQDTSPLVVDILLNCLASVPRRNIVGFFGDSMQSIFEGGIGNLDAYKGNGRAQVHEIYKQQNRRNPTAIINLANKIRTDGLIQVPSDDISAPNMNKGVAKLGSAVFLYSSDESTQVARDYLRWDLSPLNTKELNLTHNLIAVKGGFPNLMRIYDADKILEYVRRLRSYIKSSEPEFNIFDKSLEQVCCELKIGKSGKLLDKVCPTPIQVAYIEAYHENFEAALKLSFESIASIYIDKDMLIDDQKADQSTLGGSGANRDHLIKHLYKIQKVIQLYEEGDFNSFLGATDLKINNHKDKVIIKSAIEGLSQSDGKTIGDVISEAHLNGLVRRDDRLEEFARVKAYVYNQVCKVSYDEFRYLYKYIDGKTPYSTQHKTKGREYDNVLVIMDNG

SEQ ID NO: 67216 - protein, 585 aa, Streptococcus pneumoniae; identical to SEQ ID NO: 62976

SEQ ID NO: 67217 - protein, 512 aa, Streptococcus pneumoniae; identical to SEQ ID NO: 62977

SEQ ID NO: 67218 - protein, 689 aa, Streptococcus pneumoniae; identical to SEQ ID NO: 62612

SEQ ID NO: 67219 - protein, 605 aa, Streptococcus pneumoniae; identical to SEQ ID NO: 62783

SEQ ID NO: 67220 - protein, 689 aa, Streptococcus pneumoniae; identical to SEQ ID NO: 62612

SEQ ID NO: 67221 - protein, 605 aa, Streptococcus pneumoniae; identical to SEQ ID NO: 62613

SEQ ID NO: 67222 - protein, 699 aa, Streptococcus pneumoniae; identical to SEQ ID NO: 64132

SEQ ID NO: 67223 - protein, 605 aa, Streptococcus pneumoniae; identical to SEQ ID NO: 64133

SEQ ID NO: 67224 - protein, 689 aa, Streptococcus pneumoniae; identical to SEQ ID NO: 62612

SEQ ID NO: 67225 - protein, 605 aa, Streptococcus pneumoniae; identical to SEQ ID NO: 62783

SEQ ID NO: 67226 - protein, 689 aa, Streptococcus pneumoniae; identical to SEQ ID NO: 62612

SEQ ID NO: 67227 - protein, 605 aa, Streptococcus pneumoniae; identical to SEQ ID NO: 62613

SEQ ID NO: 67228 - protein, 689 aa, Streptococcus pneumoniae; identical to SEQ ID NO: 62612

SEQ ID NO: 67229 - protein, 605 aa, Streptococcus pneumoniae; identical to SEQ ID NO: 62613

SEQ ID NO: 67230 - protein, 699 aa, Streptococcus pneumoniae; identical to SEQ ID NO: 64132

SEQ ID NO: 67231 - protein, 605 aa, Streptococcus pneumoniae; identical to SEQ ID NO: 64133

SEQ ID NO: 67232 - protein, 689 aa, Streptococcus pneumoniae; identical to SEQ ID NO: 62612

SEQ ID NO: 67233 - protein, 605 aa, Streptococcus pneumoniae; identical to SEQ ID NO: 62783

SEQ ID NO: 67234 - protein, 585 aa, Streptococcus pneumoniae; identical to SEQ ID NO: 62976

SEQ ID NO: 67235 - protein, 512 aa, Streptococcus pneumoniae; identical to SEQ ID NO: 62977

SEQ ID NO: 67236 - protein, 695 aa, Streptococcus pneumoniae; identical to SEQ ID NO: 64780

SEQ ID NO: 67237 - protein, 605 aa, Streptococcus pneumoniae; identical to SEQ ID NO: 66879

SEQ ID NO: 67238 - protein, 699 aa, Streptococcus pneumoniae; identical to SEQ ID NO: 64132

SEQ ID NO: 67239 - protein, 605 aa, Streptococcus pneumoniae; identical to SEQ ID NO: 64133

SEQ ID NO: 67240 - protein, 689 aa, Streptococcus pneumoniae; identical to SEQ ID NO: 62612

SEQ ID NO: 67241 - protein, 605 aa, Streptococcus pneumoniae; identical to SEQ ID NO: 62783

SEQ ID NO: 67242 - protein, 699 aa, Streptococcus pneumoniae; identical to SEQ ID NO: 64132

SEQ ID NO: 67243 - protein, 605 aa, Streptococcus pneumoniae; identical to SEQ ID NO: 64133

SEQ ID NO: 67244 - protein, 695 aa, Streptococcus pneumoniae; identical to SEQ ID NO: 64780

SEQ ID NO: 67245 - protein, 605 aa, Streptococcus pneumoniae; identical to SEQ ID NO: 64781

SEQ ID NO: 67246 - protein, 689 aa, Streptococcus pneumoniae; identical to SEQ ID NO: 62612

SEQ ID NO: 67247 - protein, 605 aa, Streptococcus pneumoniae; identical to SEQ ID NO: 62613

SEQ ID NO: 67248 - protein, 585 aa, Streptococcus pneumoniae; identical to SEQ ID NO: 64134

SEQ ID NO: 67249 - protein, 512 aa, Streptococcus pneumoniae; identical to SEQ ID NO: 62977

SEQ ID NO: 67250 - protein, 689 aa, Streptococcus pneumoniae; identical to SEQ ID NO: 62612

SEQ ID NO: 67251 - protein, 605 aa, Streptococcus pneumoniae; identical to SEQ ID NO: 62783

SEQ ID NO: 67252 - protein, 699 aa, Streptococcus pneumoniae; identical to SEQ ID NO: 64132

SEQ ID NO: 67253 - protein, 605 aa, Streptococcus pneumoniae; identical to SEQ ID NO: 64133

SEQ ID NO: 67254 - protein, 699 aa, Streptococcus pneumoniae; identical to SEQ ID NO: 64132

SEQ ID NO: 67255 - protein, 605 aa, Streptococcus pneumoniae; identical to SEQ ID NO: 64133

SEQ ID NO: 67256 - protein, 585 aa, Streptococcus pneumoniae; identical to SEQ ID NO: 62976

SEQ ID NO: 67257 - protein, 512 aa, Streptococcus pneumoniae; identical to SEQ ID NO: 62977

SEQ ID NO: 67258 - protein, 689 aa, Streptococcus pneumoniae; identical to SEQ ID NO: 62612

SEQ ID NO: 67259 - protein, 605 aa, Streptococcus pneumoniae; identical to SEQ ID NO: 62613

SEQ ID NO: 67260 - protein, 799 aa, Yersinia pseudotuberculosis
MKIEYIGIQNYRKLKTCRIRLTEEETLLVGANNSGKTSAMDALIFFLDQRGRTAASMVSGKSPSSRKLGAADFTLSNWHQLNQFGLAWANAEQAGEKISDWQPLCPTMDIWLKVEKSEIHRVRHLIPTLKWDGGLLGIRMIYQPKNLDALKADFIDRFKAAERLKITAEENGEKDPDGSASEPSNFTFSVWPGSMREYLEREVSRVFEIKSYILDPAKLNPDSVSEFQPQVLAEEQLPLDFYPLNELFKVDIIDATRGFSDPYVATGSQHGGSNLAGQMNQYYNRHLNPTDLPCYEDLGALKSIAYAQHSFDEKLNEVFTKPLQEIETLGYPGFTDPHIKLSSRVDPIDNLDHEAAILFEIQKTSHATGVPLMSLSEKYNGLGYKNLISMVFTMMSFRDQWMRVGKAGLRKPEEDVIVEPLHLILIEEPEAHLHAQVQQVFIKKAYSVLRNHDDLRTSAQFSSQLVVSTHSSYLAHEVGFEKLRYFKRKPATGPHDVPTADVIDLSCTFGSGKSLPDDVSQTAQFVARYLKTTHCDLFFANGIILVEGAAERILMPHFIRNNPNANTSLDNSYISILEVGGAHAHRLKALIEILGLPTLVITDTDAQNPPPELPGDYQNGRSRAKPKAIRPELRKGYITGSHSIKSWLNVEGDLDKVLSMPEHKKVRGKVRIAFQYGIPIKFRTDDEEAVAFPYTFEDAIALTNPELFREVEKPTGMMKQMQKALNLDTLEQCCEALYTALDYDKAEMALDLLFCVDPAELHAPAYIQEGLEWLKKELDEASRDLTPEVPEVTNEWEGA

SEQ ID NO: 67261 - protein, 622 aa, Yersinia pseudotuberculosis
MDTPSANDPIVDQLFSYLNLDNPRSFLLFAGAGSGKTRTLVSVLEQMKQRYSTELSKSGKRIGIITYTNAACEEIQRRLFFDANFMVSTIHSFCWDLINPFTADIKLWLKKELTESIDELTRDIKKSTKPEGVTAQKNRRRLASKKKRLQNLDTIQKFSYSPTSNRPEKGTLNHSEVIKVTACLLQNEALLREILFSRYPVLLIDESQDTNKLLIESLITTQQENPTKFCLGLFGDMMQQIFSGGKSDLASPLPPGWESPEIKINHRSPVRIVTLINTIRQYNDKHTQKPAPDAQPGTARLFVVDMNTDKVRADVERQVAQHMAAHAGDTEWKNKNLVKVLTLEHHMAARRGEFENFLLPLLEVDRLGDAAIKGESQEITFLSSQLWPFIDAIRSDDDFKIANIMRKYSPVFSGSWLESAADPLQVFREAQCQIDKVKALLDGEPTHSILDVCRLTHEGELLILPEALLLQLAQAPQWDDESTKKEDVNEEYDAWGQSLNASTRELENYISYISSTSSYGTHQGVKGLQYPRVMAILDDEEARGFMFSYDKLLGVKPLSKADHDNESTGADSAPKRSRRLFYVICSRAQQSLAVVAYTKAPSAVERAVIASGWFGKEEITHM

SEQ ID NO: 67262 - protein, 641 aa, Salmonella enterica; identical to SEQ ID NO: 62984
  subsp. enterica serovar Typhimurium str. DT104

SEQ ID NO: 67263 - protein, 553 aa, Salmonella enterica; identical to SEQ ID NO: 62985
  subsp. enterica serovar Typhimurium str. DT104

SEQ ID NO: 67264 - protein, 585 aa, Streptococcus pneumoniae; identical to SEQ ID NO: 62976

SEQ ID NO: 67265 - protein, 512 aa, Streptococcus pneumoniae; identical to SEQ ID NO: 62977

SEQ ID NO: 67266 - protein, 695 aa, Streptococcus pneumoniae; identical to SEQ ID NO: 64780

SEQ ID NO: 67267 - protein, 605 aa, Streptococcus pneumoniae; identical to SEQ ID NO: 64781

SEQ ID NO: 67268 - protein, 689 aa, Streptococcus pneumoniae; identical to SEQ ID NO: 62612

SEQ ID NO: 67269 - protein, 605 aa, Streptococcus pneumoniae; identical to SEQ ID NO: 62613

SEQ ID NO: 67270 - protein, 689 aa, Streptococcus pneumoniae; identical to SEQ ID NO: 62612

SEQ ID NO: 67271 - protein, 605 aa, Streptococcus pneumoniae; identical to SEQ ID NO: 62783

SEQ ID NO: 67272 - protein, 689 aa, Streptococcus pneumoniae; identical to SEQ ID NO: 62612

SEQ ID NO: 67273 - protein, 605 aa, Streptococcus pneumoniae; identical to SEQ ID NO: 62783

SEQ ID NO: 67274 - protein, 689 aa, Streptococcus pneumoniae; identical to SEQ ID NO: 62612

SEQ ID NO: 67275 - protein, 605 aa, Streptococcus pneumoniae; identical to SEQ ID NO: 62613

SEQ ID NO: 67276 - protein, 689 aa, Streptococcus pneumoniae; identical to SEQ ID NO: 62612

SEQ ID NO: 67277 - protein, 605 aa, Streptococcus pneumoniae; identical to SEQ ID NO: 62613

SEQ ID NO: 67278 - protein, 641 aa, Salmonella enterica; identical to SEQ ID NO: 62984
  subsp. enterica serovar Typhimurium str. DT104

SEQ ID NO: 67279 - protein, 553 aa, Salmonella enterica; identical to SEQ ID NO: 62985
  subsp. enterica serovar Typhimurium str. DT104

SEQ ID NO: 67280 - protein, 689 aa, Streptococcus pneumoniae; identical to SEQ ID NO: 62612

SEQ ID NO: 67281 - protein, 605 aa, Streptococcus pneumoniae; identical to SEQ ID NO: 62613

SEQ ID NO: 67282 - protein, 695 aa, Streptococcus pneumoniae; identical to SEQ ID NO: 64780

SEQ ID NO: 67283 - protein, 605 aa, Streptococcus pneumoniae; identical to SEQ ID NO: 64781

SEQ ID NO: 67284 - protein, 689 aa, Streptococcus pneumoniae; identical to SEQ ID NO: 62612

SEQ ID NO: 67285 - protein, 605 aa, Streptococcus pneumoniae; identical to SEQ ID NO: 62613

SEQ ID NO: 67286 - protein, 689 aa, Streptococcus pneumoniae; identical to SEQ ID NO: 62612

SEQ ID NO: 67287 - protein, 605 aa, Streptococcus pneumoniae; identical to SEQ ID NO: 62613

SEQ ID NO: 67288 - protein, 689 aa, Streptococcus pneumoniae; identical to SEQ ID NO: 62612

SEQ ID NO: 67289 - protein, 605 aa, Streptococcus pneumoniae; identical to SEQ ID NO: 62613

SEQ ID NO: 67290 - protein, 729 aa, Staphylococcus aureus; identical to SEQ ID NO: 62500

SEQ ID NO: 67291 - protein, 597 aa, Staphylococcus aureus; identical to SEQ ID NO: 66639

SEQ ID NO: 67292 - protein, 699 aa, Streptococcus pneumoniae; identical to SEQ ID NO: 64132

SEQ ID NO: 67293 - protein, 605 aa, Streptococcus pneumoniae; identical to SEQ ID NO: 64133

SEQ ID NO: 67294 - protein, 699 aa, Streptococcus pneumoniae; identical to SEQ ID NO: 64132

SEQ ID NO: 67295 - protein, 605 aa, Streptococcus pneumoniae; identical to SEQ ID NO: 64133

SEQ ID NO: 67296 - protein, 699 aa, Streptococcus pneumoniae; identical to SEQ ID NO: 64132

SEQ ID NO: 67297 - protein, 605 aa, Streptococcus pneumoniae; identical to SEQ ID NO: 64133

SEQ ID NO: 67298 - protein, 699 aa, Streptococcus pneumoniae; identical to SEQ ID NO: 64132

SEQ ID NO: 67299 - protein, 649 aa, Streptococcus pneumoniae
MVKSEEWFPKGDIILEETALGAVKDVTNCLVIAGPGAGKTELLAQKLDYLFSTNKCVSPKKILALSFKTDAASNLKERVKKRYGDEYASRFTSLTYSAFEKRILDQFRDVLPEDIRPSRDYLIEDWDTIKELLSMNGINVNGRRMSDIRNFVENIILNDGNTHKFKKNLLKGTQDNKPVLLYSQITKLSTQIIATNEYIRKALQLTYDFVFLDEFQDTTYAQYSLLKTCFLGSSCKLTAVGDDKQAIMRWAGAKPDIFPDYIRDFNSNEYQLLMNHRSVPKLVEFQKEVHQILNSNHSSIQTNNYPEFQEGEITLFEFENESLEAKLIANDIESKIQGGIRPSEICILAKQKVGIYSFELISILNGKGIKARIENEYQDILKDPTCNLLLDLISCSQGKRDPLIWENISNFYGNINGIDELTDELILAKSYKEIDNIVSDITYLISNPIPDKDRMLNLINCIIEKIGDKRIISNFPMYNGKNDLLITINKFSKLLDLFGNCKKCYTIFMETVYDKAQKLNSKNFKLLIGVKKETFQLMLEHLNSAYQIQHRKGGRPRSLPMEDQLIMTLRYLRYYPTQRLLAFDFGVGVATVNAIITWVEDTLRASGSFDLDHLEAPSAAVAIDVTESPIQRPKKTKAKIILVKRNDTP

SEQ ID NO: 67300 - protein, 695 aa, Streptococcus pneumoniae; identical to SEQ ID NO: 64780

SEQ ID NO: 67301 - protein, 401 aa, Streptococcus pneumoniae
MVKSDDWLPKGDIILENAALEAVKNVNNCLVIAGPGAGKTELLAQKLDYLFSTNECISPKKILALSFKTDAAANMKNRVKKRYGDEYASRFTSLTYSAFEKMILDQYINALPEEIRPDRDYLVDDWDVIKATLIKNGINVNGRRMSDIRKSVEKTVLNDEANLKFKKDLLKGTRNNKAVLLYKQITKLATYIIYTNKYIRKALQMTYEFVFLDEFQDTTYDQYNLLKTCFLGSTCKLTAVGDNKQAIMRWAGANPDIFQDYKLDFKANEYQLLMNHRSVPKLIEFQKEVHQILNSNHSSIQSNYYPEFQEGENSIPIMTIHKSKGLEYEVVYFLGLEDSAFWSFNDQPEEDKSAFFVALSRAKSHLIFTYCKLRNNSPQNNRNINEIYSLLTQSNLVDVIN

SEQ ID NO: 67302 - protein, 729 aa, Staphylococcus aureus; identical to SEQ ID NO: 62500

SEQ ID NO: 67303 - protein, 597 aa, Staphylococcus aureus; identical to SEQ ID NO: 66639

SEQ ID NO: 67304 - protein, 699 aa, Streptococcus pneumoniae; identical to SEQ ID NO: 64132

SEQ ID NO: 67305 - protein, 605 aa, Streptococcus pneumoniae; identical to SEQ ID NO: 64133

SEQ ID NO: 67306 - protein, 695 aa, Streptococcus pneumoniae; identical to SEQ ID NO: 64780

SEQ ID NO: 67307 - protein, 605 aa, Streptococcus pneumoniae; identical to SEQ ID NO: 66879

SEQ ID NO: 67308 - protein, 689 aa, Streptococcus pneumoniae; identical to SEQ ID NO: 62612

SEQ ID NO: 67309 - protein, 605 aa, Streptococcus pneumoniae; identical to SEQ ID NO: 62783

SEQ ID NO: 67310 - protein, 699 aa, Streptococcus pneumoniae; identical to SEQ ID NO: 64132

SEQ ID NO: 67311 - protein, 605 aa, Streptococcus pneumoniae; identical to SEQ ID NO: 64133

SEQ ID NO: 67312 - protein, 695 aa, Streptococcus pneumoniae; identical to SEQ ID NO: 64780

SEQ ID NO: 67313 - protein, 605 aa, Streptococcus pneumoniae; identical to SEQ ID NO: 64781

SEQ ID NO: 67314 - protein, 699 aa, Streptococcus pneumoniae; identical to SEQ ID NO: 64132

SEQ ID NO: 67315 - protein, 605 aa, Streptococcus pneumoniae; identical to SEQ ID NO: 64133

SEQ ID NO: 67316 - protein, 689 aa, Streptococcus pneumoniae; identical to SEQ ID NO: 62612

SEQ ID NO: 67317 - protein, 605 aa, Streptococcus pneumoniae; identical to SEQ ID NO: 62613

SEQ ID NO: 67318 - protein, 699 aa, Streptococcus pneumoniae; identical to SEQ ID NO: 64132

SEQ ID NO: 67319 - protein, 605 aa, Streptococcus pneumoniae; identical to SEQ ID NO: 64133

SEQ ID NO: 67320 - protein, 689 aa, Streptococcus pneumoniae; identical to SEQ ID NO: 62612

SEQ ID NO: 67321 - protein, 605 aa, Streptococcus pneumoniae; identical to SEQ ID NO: 62783

SEQ ID NO: 67322 - protein, 607 aa, Salmonella enterica subsp. enterica serovar Typhi; identical to SEQ ID NO: 66932

SEQ ID NO: 67323 - protein, 630 aa, Salmonella enterica subsp. enterica serovar Typhi; identical to SEQ ID NO: 66933

SEQ ID NO: 67324 - protein, 689 aa, Streptococcus pneumoniae; identical to SEQ ID NO: 62612

SEQ ID NO: 67325 - protein, 605 aa, Streptococcus pneumoniae; identical to SEQ ID NO: 62783

SEQ ID NO: 67326 - protein, 695 aa, Streptococcus pneumoniae; identical to SEQ ID NO: 64780

SEQ ID NO: 67327 - protein, 605 aa, Streptococcus pneumoniae; identical to SEQ ID NO: 64781

SEQ ID NO: 67328 - protein, 695 aa, Streptococcus pneumoniae; identical to SEQ ID NO: 64780

SEQ ID NO: 67329 - protein, 605 aa, Streptococcus pneumoniae; identical to SEQ ID NO: 66879

SEQ ID NO: 67330 - protein, 699 aa, Streptococcus pneumoniae; identical to SEQ ID NO: 66962

SEQ ID NO: 67331 - protein, 605 aa, Streptococcus pneumoniae; identical to SEQ ID NO: 66963

SEQ ID NO: 67332 - protein, 699 aa, Streptococcus pneumoniae; identical to SEQ ID NO: 64132

SEQ ID NO: 67333 - protein, 605 aa, Streptococcus pneumoniae; identical to SEQ ID NO: 64133

SEQ ID NO: 67334 - protein, 689 aa, Streptococcus pneumoniae; identical to SEQ ID NO: 62612

SEQ ID NO: 67335 - protein, 605 aa, Streptococcus pneumoniae; identical to SEQ ID NO: 62783

SEQ ID NO: 67336 - protein, 699 aa, Streptococcus pneumoniae; identical to SEQ ID NO: 66962

SEQ ID NO: 67337 - protein, 605 aa, Streptococcus pneumoniae; identical to SEQ ID NO: 66963

SEQ ID NO: 67338 - protein, 695 aa, Streptococcus pneumoniae; identical to SEQ ID NO: 64780

SEQ ID NO: 67339 - protein, 605 aa, Streptococcus pneumoniae; identical to SEQ ID NO: 64781

SEQ ID NO: 67340 - protein, 695 aa, Streptococcus pneumoniae; identical to SEQ ID NO: 64780

SEQ ID NO: 67341 - protein, 605 aa, Streptococcus pneumoniae; identical to SEQ ID NO: 66879

SEQ ID NO: 67342 - protein, 689 aa, Streptococcus pneumoniae; identical to SEQ ID NO: 62612

SEQ ID NO: 67343 - protein, 605 aa, Streptococcus pneumoniae; identical to SEQ ID NO: 62613

SEQ ID NO: 67344 - protein, 699 aa, Streptococcus pneumoniae; identical to SEQ ID NO: 64132

SEQ ID NO: 67345 - protein, 605 aa, Streptococcus pneumoniae; identical to SEQ ID NO: 64133

SEQ ID NO: 67346 - protein, 689 aa, Streptococcus pneumoniae; identical to SEQ ID NO: 62612

SEQ ID NO: 67347 - protein, 605 aa, Streptococcus pneumoniae; identical to SEQ ID NO: 62783

SEQ ID NO: 67348 - protein, 689 aa, Streptococcus pneumoniae; identical to SEQ ID NO: 62612

SEQ ID NO: 67349 - protein, 605 aa, Streptococcus pneumoniae; identical to SEQ ID NO: 62613

SEQ ID NO: 67350 - protein, 689 aa, Streptococcus pneumoniae; identical to SEQ ID NO: 62612

SEQ ID NO: 67351 - protein, 605 aa, Streptococcus pneumoniae; identical to SEQ ID NO: 62783

SEQ ID NO: 67352 - protein, 610 aa, Streptococcus pneumoniae
MKLTKMVINNFRSFGEYQAINFNNQTVLIGNNSSGKTTVLQALSKLFSDKQSDRIIRKSDFHLPKGLRPGENTRNFFIETIFEFDELDGTVYGSAIPTFFEHFTVSQDGAKPFLRIRLESSWEDDGTVEGSIDTQIYYISSDEDTIRDEDKHRAPRKDLDKIRVLYVPASRMPEKELGNASGSMLSRLVNSINWTEDEINEIKDKIDELNKTFLSENGALTQINNEIQKSWELYHEDNRFSQAELIINSSEMAAALRQIALKFSPTTTEEAFTVSDLGDGLRSIFYFSLVDSILDIELEITKDREENPDNPRFKLVPPILTILAIEEPENHIAPHHIGKLIKRFKQLGNNDNSQLILTSHSPVIVKRIDPEDLRYLRIENNDSVLQTIVSDIQLPQSSDESYKYIKGAIQAYPELYFAKLVVLGEGDSEELLLPKFFDLLGLEIDSSQISVVPLGGRHVNYFWKLLNALRIPHITLLDLDNERYGGGWGRIQYAIKQLILNGVAKEKLVTVTTESQKSRVLDDDEIDRIKDWKIDRPDNQWLEGWIKMLEKFNVFFSAPLDIDFLMLQHYKNYYLDMLSSKEGPVVSYADSGGNSKKVKLTDLDCIDKLS

SEQ ID NO: 67353 - protein, 605 aa, Streptococcus pneumoniae; identical to SEQ ID NO: 66963

SEQ ID NO: 67354 - protein, 689 aa, Streptococcus pneumoniae; identical to SEQ ID NO: 62612

SEQ ID NO: 67355 - protein, 605 aa, Streptococcus pneumoniae; identical to SEQ ID NO: 62783

SEQ ID NO: 67356 - protein, 699 aa, Streptococcus pneumoniae; identical to SEQ ID NO: 64132

SEQ ID NO: 67357 - protein, 605 aa, Streptococcus pneumoniae; identical to SEQ ID NO: 64133

SEQ ID NO: 67358 - protein, 689 aa, Streptococcus pneumoniae; identical to SEQ ID NO: 62612

SEQ ID NO: 67359 - protein, 605 aa, Streptococcus pneumoniae; identical to SEQ ID NO: 62783

SEQ ID NO: 67360 - protein, 695 aa, Streptococcus pneumoniae; identical to SEQ ID NO: 66982

SEQ ID NO: 67361 - protein, 605 aa, Streptococcus pneumoniae; identical to SEQ ID NO: 66879

SEQ ID NO: 67362 - protein, 699 aa, Streptococcus pneumoniae; identical to SEQ ID NO: 64132

SEQ ID NO: 67363 - protein, 605 aa, Streptococcus pneumoniae; identical to SEQ ID NO: 64133

SEQ ID NO: 67364 - protein, 689 aa, Streptococcus pneumoniae; identical to SEQ ID NO: 62612

SEQ ID NO: 67365 - protein, 605 aa, Streptococcus pneumoniae; identical to SEQ ID NO: 62613

SEQ ID NO: 67366 - protein, 689 aa, Streptococcus pneumoniae; identical to SEQ ID NO: 67080

SEQ ID NO: 67367 - protein, 605 aa, Streptococcus pneumoniae; identical to SEQ ID NO: 67081

SEQ ID NO: 67368 - protein, 585 aa, Streptococcus pneumoniae; identical to SEQ ID NO: 66870

SEQ ID NO: 67369 - protein, 512 aa, Streptococcus pneumoniae; identical to SEQ ID NO: 62977

SEQ ID NO: 67370 - protein, 695 aa, Streptococcus pneumoniae; identical to SEQ ID NO: 64780

SEQ ID NO: 67371 - protein, 605 aa, Streptococcus pneumoniae; identical to SEQ ID NO: 64781

SEQ ID NO: 67372 - protein, 641 aa, Salmonella enterica; identical to SEQ ID NO: 62984
  subsp. enterica serovar Typhimurium str. DT104

SEQ ID NO: 67373 - protein, 553 aa, Salmonella enterica; identical to SEQ ID NO: 62985
  subsp. enterica serovar Typhimurium str. DT104

SEQ ID NO: 67374 - protein, 641 aa, Salmonella enterica; identical to SEQ ID NO: 62984
  subsp. enterica serovar Typhimurium str. DT104

SEQ ID NO: 67375 - protein, 553 aa, Salmonella enterica; identical to SEQ ID NO: 62985
  subsp. enterica serovar Typhimurium str. DT104

SEQ ID NO: 67376 - protein, 689 aa, Streptococcus pneumoniae; identical to SEQ ID NO: 62612

SEQ ID NO: 67377 - protein, 605 aa, Streptococcus pneumoniae; identical to SEQ ID NO: 62783

SEQ ID NO: 67378 - protein, 695 aa, Streptococcus pneumoniae; identical to SEQ ID NO: 64780

SEQ ID NO: 67379 - protein, 605 aa, Streptococcus pneumoniae; identical to SEQ ID NO: 66879

SEQ ID NO: 67380 - protein, 699 aa, Streptococcus pneumoniae; identical to SEQ ID NO: 66962

SEQ ID NO: 67381 - protein, 605 aa, Streptococcus pneumoniae; identical to SEQ ID NO: 66963

SEQ ID NO: 67382 - protein, 699 aa, Streptococcus pneumoniae; identical to SEQ ID NO: 64132

SEQ ID NO: 67383 - protein, 605 aa, Streptococcus pneumoniae; identical to SEQ ID NO: 64133

SEQ ID NO: 67384 - protein, 641 aa, Salmonella enterica; identical to SEQ ID NO: 62984
  subsp. enterica serovar Typhimurium str. DT104

SEQ ID NO: 67385 - protein, 553 aa, Salmonella enterica; identical to SEQ ID NO: 62985
  subsp. enterica serovar Typhimurium str. DT104

SEQ ID NO: 67386 - protein, 729 aa, Staphylococcus aureus; identical to SEQ ID NO: 62500

SEQ ID NO: 67387 - protein, 597 aa, Staphylococcus aureus; identical to SEQ ID NO: 66639

SEQ ID NO: 67388 - protein, 689 aa, Streptococcus pneumoniae; identical to SEQ ID NO: 62612

SEQ ID NO: 67389 - protein, 605 aa, Streptococcus pneumoniae; identical to SEQ ID NO: 62783

SEQ ID NO: 67390 - protein, 729 aa, Staphylococcus aureus; identical to SEQ ID NO: 62500

SEQ ID NO: 67391 - protein, 597 aa, Staphylococcus aureus; identical to SEQ ID NO: 66639

SEQ ID NO: 67392 - protein, 699 aa, Streptococcus pneumoniae; identical to SEQ ID NO: 64132

SEQ ID NO: 67393 - protein, 605 aa, Streptococcus pneumoniae; identical to SEQ ID NO: 64133

SEQ ID NO: 67394 - protein, 695 aa, Streptococcus pneumoniae; identical to SEQ ID NO: 64780

SEQ ID NO: 67395 - protein, 605 aa, Streptococcus pneumoniae; identical to SEQ ID NO: 64781

SEQ ID NO: 67396 - protein, 695 aa, Streptococcus pneumoniae; identical to SEQ ID NO: 64780

SEQ ID NO: 67397 - protein, 605 aa, Streptococcus pneumoniae; identical to SEQ ID NO: 64781

SEQ ID NO: 67398 - protein, 699 aa, Streptococcus pneumoniae; identical to SEQ ID NO: 64132

SEQ ID NO: 67399 - protein, 605 aa, Streptococcus pneumoniae; identical to SEQ ID NO: 64133

SEQ ID NO: 67400 - protein, 585 aa, Streptococcus pneumoniae; identical to SEQ ID NO: 62976

SEQ ID NO: 67401 - protein, 512 aa, Streptococcus pneumoniae; identical to SEQ ID NO: 62977

SEQ ID NO: 67402 - protein, 689 aa, Streptococcus pneumoniae; identical to SEQ ID NO: 62612

SEQ ID NO: 67403 - protein, 605 aa, Streptococcus pneumoniae; identical to SEQ ID NO: 62613

SEQ ID NO: 67404 - protein, 699 aa, Streptococcus pneumoniae; identical to SEQ ID NO: 64132

SEQ ID NO: 67405 - protein, 605 aa, Streptococcus pneumoniae; identical to SEQ ID NO: 64133

SEQ ID NO: 67406 - protein, 689 aa, Streptococcus pneumoniae; identical to SEQ ID NO: 62612

SEQ ID NO: 67407 - protein, 605 aa, Streptococcus pneumoniae
MVKSEEWFPKGDIILEETALGAVKDVTNCLVIAGPGAGKTELLAQKLDYLFSTNKCVSPKKILALSFKTDAASNLKERVKKRYGDEYASRFTSLTYSAFEKRILDQFRDVLPEDIRPSRDYLIEDWYTIKELLSMNGINVNGWRMSDIRRYVENIILNNGDNHKFKTDLLKGTQDNKPVLLYRQITKLSTQIIDTNEYIRKALQMTYDFVFLDEFQDTTYAQYDLLKTCFLGSSCKLTAVGDDKQAIMRWAGAKPDIFPDYIRDFNPNEYQLLMNHRSVPKLVEFQKEVHQILNSNHSSIQTNNYPEFQEGEITLFEFENESLEAKLIANDIELKIQGGIRPSEICILAKQKVGIYSFELISILNSKGIKARIENEYQDILKDPTCNLLLDLISCSQGKRDPLIWENISNFYGNINGIDELTDELILAKSYKEIDNIVSDITYLISNFIPNEESMLKLIDCIIEKIDEKRIISNFSTYNGKSDLDIIVKNFSKLLYIEYSQTQGEWLDTVSSFKGENSIPIMTIHKSKGLEYEVVYFLGLEDSAFWSFNNQPEEDKSAFFVALSRAKNHLIFTYCKLRNNSPQNNRNINEIYSLLTQSNLVDVIN

SEQ ID NO: 67408 - protein, 689 aa, Streptococcus pneumoniae; identical to SEQ ID NO: 62612

SEQ ID NO: 67409 - protein, 605 aa, Streptococcus pneumoniae; identical to SEQ ID NO: 62783

SEQ ID NO: 67410 - protein, 695 aa, Streptococcus pneumoniae; identical to SEQ ID NO: 64780

SEQ ID NO: 67411 - protein, 605 aa, Streptococcus pneumoniae; identical to SEQ ID NO: 64781

SEQ ID NO: 67412 - protein, 689 aa, Streptococcus pneumoniae; identical to SEQ ID NO: 62612

SEQ ID NO: 67413 - protein, 605 aa, Streptococcus pneumoniae; identical to SEQ ID NO: 62613

SEQ ID NO: 67414 - protein, 624 aa, Yersinia pseudotuberculosis
MYLAELTIKNFRKLREATLKFQPGLNVLVGPNNVGKSAVVDALRTLLAGHDETYPRLDGSDRHRPHEGDPTGDISFHFVFRDLSLEDEADFIAALKPNGDKNMEAHIHVQYTDMDKTGRFKVRRWCGDHPEVSLTSDMMENLRGVYLPPLRDAAQGLRPNRNSQLARLLHLLTDDAGRDTINTALKQLDETLKQDKSIQSTHKAISTRHDSMMGAQLAQELAVGLSVTDFQRLSSRLTLTAETMEIEKNGLGFNNLIFMAVVLSELAKNTDSAFRSLIIEEPEAHLHPQLQRVLLQYLAGIPTGEGEKPVQLFVTSHSPNFASNSKLDSLVCLIENEAGVETFFPRDIKFEKGKREKLERYLDVTRAELFFARRVIFVEGAAELMLIDALAKRMNFDLREYGVSLISVEGLNFDSFLPLFGEQGLRIPVAVVTDADPFEEEEVEAVAEGEQAEEEIDDLLSEAAYQEETDAPDDEEPTGDAEKKKKVKRKEVYPALGDQVRLSANTIKMKNLEDDFVKVFHGLKTLEYDLALIEANRDPMLTALADPHPKISKALRKIVDTQPDNTAKTKALFCGMFERKGNGNIQKGRFAQALAEQISKENGFEVPEYLKKAIQHVCQGVVKP

SEQ ID NO: 67415 - protein, 575 aa, Yersinia pseudotuberculosis
MKLSKEQIDIIEAPLGPIAVTACAGSGKTATAIRRLIAIRQKMQNSRGRVVLLSFSNVAVNTFNAGYAELAAGLPDDANRRRVEVDTLDGFFTKHILRPHAYRTMAAPQAAYLVSGSEPFLARFKYWREGNPPLPLKDIKLIILDGDFVFYSDTRNAPEILDKGKVLKIIHDLGCLGAYTHEIGRYWVYRTLDSQPAVLRALAARYPQILVDESQDLGTLHKEILKLLITAGVQVTLIGDVNQGIYGFAGADGEFLKSYEDRAEVTGYKLTRNYRSLPPIINIANILCGRHDEPDRLEEQGGAYFIGYKDSELSKLTEAFKAHIDELGMQHQDAVILCRGADRAAVIAGKTAPPGQGMVKVLAEASLLRDQHSNYHGCFKLVCRAIINLLEDVPHGLSSGLQGLSHDDEMKGLKRLLWRFSRSADVGLPSSALIAKTDWHSKLLTNVRVLLSEIEKHYGYKVAGKVGTKLTKKSLPDQPLANAVSAQGHGLRVETVHQVKGESIDAVMYVAKKANIKALLSGTGDEEGRIGYVAITRAKNLFWLAVPQSCLKELKDNLINAGFQERIKPAVIDPA

SEQ ID NO: 67416 - protein, 689 aa, Streptococcus pneumoniae; identical to SEQ ID NO: 62612

SEQ ID NO: 67417 - protein, 605 aa, Streptococcus pneumoniae; identical to SEQ ID NO: 62783

SEQ ID NO: 67418 - protein, 689 aa, Streptococcus pneumoniae; identical to SEQ ID NO: 62612

SEQ ID NO: 67419 - protein, 605 aa, Streptococcus pneumoniae; identical to SEQ ID NO: 62783

SEQ ID NO: 67420 - protein, 585 aa, Streptococcus pneumoniae; identical to SEQ ID NO: 62976

SEQ ID NO: 67421 - protein, 512 aa, Streptococcus pneumoniae; identical to SEQ ID NO: 62977

SEQ ID NO: 67422 - protein, 699 aa, Streptococcus pneumoniae; identical to SEQ ID NO: 64132

SEQ ID NO: 67423 - protein, 605 aa, Streptococcus pneumoniae; identical to SEQ ID NO: 64133

SEQ ID NO: 67424 - protein, 689 aa, Streptococcus pneumoniae; identical to SEQ ID NO: 62612

SEQ ID NO: 67425 - protein, 605 aa, Streptococcus pneumoniae; identical to SEQ ID NO: 62783

SEQ ID NO: 67426 - protein, 634 aa, Yersinia pseudotuberculosis
MKLETIRLLGFQSFGQEPTELSLEDITYLIGPNGSGKTAVLQALCRLFAFDPSLRRVQRSDFHVHFEEEEVPPERELWIEADFLFHELAEDEDNSTVAPHFGHMRLDEPEGIPRVRFRLTATMGLDGDIDENLVYVLDINADGSPQNTAQVPRAERNHIQVHYLPARRDPADHITYGANALLGRLLRAVRWDAERDTIKGLTDQISDSLAANPSVNAFSESLKTTWATLHKGKFFADPKITFVASEIEALLRHLSVSFTPGHDGSLVDFSRLSDGQKSMLYLSLVLSSQAIGRAVLAEEDVSFDPDKLRPPVFTLIALEEPENSLSPHYLGRIVCALNTMTKNVDAQALIATHAPTMLRRVAPELIRYLRLTEARKTRVTCIKLPEKTDDAHKFVREAVQAFPEIYFSRLVVLGEGDSEEIVLPRLLQAKGAPVDESAITIAPLGGRHVNHFWRLLSALKIPYFTLLDLDVARHQAGWGRIKYANDQLGEHRPKKKLPEDHHIPKWNSATNKVREFSNYCELLEERGVFFSSPMDLDFSMLLAYPEAYDVDKEKPDESTIKAVLGKSHYDSSQYSEDELTLFSTYHKRFKLGSKPAAHIEALTQLTDTELLENMPESLSRLADVVIAKLEELPE

SEQ ID NO: 67427 - protein, 557 aa, Yersinia pseudotuberculosis
MIAAEAWQPADGLTLEPNAKRAAKARKRCLALTAGPGAGKTEMLAQRADFLLRTGTCRYPKRILAISFKVDASRNLKERVERRCGSNLASRFDSYTFHAFAKRIIDRFRPVLTGKDALDAGYTIVDKKNGPSRTQIEFGDLVPLAIQILQTSKIARNAIQQTYSDIFLDEFQDCTNLQYELVKLAFQGTSLRLTAVGDTKQKIMAWAGALDGIFQTFVNDFNAVPLNMYRNFRSKPQLLRVQNEIIRTLDPDSVMPDEQLDGDEGEVYAWRFEDSCKEAVYLADLINGWINTEQLPPAEIAVLVSKQLELYADHLMTELDARGIPYRNEQQLQDITIEPAARLIVDYLSCLYGKREPKAWIRLMNQLIPFADEEIQSSARKDLDLLIKKQRKKVSDARSTDSPFSDWVQLAIEFIKYIGTKMLVALSPDYETRARLKDVIRETFARIKELLKSDPDLPKALGRFADDQAVRILTIHKSKGLEFDSVIILGIESQTFWGKPDAERCAFFVGISRAKKRLVLTVSDRRETPPSNPYRWQENRTQHEEFIGYVTPFLRIQ

SEQ ID NO: 67428 - protein, 689 aa, Streptococcus pneumoniae; identical to SEQ ID NO: 62612

SEQ ID NO: 67429 - protein, 605 aa, Streptococcus pneumoniae; identical to SEQ ID NO: 62613

SEQ ID NO: 67430 - protein, 689 aa, Streptococcus pneumoniae; identical to SEQ ID NO: 62612

SEQ ID NO: 67431 - protein, 605 aa, Streptococcus pneumoniae; identical to SEQ ID NO: 62613

SEQ ID NO: 67432 - protein, 689 aa, Streptococcus pneumoniae; identical to SEQ ID NO: 62612

SEQ ID NO: 67433 - protein, 605 aa, Streptococcus pneumoniae; identical to SEQ ID NO: 62613

SEQ ID NO: 67434 - protein, 746 aa, Streptococcus agalactiae; identical to SEQ ID NO: 63142

SEQ ID NO: 67435 - protein, 319 aa, Streptococcus agalactiae
MTYTISTENKQLELDIQKDINECLDNFESFCFDAGAGAGKTYALQKSIEHILKTEGENLKLRNQKILCITYTNAAKDEILSRIGKNSAILASTIHEFLWGFISIQQELLTIEHEKKIKEELNGIEQKIIDNPLFGSVNLVDFHNAISDEEFLKVFYSTPISPAGDFKSMIKGYSEYFSPYLSNVNKFSSLVKNVDKKYKLEETLKEIKNKKSKKIIYNPIRNRDKLENYVISHDTLLLYCRNIITSQNLLKRLFSDRYPYVLVDEYQDTDEKVVDIIDSIRKFTICKKNFVVGFFGDTLQNIYSSGVGKLPNKEEYPWC

SEQ ID NO: 67436 - protein, 699 aa, Streptococcus pneumoniae; identical to SEQ ID NO: 64132

SEQ ID NO: 67437 - protein, 605 aa, Streptococcus pneumoniae; identical to SEQ ID NO: 64133

SEQ ID NO: 67438 - protein, 659 aa, Yersinia pseudotuberculosis
MKITQMEIKGFKSFDNVGQTININSFTSLIGGNGTGKTAVLLALTRMFGVKSSDRIVQVEDFYVPPGDEIEDQNEREISIRVRFEFAELKDGEDDSVADFFKHLVSSEADEIPYCIAKLKAKWTKTNLAEGDIESDLVWEIGQYEKNITAYERSKIHVHYVPAYRDPAQQLKQTAGTIMHRLINAVEWSEQMGTTVEEVALSIGKQFQEEVGIKTITSSLGKNWKTLFSGGYFEELKIQPVMNGIEDVLKHIDTVFMPTPVTQPLPTERLSDGMKSLFYLSLVKSAFDIEDEIINSKEKELSISVEALDPPNLTIILIEEPENHLSPQYLGRIVKLCEEISENDRAQVILTTHAPALLNRVEPEDIRYFRLQDNKNTIVKEIILPKKVEDDVDKVDTFTYVKEAVKAYPEIYFAKVIILGEGDSEQIVIPKVAQVNGIELDTSLITFAPLGGRFVNHFWKLLNELSIPHVTLLDYDFRRGGGGWGRIKYIINQLIEVGCDEDIVLQTEGGKLTSKELKGMHKWDENEKDEKSWLDLFETYNVYFSYPYDLDWIMLNAFPASYHSFIPDNGGPKILKKTDAEYIDKTKNAIASVLKKDAEDIDIDSFDDHEQYYWYRYLFLGRGKPLSHNYVLNKLDNDSLKNNSPIVLKDLIEKVRGLL

SEQ ID NO: 67439 - protein, 615 aa, Yersinia pseudotuberculosis
MPIIKDDNWVLKDIQEVEDEAMRVIRNSTNHNLVLAGPGAGKTELLAQKACFLIETGKCRNKKIIALSFKKDAAKNLQDRVNSRLDSKYRHKFESTTFDAFCKSIVDRFKSTLPVAYRPSDDYEIYFPENKKFVEEVKRDAVGFEGLTAEELKKLKHTNFENNYIVMPYKKGEEHSVDARIKRFVWFRLLEGKSRVSFKMINFLSNYIIRNNKFLSNAINSTYEYAFIDEFQDTTYQQYEIFKSIFLDKKIKITAVGDTKQRIMGWAGALHSAFEFFKNDFAIEHHNELLSNRRSLKNLISYQRMMEAFMNHADNKPEMELIENEGSAKLIQFDESNIEGAYIALCIQKWIEEGVDEREICILFRNPSKHYTDKIISSLQYLEIKCRIENTYQELLNEAIVQLILKMLMFTCDKKSIEGWNSTMELLCNIRGVNKSRDITRLEKELSRFIKSNKDINGNVVDYIYGLISIFGIDEIKSYFPQYISGNGLDHAINSLSQNLETLGIKDNKSAAIDMLLGNKTIPLMTIHKSKGLEFKKVIIVGLEPGAYFGDEEEQIENQKTVFVGFSRAIEEVILTRCAKRVNWWDELCSQNFSEIPLITDMLSYCGLEAEIYKD

SEQ ID NO: 67440 - protein, 712 aa, Yersinia enterocolitica; identical to SEQ ID NO: 63712

SEQ ID NO: 67441 - protein, 599 aa, Yersinia enterocolitica; identical to SEQ ID NO: 63713

SEQ ID NO: 67442 - protein, 689 aa, Streptococcus pneumoniae; identical to SEQ ID NO: 62612

SEQ ID NO: 67443 - protein, 605 aa, Streptococcus pneumoniae; identical to SEQ ID NO: 62783

SEQ ID NO: 67444 - protein, 695 aa, Streptococcus pneumoniae; identical to SEQ ID NO: 64780

SEQ ID NO: 67445 - protein, 605 aa, Streptococcus pneumoniae; identical to SEQ ID NO: 64781

SEQ ID NO: 67446 - protein, 695 aa, Streptococcus pneumoniae; identical to SEQ ID NO: 64780

SEQ ID NO: 67447 - protein, 605 aa, Streptococcus pneumoniae; identical to SEQ ID NO: 66879

SEQ ID NO: 67448 - protein, 689 aa, Streptococcus pneumoniae; identical to SEQ ID NO: 62612

SEQ ID NO: 67449 - protein, 605 aa, Streptococcus pneumoniae; identical to SEQ ID NO: 62613

SEQ ID NO: 67450 - protein, 695 aa, Streptococcus pneumoniae; identical to SEQ ID NO: 64780

SEQ ID NO: 67451 - protein, 605 aa, Streptococcus pneumoniae; identical to SEQ ID NO: 64781

SEQ ID NO: 67452 - protein, 689 aa, Streptococcus pneumoniae; identical to SEQ ID NO: 62612

SEQ ID NO: 67453 - protein, 605 aa, Streptococcus pneumoniae; identical to SEQ ID NO: 62783

SEQ ID NO: 67454 - protein, 689 aa, Streptococcus pneumoniae; identical to SEQ ID NO: 62612

SEQ ID NO: 67455 - protein, 605 aa, Streptococcus pneumoniae; identical to SEQ ID NO: 62783

SEQ ID NO: 67456 - protein, 729 aa, Staphylococcus aureus; identical to SEQ ID NO: 62500

SEQ ID NO: 67457 - protein, 597 aa, Staphylococcus aureus; identical to SEQ ID NO: 66639

SEQ ID NO: 67458 - protein, 689 aa, Streptococcus pneumoniae; identical to SEQ ID NO: 62612

SEQ ID NO: 67459 - protein, 605 aa, Streptococcus pneumoniae; identical to SEQ ID NO: 62783

SEQ ID NO: 67460 - protein, 695 aa, Streptococcus pneumoniae; identical to SEQ ID NO: 64780

SEQ ID NO: 67461 - protein, 605 aa, Streptococcus pneumoniae; identical to SEQ ID NO: 66879

SEQ ID NO: 67462 - protein, 695 aa, Streptococcus pneumoniae; identical to SEQ ID NO: 64780

SEQ ID NO: 67463 - protein, 605 aa, Streptococcus pneumoniae; identical to SEQ ID NO: 64781

SEQ ID NO: 67464 - protein, 689 aa, Streptococcus pneumoniae; identical to SEQ ID NO: 62612

SEQ ID NO: 67465 - protein, 605 aa, Streptococcus pneumoniae; identical to SEQ ID NO: 62783

SEQ ID NO: 67466 - protein, 706 aa, Yersinia mollaretii
MKICSIEIKNYRLLTEFRLDLEDNLSLVIGKNNTGKTSLLSALEKLYAETRKISFDDFNVKLRDRLKAFVGGEKALPNEDVYEPLGVELRLVLVYEDEDDLGQVSPLIMSLDPDDKSILLGFEYKISHSQLVSFRNDFLEERDNYDDDVLLYMAEKHKKYFVGISRRSYLSNDLSVFTDLIKEKISLDEVISFKAISAKRNVTNRENDKTLSGQTADIYKITEESEEQKDTVNRFKKTLRGADKNLNGIYEEMFSKVLKSVERFGGISQYETSITIASTLQHQELLDGNTTVFYRHETHDLPEHYNGLGYMNLISMIFEIELLMTSFRRSLLERPAAVNLLFIEEPEAHTHPQMQYVFIKNIKDLLEEGVVREDGLVVNLQTVISTHSSHIVAECNFDDIKYMKRKGGVVNCSNLKDLKKEYDREDSKGIDGHYKFLKQYLTLNRAELFFADKAIFVEGDTERVLLPAMMKKIDEEYPENEVAPLTSQNVSIVEVGAHSQVFEKFISFLGIKTLILTDIDTGKTVPDLDSAGNHKRTQKDEPKYTTEKCSPMDSDVSHTSNNALCFFHSKEREDIKYFLSLFKDDKKFLFDGEKWVRDKIGQIFTAFQIEEEGYRGRSFEDAFFHVNKEFLGTDSVVFPSLIAKHFELYVAGHTTAYEFAEKGVDKKTTLAIDILLNSQTQETPKRTFSNWNTPAYIREGLEWLRK

SEQ ID NO: 67467 - protein, 636 aa, Yersinia mollaretii
MAAQMKKKSYSDETVKILNAVSEGKNFLLSGGAGSGKTYSLIESISGLLENNPLAKVACITYTNTATNEIENRIDNECLKVSTIHDFLWSSIKHFQKELKTVLIDLINDEEKNLFNVISATGEPEKILCIAGDIEYKEFVKLRDGIVSHDQIPVLAHVMFSKFPKLCRILNDSFKFILVDEYQDTSPLVVDILLNCLASVPRRNIVGFFGDSMQSIFEGGIGNLDAYKGNGRAQVHEIYKQQNRRNPTAIINLANKIRTDGLIQVPSDDISAPNMNKGVAKLGSAVFLYSSDESTQVARDYLRWDLSPLNTKELNLTHNLIAVKGGFPNLMRIYDADKILEYVRRLRSYIKSSEPEFNIFDKSLEQVCCELKIGKSGKLLDKVCPTPIQVAYIEAYHENFEAALKLSFESIASIYIDKDMLIDDQKADQSTLGGSGANRDHLIKHLYKIQKVIQLYEEGDFNSFLGATDLKINNHKDKVIIKSAIEGLSQSDGKTIGDVISEAHLNGLVRRDDRLEEFARVKAYVYNQVCKVSYDEFRYLYKYIDGKTPYSTQHKTKGREYDNVLVIMDNGKWNHYNFEEFFLGGGKDSVLSRTRKLVYVCCTRARDNLAMFYPQPSGKVIEKAKDLFGADNVIEL

SEQ ID NO: 67468 - protein, 689 aa, Streptococcus pneumoniae; identical to SEQ ID NO: 62612

SEQ ID NO: 67469 - protein, 605 aa, Streptococcus pneumoniae; identical to SEQ ID NO: 62613

SEQ ID NO: 67470 - protein, 585 aa, Streptococcus pneumoniae; identical to SEQ ID NO: 66870

SEQ ID NO: 67471 - protein, 512 aa, Streptococcus pneumoniae; identical to SEQ ID NO: 62977

SEQ ID NO: 67472 - protein, 689 aa, Streptococcus pneumoniae; identical to SEQ ID NO: 62612

SEQ ID NO: 67473 - protein, 605 aa, Streptococcus pneumoniae; identical to SEQ ID NO: 62783

SEQ ID NO: 67474 - protein, 689 aa, Streptococcus pneumoniae; identical to SEQ ID NO: 62612

SEQ ID NO: 67475 - protein, 605 aa, Streptococcus pneumoniae; identical to SEQ ID NO: 62613

SEQ ID NO: 67476 - protein, 695 aa, Streptococcus pneumoniae; identical to SEQ ID NO: 64780

SEQ ID NO: 67477 - protein, 605 aa, Streptococcus pneumoniae; identical to SEQ ID NO: 64781

SEQ ID NO: 67478 - protein, 645 aa, Streptococcus pneumoniae; identical to SEQ ID NO: 63402

SEQ ID NO: 67479 - protein, 605 aa, Streptococcus pneumoniae; identical to SEQ ID NO: 63191

SEQ ID NO: 67480 - protein, 591 aa, Streptococcus pneumoniae
MKFTKLSIENFRNFESATINIDNKNVIFGMNDIGKTNFLYALRFLFDPELRRNGFGPSDYNNHNVDKNISITITIDLSDFNQSEDTKKLVAAIHGAHTSPPLEEDLFYIQLKSEFNKKEEYGNIVLFWGSDYENLVEIPSRGNVSALDKAFKVFYVNPLVNLDRLFNKNKKLFFEQSEGQSADQDIIDTIKGLTCNVNDEIGKLTTIKKFQEEITKEYKTLRRENVSVELKSEMAIKGFFSDVIPYIKKDDDNDRYYPTSGDGRRKMLSYSIFNYLAKNKYEDKIIIFLIEEPEISLHRSMQISLSKKLFENDTYNYFFLSTHSPEMLYEMNNTRLIRVHSPEKINCCSYLYNVEEPYTSVKRKLNRSLASALFAERVLLVEGPSELTLFEKVLSMVKPDYELEGGFILQVGGIYFKHYTNALKELNIHYIVKTDNDLKRKKKKKGEYELIGLNRCLSLIDETKLDNEFIDIPEGMPDKEEKIFIKEEVQRKKEELYCKHSDIIETLKQNSIYLSRIDLENDLYKVIEDKMKEVFGENPVKQLQDSKLFNMVDLVLELDKQECEDIYNDENFYCLVELTNSTKQEGEDNVI

SEQ ID NO: 67481 - protein, 505 aa, Streptococcus pneumoniae
MLSDKEIREQILKDNGNVIVSAGAGSGKTTLLVKKILEEGKAKNSHYGIAAITFTNKSAADIKEKLGSYDRFKNFVGTADSFVESEVIRPFIVDAFGKHYSDNFKVDYYRNKFRSAKKGLEILRNKNVLGTFERDRDQDNHFNKMNFKFQVAVLILENSLAARQYIKAKYRRLYVDEYQDTDLDMNKFYLYLKDKLGIKLFFVGDLKQSIYKWRGAEPENFRNLLSDDSDFNKYELTVNFRCAQDIQNYSKLFIENEVIEEKDEITSVLGIYSDFDLPDVVNNIMYNKLLKKKTFAILVRNNSQAKQYKEELTALGKDFTYIPPNPLDVTTPNVVFLRELVKYIKNENYSLYELQNNIYRELSKDERTTLKTMVEKLETCKDKDSIDDCLIEIYGLLGMGIYEGELDNFSSVLLTDEYDSAFDTREKSYYIMTIHSAKGLEFDNVLYAAGDLNLWEDDFSNLHYVAITRAIEKLFVIIDSREYEREVNKLIREKEIEKIMNVIQI

SEQ ID NO: 67482 - protein, 641 aa, Salmonella enterica; identical to SEQ ID NO: 62984
  subsp. enterica serovar Typhimurium str. DT104

SEQ ID NO: 67483 - protein, 553 aa, Salmonella enterica; identical to SEQ ID NO: 62985
  subsp. enterica serovar Typhimurium str. DT104

SEQ ID NO: 67484 - protein, 689 aa, Streptococcus pneumoniae; identical to SEQ ID NO: 62612

SEQ ID NO: 67485 - protein, 605 aa, Streptococcus pneumoniae; identical to SEQ ID NO: 62613

SEQ ID NO: 67486 - protein, 695 aa, Streptococcus pneumoniae; identical to SEQ ID NO: 64780

SEQ ID NO: 67487 - protein, 605 aa, Streptococcus pneumoniae; identical to SEQ ID NO: 64781

SEQ ID NO: 67488 - protein, 699 aa, Streptococcus pneumoniae; identical to SEQ ID NO: 64132

SEQ ID NO: 67489 - protein, 605 aa, Streptococcus pneumoniae; identical to SEQ ID NO: 64133

SEQ ID NO: 67490 - protein, 695 aa, Streptococcus pneumoniae; identical to SEQ ID NO: 64780

SEQ ID NO: 67491 - protein, 605 aa, Streptococcus pneumoniae; identical to SEQ ID NO: 64781

SEQ ID NO: 67492 - protein, 695 aa, Streptococcus pneumoniae; identical to SEQ ID NO: 64780

SEQ ID NO: 67493 - protein, 605 aa, Streptococcus pneumoniae; identical to SEQ ID NO: 64781

SEQ ID NO: 67494 - protein, 607 aa, Salmonella enterica subsp. enterica serovar Typhi; identical to SEQ ID NO: 66864

SEQ ID NO: 67495 - protein, 630 aa, Salmonella enterica subsp. enterica serovar Typhi; identical to SEQ ID NO: 62591

SEQ ID NO: 67496 - protein, 585 aa, Streptococcus pneumoniae; identical to SEQ ID NO: 62976

SEQ ID NO: 67497 - protein, 512 aa, Streptococcus pneumoniae; identical to SEQ ID NO: 62977

SEQ ID NO: 67498 - protein, 689 aa, Streptococcus pneumoniae; identical to SEQ ID NO: 67080

SEQ ID NO: 67499 - protein, 605 aa, Streptococcus pneumoniae; identical to SEQ ID NO: 67081

SEQ ID NO: 67500 - protein, 689 aa, Streptococcus pneumoniae; identical to SEQ ID NO: 62612

SEQ ID NO: 67501 - protein, 605 aa, Streptococcus pneumoniae; identical to SEQ ID NO: 62783

SEQ ID NO: 67502 - protein, 689 aa, Streptococcus pneumoniae; identical to SEQ ID NO: 62612

SEQ ID NO: 67503 - protein, 605 aa, Streptococcus pneumoniae; identical to SEQ ID NO: 62613

SEQ ID NO: 67504 - protein, 689 aa, Streptococcus pneumoniae; identical to SEQ ID NO: 62612

SEQ ID NO: 67505 - protein, 605 aa, Streptococcus pneumoniae; identical to SEQ ID NO: 62613

SEQ ID NO: 67506 - protein, 689 aa, Streptococcus pneumoniae; identical to SEQ ID NO: 62612

SEQ ID NO: 67507 - protein, 605 aa, Streptococcus pneumoniae; identical to SEQ ID NO: 62783

SEQ ID NO: 67508 - protein, 641 aa, Salmonella enterica; identical to SEQ ID NO: 62984
  subsp. enterica serovar Typhimurium str. DT104

SEQ ID NO: 67509 - protein, 553 aa, Salmonella enterica; identical to SEQ ID NO: 62985
  subsp. enterica serovar Typhimurium str. DT104

SEQ ID NO: 67510 - protein, 695 aa, Streptococcus pneumoniae; identical to SEQ ID NO: 64780

SEQ ID NO: 67511 - protein, 605 aa, Streptococcus pneumoniae; identical to SEQ ID NO: 66879

SEQ ID NO: 67512 - protein, 689 aa, Streptococcus pneumoniae; identical to SEQ ID NO: 62612

SEQ ID NO: 67513 - protein, 605 aa, Streptococcus pneumoniae; identical to SEQ ID NO: 62783

SEQ ID NO: 67514 - protein, 689 aa, Streptococcus pneumoniae; identical to SEQ ID NO: 62612

SEQ ID NO: 67515 - protein, 605 aa, Streptococcus pneumoniae; identical to SEQ ID NO: 62613

SEQ ID NO: 67516 - protein, 729 aa, Staphylococcus aureus; identical to SEQ ID NO: 62500

SEQ ID NO: 67517 - protein, 597 aa, Staphylococcus aureus; identical to SEQ ID NO: 66639

SEQ ID NO: 67518 - protein, 699 aa, Streptococcus pneumoniae; identical to SEQ ID NO: 66962

SEQ ID NO: 67519 - protein, 605 aa, Streptococcus pneumoniae; identical to SEQ ID NO: 66963

SEQ ID NO: 67520 - protein, 689 aa, Streptococcus pneumoniae; identical to SEQ ID NO: 62612

SEQ ID NO: 67521 - protein, 605 aa, Streptococcus pneumoniae; identical to SEQ ID NO: 62783

SEQ ID NO: 67522 - protein, 699 aa, Streptococcus pneumoniae; identical to SEQ ID NO: 64132

SEQ ID NO: 67523 - protein, 605 aa, Streptococcus pneumoniae; identical to SEQ ID NO: 64133

SEQ ID NO: 67524 - protein, 699 aa, Streptococcus pneumoniae; identical to SEQ ID NO: 64132

SEQ ID NO: 67525 - protein, 605 aa, Streptococcus pneumoniae; identical to SEQ ID NO: 64133

SEQ ID NO: 67526 - protein, 699 aa, Streptococcus pneumoniae; identical to SEQ ID NO: 64132

SEQ ID NO: 67527 - protein, 605 aa, Streptococcus pneumoniae; identical to SEQ ID NO: 64133

SEQ ID NO: 67528 - protein, 689 aa, Streptococcus pneumoniae; identical to SEQ ID NO: 62612

SEQ ID NO: 67529 - protein, 605 aa, Streptococcus pneumoniae; identical to SEQ ID NO: 62783

SEQ ID NO: 67530 - protein, 641 aa, Salmonella enterica; identical to SEQ ID NO: 62984
  subsp. enterica serovar Typhimurium str. DT104

SEQ ID NO: 67531 - protein, 553 aa, Salmonella enterica; identical to SEQ ID NO: 62985
  subsp. enterica serovar Typhimurium str. DT104

SEQ ID NO: 67532 - protein, 689 aa, Streptococcus pneumoniae; identical to SEQ ID NO: 67080

SEQ ID NO: 67533 - protein, 605 aa, Streptococcus pneumoniae; identical to SEQ ID NO: 67081

SEQ ID NO: 67534 - protein, 689 aa, Streptococcus pneumoniae; identical to SEQ ID NO: 62612

SEQ ID NO: 67535 - protein, 605 aa, Streptococcus pneumoniae; identical to SEQ ID NO: 62783

SEQ ID NO: 67536 - protein, 689 aa, Streptococcus pneumoniae; identical to SEQ ID NO: 62612

SEQ ID NO: 67537 - protein, 605 aa, Streptococcus pneumoniae; identical to SEQ ID NO: 62613

SEQ ID NO: 67538 - protein, 641 aa, Salmonella enterica; identical to SEQ ID NO: 62984
  subsp. enterica serovar Typhimurium str. DT104

SEQ ID NO: 67539 - protein, 553 aa, Salmonella enterica; identical to SEQ ID NO: 62985
  subsp. enterica serovar Typhimurium str. DT104

SEQ ID NO: 67540 - protein, 689 aa, Streptococcus pneumoniae; identical to SEQ ID NO: 62612

SEQ ID NO: 67541 - protein, 605 aa, Streptococcus pneumoniae; identical to SEQ ID NO: 62613

SEQ ID NO: 67542 - protein, 689 aa, Streptococcus pneumoniae; identical to SEQ ID NO: 62612

SEQ ID NO: 67543 - protein, 605 aa, Streptococcus pneumoniae; identical to SEQ ID NO: 62783

SEQ ID NO: 67544 - protein, 689 aa, Streptococcus pneumoniae; identical to SEQ ID NO: 62612

SEQ ID NO: 67545 - protein, 605 aa, Streptococcus pneumoniae; identical to SEQ ID NO: 62783

SEQ ID NO: 67546 - protein, 689 aa, Streptococcus pneumoniae; identical to SEQ ID NO: 62612

SEQ ID NO: 67547 - protein, 605 aa, Streptococcus pneumoniae; identical to SEQ ID NO: 62783

SEQ ID NO: 67548 - protein, 689 aa, Streptococcus pneumoniae; identical to SEQ ID NO: 62612

SEQ ID NO: 67549 - protein, 605 aa, Streptococcus pneumoniae; identical to SEQ ID NO: 62613

SEQ ID NO: 67550 - protein, 689 aa, Streptococcus pneumoniae; identical to SEQ ID NO: 62612

SEQ ID NO: 67551 - protein, 605 aa, Streptococcus pneumoniae; identical to SEQ ID NO: 62783

SEQ ID NO: 67552 - protein, 689 aa, Streptococcus pneumoniae; identical to SEQ ID NO: 62612

SEQ ID NO: 67553 - protein, 605 aa, Streptococcus pneumoniae; identical to SEQ ID NO: 62783

SEQ ID NO: 67554 - protein, 695 aa, Streptococcus pneumoniae; identical to SEQ ID NO: 64780

SEQ ID NO: 67555 - protein, 605 aa, Streptococcus pneumoniae; identical to SEQ ID NO: 64781

SEQ ID NO: 67556 - protein, 585 aa, Streptococcus pneumoniae; identical to SEQ ID NO: 62976

SEQ ID NO: 67557 - protein, 512 aa, Streptococcus pneumoniae; identical to SEQ ID NO: 62977

SEQ ID NO: 67558 - protein, 689 aa, Streptococcus pneumoniae; identical to SEQ ID NO: 62612

SEQ ID NO: 67559 - protein, 605 aa, Streptococcus pneumoniae; identical to SEQ ID NO: 62783

SEQ ID NO: 67560 - protein, 729 aa, Staphylococcus aureus; identical to SEQ ID NO: 62500

SEQ ID NO: 67561 - protein, 597 aa, Staphylococcus aureus; identical to SEQ ID NO: 66639

SEQ ID NO: 67562 - protein, 689 aa, Streptococcus pneumoniae; identical to SEQ ID NO: 62612

SEQ ID NO: 67563 - protein, 605 aa, Streptococcus pneumoniae; identical to SEQ ID NO: 62783

SEQ ID NO: 67564 - protein, 585 aa, Streptococcus pneumoniae; identical to SEQ ID NO: 62976

SEQ ID NO: 67565 - protein, 512 aa, Streptococcus pneumoniae; identical to SEQ ID NO: 62977

SEQ ID NO: 67566 - protein, 695 aa, Streptococcus pneumoniae; identical to SEQ ID NO: 64780

SEQ ID NO: 67567 - protein, 605 aa, Streptococcus pneumoniae; identical to SEQ ID NO: 64781

SEQ ID NO: 67568 - protein, 689 aa, Streptococcus pneumoniae; identical to SEQ ID NO: 62612

SEQ ID NO: 67569 - protein, 605 aa, Streptococcus pneumoniae; identical to SEQ ID NO: 62613

SEQ ID NO: 67570 - protein, 699 aa, Streptococcus pneumoniae; identical to SEQ ID NO: 64132

SEQ ID NO: 67571 - protein, 605 aa, Streptococcus pneumoniae; identical to SEQ ID NO: 64133

SEQ ID NO: 67572 - protein, 699 aa, Streptococcus pneumoniae; identical to SEQ ID NO: 64132

SEQ ID NO: 67573 - protein, 605 aa, Streptococcus pneumoniae; identical to SEQ ID NO: 64133

SEQ ID NO: 67574 - protein, 695 aa, Streptococcus pneumoniae; identical to SEQ ID NO: 64780

SEQ ID NO: 67575 - protein, 605 aa, Streptococcus pneumoniae; identical to SEQ ID NO: 64781

SEQ ID NO: 67576 - protein, 689 aa, Streptococcus pneumoniae; identical to SEQ ID NO: 62612

SEQ ID NO: 67577 - protein, 605 aa, Streptococcus pneumoniae; identical to SEQ ID NO: 62613

SEQ ID NO: 67578 - protein, 641 aa, Salmonella enterica; identical to SEQ ID NO: 62984
  subsp. enterica serovar Typhimurium str. DT104

SEQ ID NO: 67579 - protein, 553 aa, Salmonella enterica; identical to SEQ ID NO: 62985
  subsp. enterica serovar Typhimurium str. DT104

SEQ ID NO: 67580 - protein, 699 aa, Streptococcus pneumoniae; identical to SEQ ID NO: 64132

SEQ ID NO: 67581 - protein, 605 aa, Streptococcus pneumoniae; identical to SEQ ID NO: 64133

SEQ ID NO: 67582 - protein, 689 aa, Streptococcus pneumoniae; identical to SEQ ID NO: 62612

SEQ ID NO: 67583 - protein, 605 aa, Streptococcus pneumoniae; identical to SEQ ID NO: 62783

SEQ ID NO: 67584 - protein, 689 aa, Streptococcus pneumoniae; identical to SEQ ID NO: 62612

SEQ ID NO: 67585 - protein, 605 aa, Streptococcus pneumoniae; identical to SEQ ID NO: 62783

SEQ ID NO: 67586 - protein, 699 aa, Streptococcus pneumoniae; identical to SEQ ID NO: 64132

SEQ ID NO: 67587 - protein, 605 aa, Streptococcus pneumoniae; identical to SEQ ID NO: 64133

SEQ ID NO: 67588 - protein, 695 aa, Streptococcus pneumoniae; identical to SEQ ID NO: 64780

SEQ ID NO: 67589 - protein, 605 aa, Streptococcus pneumoniae; identical to SEQ ID NO: 66879

SEQ ID NO: 67590 - protein, 699 aa, Streptococcus pneumoniae; identical to SEQ ID NO: 64132

SEQ ID NO: 67591 - protein, 605 aa, Streptococcus pneumoniae; identical to SEQ ID NO: 64133

SEQ ID NO: 67592 - protein, 695 aa, Streptococcus pneumoniae; identical to SEQ ID NO: 64780

SEQ ID NO: 67593 - protein, 605 aa, Streptococcus pneumoniae; identical to SEQ ID NO: 66879

SEQ ID NO: 67594 - protein, 689 aa, Streptococcus pneumoniae; identical to SEQ ID NO: 62612

SEQ ID NO: 67595 - protein, 605 aa, Streptococcus pneumoniae; identical to SEQ ID NO: 62613

SEQ ID NO: 67596 - protein, 689 aa, Streptococcus pneumoniae; identical to SEQ ID NO: 62612

SEQ ID NO: 67597 - protein, 605 aa, Streptococcus pneumoniae; identical to SEQ ID NO: 62613

SEQ ID NO: 67598 - protein, 689 aa, Streptococcus pneumoniae; identical to SEQ ID NO: 62612

SEQ ID NO: 67599 - protein, 605 aa, Streptococcus pneumoniae; identical to SEQ ID NO: 62613

SEQ ID NO: 67600 - protein, 689 aa, Streptococcus pneumoniae; identical to SEQ ID NO: 62612

SEQ ID NO: 67601 - protein, 605 aa, Streptococcus pneumoniae; identical to SEQ ID NO: 62613

SEQ ID NO: 67602 - protein, 695 aa, Streptococcus pneumoniae; identical to SEQ ID NO: 64780

SEQ ID NO: 67603 - protein, 605 aa, Streptococcus pneumoniae; identical to SEQ ID NO: 64781

SEQ ID NO: 67604 - protein, 689 aa, Streptococcus pneumoniae; identical to SEQ ID NO: 62612

SEQ ID NO: 67605 - protein, 605 aa, Streptococcus pneumoniae; identical to SEQ ID NO: 62783

SEQ ID NO: 67606 - protein, 689 aa, Streptococcus pneumoniae; identical to SEQ ID NO: 62612

SEQ ID NO: 67607 - protein, 605 aa, Streptococcus pneumoniae; identical to SEQ ID NO: 62613

SEQ ID NO: 67608 - protein, 641 aa, Salmonella enterica; identical to SEQ ID NO: 62984
  subsp. enterica serovar Typhimurium str. DT104

SEQ ID NO: 67609 - protein, 553 aa, Salmonella enterica; identical to SEQ ID NO: 62985
  subsp. enterica serovar Typhimurium str. DT104

SEQ ID NO: 67610 - protein, 689 aa, Streptococcus pneumoniae; identical to SEQ ID NO: 67080

SEQ ID NO: 67611 - protein, 605 aa, Streptococcus pneumoniae; identical to SEQ ID NO: 67081

SEQ ID NO: 67612 - protein, 585 aa, Streptococcus pneumoniae; identical to SEQ ID NO: 62976

SEQ ID NO: 67613 - protein, 512 aa, Streptococcus pneumoniae; identical to SEQ ID NO: 62977

SEQ ID NO: 67614 - protein, 729 aa, Streptococcus pneumoniae; identical to SEQ ID NO: 62500

SEQ ID NO: 67615 - protein, 597 aa, Streptococcus pneumoniae; identical to SEQ ID NO: 62501

SEQ ID NO: 67616 - protein, 689 aa, Streptococcus pneumoniae; identical to SEQ ID NO: 62612

SEQ ID NO: 67617 - protein, 605 aa, Streptococcus pneumoniae; identical to SEQ ID NO: 62613

SEQ ID NO: 67618 - protein, 513 aa, Streptococcus pneumoniae
MGNASGSMLSRLVNSINWTEDEINEITDKIDELNNTFLSENGALTQINNEIQKSWELYHEDNRFSQAELIINSSEMAAALRQIALKFSPTTTEEAFTVSDLGDGLRSIFYFSLVDSILDIELEITKDREENPDNPRFKLIPPVLTILAIEEPENHIAPHHIGKLIKRFKQLGNNDNSQVILTSHSPAIVKRIDPEDLKYLRIENNDRVLQTIVSDIQLPPAIDESYKYIKGAIQAYPELYFAKLVVLGEGDSEELLLPKFFDLLGKEVDSSQISIVPLGGRHVNYFWKLLNALRIPHITLLDFDNERYGGGWGRIKYISQHLYELNTEFQEWFHTQRLDFNEIGSRGCESIGAQRLINWFNKLEEFNVYFSSPLDIDFLMLQHYKDNYLNTLSPIEGPVVSYNDSDGSSKKVKLSDLDCLDRLQLEGFNKRKEEAIRATLKDKSGHGDSFNEEEKELMIWYQYFFLGRGKPTTHMQFLSSISDDELTRNLPPVFEKIVNSAEELLGDIQHGKE

SEQ ID NO: 67619 - protein, 605 aa, Streptococcus pneumoniae; identical to SEQ ID NO: 62783

SEQ ID NO: 67620 - protein, 695 aa, Streptococcus pneumoniae; identical to SEQ ID NO: 64780

SEQ ID NO: 67621 - protein, 605 aa, Streptococcus pneumoniae; identical to SEQ ID NO: 66879

SEQ ID NO: 67622 - protein, 729 aa, Staphylococcus aureus; identical to SEQ ID NO: 62500

SEQ ID NO: 67623 - protein, 597 aa, Staphylococcus aureus; identical to SEQ ID NO: 66639

SEQ ID NO: 67624 - protein, 699 aa, Streptococcus pneumoniae; identical to SEQ ID NO: 64132

SEQ ID NO: 67625 - protein, 605 aa, Streptococcus pneumoniae; identical to SEQ ID NO: 64133

SEQ ID NO: 67626 - protein, 699 aa, Streptococcus pneumoniae; identical to SEQ ID NO: 64132

SEQ ID NO: 67627 - protein, 605 aa, Streptococcus pneumoniae; identical to SEQ ID NO: 64133

SEQ ID NO: 67628 - protein, 689 aa, Streptococcus pneumoniae; identical to SEQ ID NO: 62612

SEQ ID NO: 67629 - protein, 605 aa, Streptococcus pneumoniae; identical to SEQ ID NO: 62783

SEQ ID NO: 67630 - protein, 689 aa, Streptococcus pneumoniae; identical to SEQ ID NO: 62612

SEQ ID NO: 67631 - protein, 605 aa, Streptococcus pneumoniae; identical to SEQ ID NO: 62783

SEQ ID NO: 67632 - protein, 699 aa, Streptococcus pneumoniae; identical to SEQ ID NO: 64132

SEQ ID NO: 67633 - protein, 605 aa, Streptococcus pneumoniae; identical to SEQ ID NO: 64133

SEQ ID NO: 67634 - protein, 689 aa, Streptococcus pneumoniae; identical to SEQ ID NO: 62612

SEQ ID NO: 67635 - protein, 605 aa, Streptococcus pneumoniae; identical to SEQ ID NO: 62783

SEQ ID NO: 67636 - protein, 695 aa, Streptococcus pneumoniae; identical to SEQ ID NO: 64780

SEQ ID NO: 67637 - protein, 605 aa, Streptococcus pneumoniae; identical to SEQ ID NO: 66879

SEQ ID NO: 67638 - protein, 689 aa, Streptococcus pneumoniae; identical to SEQ ID NO: 62612

SEQ ID NO: 67639 - protein, 605 aa, Streptococcus pneumoniae; identical to SEQ ID NO: 62783

SEQ ID NO: 67640 - protein, 641 aa, Salmonella enterica; identical to SEQ ID NO: 62984
  subsp. enterica serovar Typhimurium str. DT104

SEQ ID NO: 67641 - protein, 553 aa, Salmonella enterica; identical to SEQ ID NO: 62985
  subsp. enterica serovar Typhimurium str. DT104

SEQ ID NO: 67642 - protein, 695 aa, Streptococcus pneumoniae; identical to SEQ ID NO: 64780

SEQ ID NO: 67643 - protein, 605 aa, Streptococcus pneumoniae; identical to SEQ ID NO: 64781

SEQ ID NO: 67644 - protein, 531 aa, Streptococcus pneumoniae; identical to SEQ ID NO: 63406

SEQ ID NO: 67645 - protein, 605 aa, Streptococcus pneumoniae; identical to SEQ ID NO: 62783

SEQ ID NO: 67646 - protein, 699 aa, Streptococcus pneumoniae; identical to SEQ ID NO: 64132

SEQ ID NO: 67647 - protein, 605 aa, Streptococcus pneumoniae; identical to SEQ ID NO: 64133

SEQ ID NO: 67648 - protein, 689 aa, Streptococcus pneumoniae; identical to SEQ ID NO: 62612

SEQ ID NO: 67649 - protein, 605 aa, Streptococcus pneumoniae; identical to SEQ ID NO: 62783

SEQ ID NO: 67650 - protein, 695 aa, Streptococcus pneumoniae; identical to SEQ ID NO: 64780

SEQ ID NO: 67651 - protein, 605 aa, Streptococcus pneumoniae; identical to SEQ ID NO: 64781

SEQ ID NO: 67652 - protein, 695 aa, Streptococcus pneumoniae; identical to SEQ ID NO: 64780

SEQ ID NO: 67653 - protein, 605 aa, Streptococcus pneumoniae; identical to SEQ ID NO: 66879

SEQ ID NO: 67654 - protein, 689 aa, Streptococcus pneumoniae; identical to SEQ ID NO: 62612

SEQ ID NO: 67655 - protein, 605 aa, Streptococcus pneumoniae
MVKSEEWFPKGDIILEETALGAVKDVTNCLVIAGPGAGKTELLAQKLDYLFSTNKCVSPKKILALSFKTDAASNLKERVKKRYGDEYASRFTSLTYSAFEKRILDQFRDVLPEDIRPSRDYLIEDWYTIKELLSMNGINVNGWRMSDIRRYVENIILNNGDNHKFKTDLLKGTQDNKPVLLYRQITKLSTQIIDTNEYIRKALQMTYDFVFLDEFQDTTYAQYDLLKTCFLGSSCKLTAVGDDKQAIMRWAGAKPDIFPDYIRDFNPNEYQLLMNHRSVPKLVEFQKEVHQILNSNHSSIQTNNYPEFQEGEITLFEFENESLEAKLIANDIELKIQGGIRPSEICILAKQKVGIYSFELISILNSKGIKARIENEYQDILKDPTCNLLLDLISCSQGKRDPLIWENISNFYGNINGIDELTDELILAKSYKEIDNIVSDITYLISNFTPNEESMLKLIDCIIEKIDEKRIISNFSTYNGKSDLDIIVKNFSKLLYIEYSQTQGEWLDTVSSFKGENSIPIMTIHKSKGLEYEVVYFLGLEDSAFWSFNNQPEEDKSAFFVALSRAKSHLIFTYCKLRNNSPQNNRNINEIYSLLTQSNLVDVIN

SEQ ID NO: 67656 - protein, 641 aa, Salmonella enterica; identical to SEQ ID NO: 62984
  subsp. enterica serovar Typhimurium str. DT104

SEQ ID NO: 67657 - protein, 553 aa, Salmonella enterica; identical to SEQ ID NO: 62985
  subsp. enterica serovar Typhimurium str. DT104

SEQ ID NO: 67658 - protein, 689 aa, Streptococcus pneumoniae; identical to SEQ ID NO: 62612

SEQ ID NO: 67659 - protein, 605 aa, Streptococcus pneumoniae; identical to SEQ ID NO: 62783

SEQ ID NO: 67660 - protein, 695 aa, Streptococcus pneumoniae; identical to SEQ ID NO: 64780

SEQ ID NO: 67661 - protein, 605 aa, Streptococcus pneumoniae; identical to SEQ ID NO: 64781

SEQ ID NO: 67662 - protein, 695 aa, Streptococcus pneumoniae; identical to SEQ ID NO: 64780

SEQ ID NO: 67663 - protein, 605 aa, Streptococcus pneumoniae; identical to SEQ ID NO: 66879

SEQ ID NO: 67664 - protein, 689 aa, Streptococcus pneumoniae; identical to SEQ ID NO: 62612

SEQ ID NO: 67665 - protein, 605 aa, Streptococcus pneumoniae; identical to SEQ ID NO: 62613

SEQ ID NO: 67666 - protein, 695 aa, Streptococcus pneumoniae; identical to SEQ ID NO: 64780

SEQ ID NO: 67667 - protein, 605 aa, Streptococcus pneumoniae; identical to SEQ ID NO: 64781

SEQ ID NO: 67668 - protein, 729 aa, Staphylococcus aureus; identical to SEQ ID NO: 62500

SEQ ID NO: 67669 - protein, 597 aa, Staphylococcus aureus; identical to SEQ ID NO: 66639

SEQ ID NO: 67670 - protein, 585 aa, Streptococcus pneumoniae; identical to SEQ ID NO: 62976

SEQ ID NO: 67671 - protein, 512 aa, Streptococcus pneumoniae; identical to SEQ ID NO: 62977

SEQ ID NO: 67672 - protein, 699 aa, Streptococcus pneumoniae; identical to SEQ ID NO: 64132

SEQ ID NO: 67673 - protein, 605 aa, Streptococcus pneumoniae; identical to SEQ ID NO: 64133

SEQ ID NO: 67674 - protein, 636 aa, Yersinia massiliensis
MFLSKLKIKGFRCFNDEFNISLNEGLSVIVGENGAGKSAIINSIRQLFIDSESERYNITENDFHSPFSNPPKASDSFTINAEFSNLDAKEIIALLPWTGNSDVAKLNLHVENKEIRGRYKKSLWGGDSQNSQFDYELLDLIYCIYLPPLRDAESKLTNGRQSRLSKLLKAINRKNLKTLKKSGGVHPLVDKVNTFNDELSNSNLYSIKAANQLIKNQLQNAIGLNFGQNTAIQFAESDFTRIVESLRLVFFPDLKENDTKLFRNLEQNSLGYNNLLYIASILAELTLGNEQDSSTCRVLLIEEPEAHLHPQLQIRLLEHLKKVSEDKENNVQVIVTTHSTTLASSVSVDSIIHLSKSTSPVATRIKDCGLAKKSKEFIDRWMDVTKSNLLFASGVILVEGIAEQMLLPILAKEALACRDAGKNSLSDLGVSVINLNGIYFRHFMGIYCNFAIPSEKTKHEGLNIPVRCAGLTDLDPPKKIKECVEENKFIEKIVIPHDDEMYDGTNHAIKLVGEINISKYARLYVSKYKTLEYDLAMTGNNIAVMSTVLYEIWPTDGEIKKKIKEIMDVNDDWSKKKSSERAVIANELLQYIENNELGKGYFAQSLSDKILNNKVKFETPEYIKNAILWVCQDGEA

SEQ ID NO: 67675 - protein, 586 aa, Yersinia massiliensis
MKHFNSQQMDYIESSIASSIYLEACPGSGKTEVIAAKVAKEINNWALSPSGIALLSFSNSATDELFSRVKKYSPDTVSRFPHFIGTFDSFIFKFLISPNAKSLTHFEGECNNNTLRIIESASPLFIQTKYAYNKRGKIKAHHYTFDRRNDSILFNSDSPELDRMRNAINLQEWQIKDLIETKYKLFKSGLMTHDDSLFLAAEIFSNEQYKNYASLLSKRFPLIIIDECQDLSYEHLFILQGLHDLGVKLHFVGDLDQSIYGFRAVDPKDTIKFIADNEFERMPLKINYRSCQQIIDLCSKLTAHDGVNGQFSSIESPCIVLQYNETPLELIDKIGQLCLGYSNNVIVARGHSILEKFTFNGVEDNIVKNLVNAINIFSLHGTQNIKNSLQLFSTVIRARSNHPIRESKYNCPNEIESSVQWRAFLFYTLEYFIENKLNNFELTWSKWCKNANVILINLHQQPFITDELKPIVEEVFSLSIKAPSGLAKINVSEFTAIEKVNTENYKYATIHSVKGETHDVTILLSSPSNSGNNGSHWKQWISNQKSESTRFAYVASSRPRYRLVWGVKKLKDSEADTLRKLGFTIE

SEQ ID NO: 67676 - protein, 689 aa, Streptococcus pneumoniae; identical to SEQ ID NO: 62612

SEQ ID NO: 67677 - protein, 605 aa, Streptococcus pneumoniae; identical to SEQ ID NO: 62783

SEQ ID NO: 67678 - protein, 689 aa, Streptococcus pneumoniae; identical to SEQ ID NO: 67080

SEQ ID NO: 67679 - protein, 605 aa, Streptococcus pneumoniae; identical to SEQ ID NO: 67081

SEQ ID NO: 67680 - protein, 689 aa, Streptococcus pneumoniae; identical to SEQ ID NO: 62612

SEQ ID NO: 67681 - protein, 605 aa, Streptococcus pneumoniae; identical to SEQ ID NO: 62783

SEQ ID NO: 67682 - protein, 607 aa, Salmonella enterica subsp. enterica serovar Typhi; identical to SEQ ID NO: 62590

SEQ ID NO: 67683 - protein, 630 aa, Salmonella enterica subsp. enterica serovar Typhi; identical to SEQ ID NO: 62591

SEQ ID NO: 67684 - protein, 699 aa, Streptococcus pneumoniae; identical to SEQ ID NO: 64132

SEQ ID NO: 67685 - protein, 605 aa, Streptococcus pneumoniae; identical to SEQ ID NO: 64133

SEQ ID NO: 67686 - protein, 585 aa, Streptococcus pneumoniae; identical to SEQ ID NO: 62976

SEQ ID NO: 67687 - protein, 512 aa, Streptococcus pneumoniae; identical to SEQ ID NO: 62977

SEQ ID NO: 67688 - protein, 695 aa, Streptococcus pneumoniae; identical to SEQ ID NO: 64780

SEQ ID NO: 67689 - protein, 605 aa, Streptococcus pneumoniae; identical to SEQ ID NO: 66879

SEQ ID NO: 67690 - protein, 699 aa, Streptococcus pneumoniae; identical to SEQ ID NO: 64132

SEQ ID NO: 67691 - protein, 605 aa, Streptococcus pneumoniae; identical to SEQ ID NO: 64133

SEQ ID NO: 67692 - protein, 689 aa, Streptococcus pneumoniae; identical to SEQ ID NO: 62612

SEQ ID NO: 67693 - protein, 605 aa, Streptococcus pneumoniae; identical to SEQ ID NO: 62783

SEQ ID NO: 67694 - protein, 585 aa, Streptococcus pneumoniae; identical to SEQ ID NO: 62976

SEQ ID NO: 67695 - protein, 512 aa, Streptococcus pneumoniae; identical to SEQ ID NO: 62977

SEQ ID NO: 67696 - protein, 729 aa, Staphylococcus aureus; identical to SEQ ID NO: 62500

SEQ ID NO: 67697 - protein, 597 aa, Staphylococcus aureus; identical to SEQ ID NO: 66639

SEQ ID NO: 67698 - protein, 699 aa, Streptococcus pneumoniae; identical to SEQ ID NO: 64132

SEQ ID NO: 67699 - protein, 605 aa, Streptococcus pneumoniae; identical to SEQ ID NO: 64133

SEQ ID NO: 67700 - protein, 695 aa, Streptococcus pneumoniae; identical to SEQ ID NO: 64780

SEQ ID NO: 67701 - protein, 605 aa, Streptococcus pneumoniae; identical to SEQ ID NO: 66879

SEQ ID NO: 67702 - protein, 695 aa, Streptococcus pneumoniae; identical to SEQ ID NO: 64780

SEQ ID NO: 67703 - protein, 605 aa, Streptococcus pneumoniae; identical to SEQ ID NO: 64781

SEQ ID NO: 67704 - protein, 689 aa, Streptococcus pneumoniae; identical to SEQ ID NO: 67080

SEQ ID NO: 67705 - protein, 605 aa, Streptococcus pneumoniae; identical to SEQ ID NO: 67081

SEQ ID NO: 67706 - protein, 641 aa, Salmonella enterica; identical to SEQ ID NO: 62984
  subsp. enterica serovar Typhimurium str. DT104

SEQ ID NO: 67707 - protein, 553 aa, Salmonella enterica; identical to SEQ ID NO: 62985
  subsp. enterica serovar Typhimurium str. DT104

SEQ ID NO: 67708 - protein, 689 aa, Streptococcus pneumoniae; identical to SEQ ID NO: 62612

SEQ ID NO: 67709 - protein, 605 aa, Streptococcus pneumoniae; identical to SEQ ID NO: 62613

SEQ ID NO: 67710 - protein, 699 aa, Streptococcus pneumoniae; identical to SEQ ID NO: 64132

SEQ ID NO: 67711 - protein, 605 aa, Streptococcus pneumoniae; identical to SEQ ID NO: 64133

SEQ ID NO: 67712 - protein, 695 aa, Streptococcus pneumoniae; identical to SEQ ID NO: 64780

SEQ ID NO: 67713 - protein, 605 aa, Streptococcus pneumoniae; identical to SEQ ID NO: 66879

SEQ ID NO: 67714 - protein, 689 aa, Streptococcus pneumoniae; identical to SEQ ID NO: 62612

SEQ ID NO: 67715 - protein, 605 aa, Streptococcus pneumoniae; identical to SEQ ID NO: 62783

SEQ ID NO: 67716 - protein, 689 aa, Streptococcus pneumoniae; identical to SEQ ID NO: 62612

SEQ ID NO: 67717 - protein, 605 aa, Streptococcus pneumoniae; identical to SEQ ID NO: 62783

SEQ ID NO: 67718 - protein, 641 aa, Salmonella enterica; identical to SEQ ID NO: 62984
  subsp. enterica serovar Typhimurium str. DT104

SEQ ID NO: 67719 - protein, 553 aa, Salmonella enterica; identical to SEQ ID NO: 62985
  subsp. enterica serovar Typhimurium str. DT104

SEQ ID NO: 67720 - protein, 689 aa, Streptococcus pneumoniae; identical to SEQ ID NO: 62612

SEQ ID NO: 67721 - protein, 605 aa, Streptococcus pneumoniae; identical to SEQ ID NO: 62613

SEQ ID NO: 67722 - protein, 689 aa, Streptococcus pneumoniae; identical to SEQ ID NO: 62612

SEQ ID NO: 67723 - protein, 605 aa, Streptococcus pneumoniae; identical to SEQ ID NO: 62783

SEQ ID NO: 67724 - protein, 695 aa, Streptococcus pneumoniae; identical to SEQ ID NO: 64780

SEQ ID NO: 67725 - protein, 605 aa, Streptococcus pneumoniae; identical to SEQ ID NO: 64781

SEQ ID NO: 67726 - protein, 689 aa, Streptococcus pneumoniae; identical to SEQ ID NO: 62612

SEQ ID NO: 67727 - protein, 605 aa, Streptococcus pneumoniae; identical to SEQ ID NO: 62783

SEQ ID NO: 67728 - protein, 689 aa, Streptococcus pneumoniae; identical to SEQ ID NO: 62612

SEQ ID NO: 67729 - protein, 605 aa, Streptococcus pneumoniae; identical to SEQ ID NO: 62783

SEQ ID NO: 67730 - protein, 689 aa, Streptococcus pneumoniae; identical to SEQ ID NO: 62612

SEQ ID NO: 67731 - protein, 605 aa, Streptococcus pneumoniae; identical to SEQ ID NO: 62613

SEQ ID NO: 67732 - protein, 699 aa, Streptococcus pneumoniae; identical to SEQ ID NO: 64132

SEQ ID NO: 67733 - protein, 605 aa, Streptococcus pneumoniae; identical to SEQ ID NO: 64133

SEQ ID NO: 67734 - protein, 689 aa, Streptococcus pneumoniae; identical to SEQ ID NO: 62612

SEQ ID NO: 67735 - protein, 605 aa, Streptococcus pneumoniae; identical to SEQ ID NO: 62613

SEQ ID NO: 67736 - protein, 607 aa, Salmonella enterica subsp. enterica serovar Typhi; identical to SEQ ID NO: 62590

SEQ ID NO: 67737 - protein, 630 aa, Salmonella enterica subsp. enterica serovar Typhi; identical to SEQ ID NO: 62591

SEQ ID NO: 67738 - protein, 695 aa, Streptococcus pneumoniae; identical to SEQ ID NO: 64780

SEQ ID NO: 67739 - protein, 605 aa, Streptococcus pneumoniae; identical to SEQ ID NO: 64781

SEQ ID NO: 67740 - protein, 699 aa, Streptococcus pneumoniae; identical to SEQ ID NO: 64132

SEQ ID NO: 67741 - protein, 605 aa, Streptococcus pneumoniae; identical to SEQ ID NO: 64133

SEQ ID NO: 67742 - protein, 699 aa, Streptococcus pneumoniae; identical to SEQ ID NO: 64132

SEQ ID NO: 67743 - protein, 605 aa, Streptococcus pneumoniae; identical to SEQ ID NO: 64133

SEQ ID NO: 67744 - protein, 729 aa, Staphylococcus aureus; identical to SEQ ID NO: 62500

SEQ ID NO: 67745 - protein, 597 aa, Staphylococcus aureus; identical to SEQ ID NO: 66639

SEQ ID NO: 67746 - protein, 699 aa, Streptococcus pneumoniae; identical to SEQ ID NO: 64132

SEQ ID NO: 67747 - protein, 605 aa, Streptococcus pneumoniae; identical to SEQ ID NO: 64133

SEQ ID NO: 67748 - protein, 689 aa, Streptococcus pneumoniae; identical to SEQ ID NO: 67080

SEQ ID NO: 67749 - protein, 605 aa, Streptococcus pneumoniae; identical to SEQ ID NO: 67081

SEQ ID NO: 67750 - protein, 695 aa, Streptococcus pneumoniae; identical to SEQ ID NO: 64780

SEQ ID NO: 67751 - protein, 605 aa, Streptococcus pneumoniae; identical to SEQ ID NO: 66879

SEQ ID NO: 67752 - protein, 689 aa, Streptococcus pneumoniae; identical to SEQ ID NO: 62612

SEQ ID NO: 67753 - protein, 605 aa, Streptococcus pneumoniae; identical to SEQ ID NO: 62783

SEQ ID NO: 67754 - protein, 689 aa, Streptococcus pneumoniae; identical to SEQ ID NO: 67080

SEQ ID NO: 67755 - protein, 605 aa, Streptococcus pneumoniae; identical to SEQ ID NO: 67081

SEQ ID NO: 67756 - protein, 695 aa, Streptococcus pneumoniae; identical to SEQ ID NO: 64780

SEQ ID NO: 67757 - protein, 605 aa, Streptococcus pneumoniae; identical to SEQ ID NO: 64781

SEQ ID NO: 67758 - protein, 699 aa, Streptococcus pneumoniae; identical to SEQ ID NO: 64132

SEQ ID NO: 67759 - protein, 605 aa, Streptococcus pneumoniae; identical to SEQ ID NO: 64133

SEQ ID NO: 67760 - protein, 689 aa, Streptococcus pneumoniae; identical to SEQ ID NO: 67050

SEQ ID NO: 67761 - protein, 605 aa, Streptococcus pneumoniae; identical to SEQ ID NO: 62613

SEQ ID NO: 67762 - protein, 689 aa, Streptococcus pneumoniae; identical to SEQ ID NO: 62612

SEQ ID NO: 67763 - protein, 605 aa, Streptococcus pneumoniae; identical to SEQ ID NO: 62783

SEQ ID NO: 67764 - protein, 689 aa, Streptococcus pneumoniae; identical to SEQ ID NO: 62612

SEQ ID NO: 67765 - protein, 605 aa, Streptococcus pneumoniae; identical to SEQ ID NO: 62783

SEQ ID NO: 67766 - protein, 695 aa, Streptococcus pneumoniae; identical to SEQ ID NO: 64780

SEQ ID NO: 67767 - protein, 605 aa, Streptococcus pneumoniae; identical to SEQ ID NO: 66879

SEQ ID NO: 67768 - protein, 689 aa, Streptococcus pneumoniae; identical to SEQ ID NO: 67080

SEQ ID NO: 67769 - protein, 605 aa, Streptococcus pneumoniae; identical to SEQ ID NO: 67081

SEQ ID NO: 67770 - protein, 729 aa, Staphylococcus aureus; identical to SEQ ID NO: 62500

SEQ ID NO: 67771 - protein, 597 aa, Staphylococcus aureus; identical to SEQ ID NO: 66639

SEQ ID NO: 67772 - protein, 699 aa, Streptococcus pneumoniae; identical to SEQ ID NO: 64132

SEQ ID NO: 67773 - protein, 605 aa, Streptococcus pneumoniae; identical to SEQ ID NO: 64133

SEQ ID NO: 67774 - protein, 729 aa, Staphylococcus aureus; identical to SEQ ID NO: 62500

SEQ ID NO: 67775 - protein, 597 aa, Staphylococcus aureus; identical to SEQ ID NO: 66639

SEQ ID NO: 67776 - protein, 689 aa, Streptococcus pneumoniae; identical to SEQ ID NO: 62612

SEQ ID NO: 67777 - protein, 605 aa, Streptococcus pneumoniae; identical to SEQ ID NO: 62613

SEQ ID NO: 67778 - protein, 689 aa, Streptococcus pneumoniae; identical to SEQ ID NO: 62612

SEQ ID NO: 67779 - protein, 605 aa, Streptococcus pneumoniae; identical to SEQ ID NO: 62783

SEQ ID NO: 67780 - protein, 689 aa, Streptococcus pneumoniae; identical to SEQ ID NO: 62612

SEQ ID NO: 67781 - protein, 605 aa, Streptococcus pneumoniae
MVKSEEWFPKGDIILEETALGAVKDVTNCLVIAGPGAGKTELLAQKLDYLFSTNKCVSPKKILALSFKTDAASNLKERVKKRYGDEYASRFTSLTYSAFEKRILDQFRDVLPEDIRPSRDYLIEDWYTIKELLSMNGINVNGWRMSDIRRYVENIILNNGDNHKFKTDLLKGTQDNKPVLLYRQITKLSTQIIDTNEYIRKALQMTYDFVFLDEFQDTTYAQYDLLKTCFLGSSCKLTAVGDNKKAIMRWAGAKPDIFPDYIRDFNPNEYQLLMNHRSVPKLVEFQKEVHQILNSNHSSIQTNNYPEFQEGEITLFEFENESLEAKLIANDIELKIQGGIRPSEICILAKQKVGIYSFELISILNSKGIKARIENEYQDILKDPTCNLLLDLISCSQGKRDPLIWENISNFYGNINGIDELTDELILAKSYKEIDNIVSDITYLISNFIPNEESMLKLIDCIIEKIDEKRIISNFSTYNGKSDLDIIVKNFSKLLYIEYSQTQGEWLDTVSSFKGENSIPIMTIHKSKGLEYEVVYFLGLEDSAFWSFNNQPEEDKSAFFVALSRAKSHLIFTYCKLRNNSPQNNRNINEIYSLLTQSNLVDVIN

SEQ ID NO: 67782 - protein, 585 aa, Streptococcus pneumoniae; identical to SEQ ID NO: 66870

SEQ ID NO: 67783 - protein, 512 aa, Streptococcus pneumoniae; identical to SEQ ID NO: 62977

SEQ ID NO: 67784 - protein, 729 aa, Staphylococcus aureus; identical to SEQ ID NO: 62500

SEQ ID NO: 67785 - protein, 597 aa, Staphylococcus aureus; identical to SEQ ID NO: 66639

SEQ ID NO: 67786 - protein, 689 aa, Streptococcus pneumoniae; identical to SEQ ID NO: 62612

SEQ ID NO: 67787 - protein, 605 aa, Streptococcus pneumoniae; identical to SEQ ID NO: 62613

SEQ ID NO: 67788 - protein, 695 aa, Streptococcus pneumoniae; identical to SEQ ID NO: 64780

SEQ ID NO: 67789 - protein, 605 aa, Streptococcus pneumoniae; identical to SEQ ID NO: 66879

SEQ ID NO: 67790 - protein, 699 aa, Streptococcus pneumoniae; identical to SEQ ID NO: 64132

SEQ ID NO: 67791 - protein, 605 aa, Streptococcus pneumoniae; identical to SEQ ID NO: 64133

SEQ ID NO: 67792 - protein, 695 aa, Streptococcus pneumoniae; identical to SEQ ID NO: 64780

SEQ ID NO: 67793 - protein, 605 aa, Streptococcus pneumoniae; identical to SEQ ID NO: 66879

SEQ ID NO: 67794 - protein, 689 aa, Streptococcus pneumoniae; identical to SEQ ID NO: 62612

SEQ ID NO: 67795 - protein, 605 aa, Streptococcus pneumoniae; identical to SEQ ID NO: 62783

SEQ ID NO: 67796 - protein, 689 aa, Streptococcus pneumoniae; identical to SEQ ID NO: 62612

SEQ ID NO: 67797 - protein, 605 aa, Streptococcus pneumoniae; identical to SEQ ID NO: 62613

SEQ ID NO: 67798 - protein, 695 aa, Streptococcus pneumoniae; identical to SEQ ID NO: 64780

SEQ ID NO: 67799 - protein, 605 aa, Streptococcus pneumoniae; identical to SEQ ID NO: 66879

SEQ ID NO: 67800 - protein, 689 aa, Streptococcus pneumoniae; identical to SEQ ID NO: 62612

SEQ ID NO: 67801 - protein, 605 aa, Streptococcus pneumoniae; identical to SEQ ID NO: 62783

SEQ ID NO: 67802 - protein, 689 aa, Streptococcus pneumoniae; identical to SEQ ID NO: 62612

SEQ ID NO: 67803 - protein, 605 aa, Streptococcus pneumoniae; identical to SEQ ID NO: 62783

SEQ ID NO: 67804 - protein, 641 aa, Salmonella enterica; identical to SEQ ID NO: 62984
  subsp. enterica serovar Typhimurium str. DT104

SEQ ID NO: 67805 - protein, 553 aa, Salmonella enterica; identical to SEQ ID NO: 62985
  subsp. enterica serovar Typhimurium str. DT104

SEQ ID NO: 67806 - protein, 695 aa, Streptococcus pneumoniae; identical to SEQ ID NO: 64780

SEQ ID NO: 67807 - protein, 605 aa, Streptococcus pneumoniae; identical to SEQ ID NO: 66879

SEQ ID NO: 67808 - protein, 585 aa, Streptococcus pneumoniae; identical to SEQ ID NO: 62976

SEQ ID NO: 67809 - protein, 512 aa, Streptococcus pneumoniae; identical to SEQ ID NO: 62977

SEQ ID NO: 67810 - protein, 695 aa, Streptococcus pneumoniae; identical to SEQ ID NO: 64780

SEQ ID NO: 67811 - protein, 605 aa, Streptococcus pneumoniae; identical to SEQ ID NO: 66879

SEQ ID NO: 67812 - protein, 689 aa, Streptococcus pneumoniae; identical to SEQ ID NO: 62612

SEQ ID NO: 67813 - protein, 605 aa, Streptococcus pneumoniae; identical to SEQ ID NO: 62783

SEQ ID NO: 67814 - protein, 641 aa, Salmonella enterica; identical to SEQ ID NO: 62984
  subsp. enterica serovar Typhimurium str. DT104

SEQ ID NO: 67815 - protein, 553 aa, Salmonella enterica; identical to SEQ ID NO: 62985
  subsp. enterica serovar Typhimurium str. DT104

SEQ ID NO: 67816 - protein, 689 aa, Streptococcus pneumoniae; identical to SEQ ID NO: 62612

SEQ ID NO: 67817 - protein, 605 aa, Streptococcus pneumoniae; identical to SEQ ID NO: 62613

SEQ ID NO: 67818 - protein, 699 aa, Streptococcus pneumoniae; identical to SEQ ID NO: 64132

SEQ ID NO: 67819 - protein, 605 aa, Streptococcus pneumoniae; identical to SEQ ID NO: 64133

SEQ ID NO: 67820 - protein, 699 aa, Streptococcus pneumoniae; identical to SEQ ID NO: 66962

SEQ ID NO: 67821 - protein, 605 aa, Streptococcus pneumoniae; identical to SEQ ID NO: 66963

SEQ ID NO: 67822 - protein, 689 aa, Streptococcus pneumoniae; identical to SEQ ID NO: 62612

SEQ ID NO: 67823 - protein, 605 aa, Streptococcus pneumoniae; identical to SEQ ID NO: 62613

SEQ ID NO: 67824 - protein, 641 aa, Salmonella enterica; identical to SEQ ID NO: 62984
  subsp. enterica serovar Typhimurium str. DT104

SEQ ID NO: 67825 - protein, 553 aa, Salmonella enterica; identical to SEQ ID NO: 62985
  subsp. enterica serovar Typhimurium str. DT104

SEQ ID NO: 67826 - protein, 689 aa, Streptococcus pneumoniae; identical to SEQ ID NO: 62612

SEQ ID NO: 67827 - protein, 605 aa, Streptococcus pneumoniae; identical to SEQ ID NO: 62783

SEQ ID NO: 67828 - protein, 699 aa, Streptococcus pneumoniae; identical to SEQ ID NO: 66962

SEQ ID NO: 67829 - protein, 605 aa, Streptococcus pneumoniae; identical to SEQ ID NO: 66963

SEQ ID NO: 67830 - protein, 695 aa, Streptococcus pneumoniae; identical to SEQ ID NO: 64780

SEQ ID NO: 67831 - protein, 605 aa, Streptococcus pneumoniae; identical to SEQ ID NO: 66879

SEQ ID NO: 67832 - protein, 699 aa, Streptococcus pneumoniae; identical to SEQ ID NO: 64132

SEQ ID NO: 67833 - protein, 605 aa, Streptococcus pneumoniae; identical to SEQ ID NO: 64133

SEQ ID NO: 67834 - protein, 695 aa, Streptococcus pneumoniae; identical to SEQ ID NO: 64780

SEQ ID NO: 67835 - protein, 605 aa, Streptococcus pneumoniae; identical to SEQ ID NO: 64781

SEQ ID NO: 67836 - protein, 695 aa, Streptococcus pneumoniae; identical to SEQ ID NO: 64780

SEQ ID NO: 67837 - protein, 605 aa, Streptococcus pneumoniae; identical to SEQ ID NO: 66879

SEQ ID NO: 67838 - protein, 799 aa, Yersinia pseudotuberculosis; identical to SEQ ID NO: 67260

SEQ ID NO: 67839 - protein, 622 aa, Yersinia pseudotuberculosis; identical to SEQ ID NO: 67261

SEQ ID NO: 67840 - protein, 699 aa, Streptococcus pneumoniae; identical to SEQ ID NO: 64132

SEQ ID NO: 67841 - protein, 605 aa, Streptococcus pneumoniae; identical to SEQ ID NO: 64133

SEQ ID NO: 67842 - protein, 689 aa, Streptococcus pneumoniae; identical to SEQ ID NO: 62612

SEQ ID NO: 67843 - protein, 605 aa, Streptococcus pneumoniae; identical to SEQ ID NO: 62783

SEQ ID NO: 67844 - protein, 695 aa, Streptococcus pneumoniae; identical to SEQ ID NO: 64780

SEQ ID NO: 67845 - protein, 605 aa, Streptococcus pneumoniae; identical to SEQ ID NO: 66879

SEQ ID NO: 67846 - protein, 746 aa, Streptococcus agalactiae; identical to SEQ ID NO: 63142

SEQ ID NO: 67847 - protein, 672 aa, Streptococcus agalactiae; identical to SEQ ID NO: 63143

SEQ ID NO: 67848 - protein, 689 aa, Streptococcus pneumoniae; identical to SEQ ID NO: 62612

SEQ ID NO: 67849 - protein, 605 aa, Streptococcus pneumoniae; identical to SEQ ID NO: 62613

SEQ ID NO: 67850 - protein, 695 aa, Streptococcus pneumoniae; identical to SEQ ID NO: 64780

SEQ ID NO: 67851 - protein, 605 aa, Streptococcus pneumoniae; identical to SEQ ID NO: 66879

SEQ ID NO: 67852 - protein, 695 aa, Streptococcus pneumoniae; identical to SEQ ID NO: 64780

SEQ ID NO: 67853 - protein, 605 aa, Streptococcus pneumoniae; identical to SEQ ID NO: 66879

SEQ ID NO: 67854 - protein, 585 aa, Streptococcus pneumoniae; identical to SEQ ID NO: 62976

SEQ ID NO: 67855 - protein, 512 aa, Streptococcus pneumoniae; identical to SEQ ID NO: 62977

SEQ ID NO: 67856 - protein, 689 aa, Streptococcus pneumoniae; identical to SEQ ID NO: 62612

SEQ ID NO: 67857 - protein, 605 aa, Streptococcus pneumoniae
MVKSEEWFPKGDIILEETALGAVKDVTNCLVIAGPGAGKTELLAQKLDYLFSTNKCVSPKKILALSFKTDAASNLKERVKKRYGDEYASRFTSLTYSAFEKRILDQFRDVLPEDIRPSRDYLIEDWYTIKELLSMNGINVNGWRMSDIRRYVENIILNNGDNHKFKTDLLKGTQDNKPVLLYRQITKLSTQIIDTNEYIRKALQMTYDFVFLDEFQDTTYAQYDLLKTCFLGSSCKLTAVGDNKQAIMRWAGAKPDIFPDYIRDFNPNEYQLLMNHRSVPKLVEFQKEVHQILNSNHSSIQTNNYPEFQEGEITLFEFENESLEAKLIANDIELKIQGGIRPSEICILAKQKVGIYSFELISILNSKGIKARIENEYQDILKDPTCNLLLDLISCSQGKRDPLIWENISNFYGNINGIDELTDELILAKSYKEIDNIVSDITYLISNFIPNEESMLKLIDCIIEKIDEKRIISNFSTYNGKSDLDIIVKNFSKLLYIEYSQTQGEWLDTVSSFKGENSIPIMTIHKSKGLEYEVVYFLGLEDSAFWSFNNQPEEDKSAFFVALSRAKSHLIFTYCKLRNNSPQNNRNINEIYSLLTQSNLVDVIN

SEQ ID NO: 67858 - protein, 699 aa, Streptococcus pneumoniae; identical to SEQ ID NO: 64132

SEQ ID NO: 67859 - protein, 605 aa, Streptococcus pneumoniae; identical to SEQ ID NO: 64133

SEQ ID NO: 67860 - protein, 695 aa, Streptococcus pneumoniae; identical to SEQ ID NO: 64780

SEQ ID NO: 67861 - protein, 605 aa, Streptococcus pneumoniae; identical to SEQ ID NO: 64781

SEQ ID NO: 67862 - protein, 695 aa, Streptococcus pneumoniae; identical to SEQ ID NO: 64780

SEQ ID NO: 67863 - protein, 605 aa, Streptococcus pneumoniae; identical to SEQ ID NO: 66879

SEQ ID NO: 67864 - protein, 771 aa, Yersinia frederiksenii
MHLRKLAVRNFRRLHDVVIDLASDISIFVGANNSGKTSVGHALQLFTGKSRFNIHDFNAECWTDIVTFGEGADAASLPSLELDIWFEVTPNDVHRVVDLLPSLSWSGSLVGMRVAFSPINPEEIRSRFLAVRQLAIDATPKDENGTPKYDPSPRNLWEYLRDRLNDEYEFRYFVLDPARFNAEMISEEGYEPTPLTGRDRSGREILNSLIQINFLNAQRHLSDGSGGSRSEDLSRVLSRFYGRNLEQKGEDYEALIALAASESAFNQHLERVFAPTLKSLAKLGYPGLSNPRMMIRSALDPAQIMNNQNGAVIHYALGEDDGNPTPPTLPDSYNGLGFKNLIFMVVELLDIHNQWLAIEENRPPVHLIFIEEPEAHLHAQLQQAFIRKIMDLLAMESQELMHYTTQVVVTSHSTHILYERGFRPIRYFRRKRSSNMSATDVLNLSVFYDNTDPEIRDFLERYLKLTHCDLFFADGAVLVEGNVERLLLPQMIATAAPRLKSSYLTVLEIGGAFGYRFQKLIEYLGLTTLIITDLDSVYCTPPVQDATEARADELDALAENPAANDDGEEPDDDEEEQANTETPGKACIASHPGAMTSNQTLRQWLPKCDTVAALWEATEEMKIQSRTAECDALVRVAYQCQTDVTWKEETLALAGRTLEEAFALENLSWCQDVSCKPLKLRIARAVSMDLLQLAQRIHKRVQSKSFSKTDFALNLLLKKPDEWSVPTYIAEGLKWLEAEIAPPELEVAEGQEEDVEDMSVVLAETDGGRVA

SEQ ID NO: 67865 - protein, 625 aa, Yersinia frederiksenii; identical to SEQ ID NO: 66957

SEQ ID NO: 67866 - protein, 689 aa, Streptococcus pneumoniae; identical to SEQ ID NO: 62612

SEQ ID NO: 67867 - protein, 605 aa, Streptococcus pneumoniae; identical to SEQ ID NO: 62783

SEQ ID NO: 67868 - protein, 689 aa, Streptococcus pneumoniae; identical to SEQ ID NO: 62612

SEQ ID NO: 67869 - protein, 605 aa, Streptococcus pneumoniae; identical to SEQ ID NO: 62783

SEQ ID NO: 67870 - protein, 689 aa, Streptococcus pneumoniae; identical to SEQ ID NO: 62612

SEQ ID NO: 67871 - protein, 605 aa, Streptococcus pneumoniae; identical to SEQ ID NO: 62783

SEQ ID NO: 67872 - protein, 689 aa, Streptococcus pneumoniae; identical to SEQ ID NO: 62612

SEQ ID NO: 67873 - protein, 605 aa, Streptococcus pneumoniae; identical to SEQ ID NO: 62783

SEQ ID NO: 67874 - protein, 689 aa, Streptococcus pneumoniae; identical to SEQ ID NO: 62612

SEQ ID NO: 67875 - protein, 605 aa, Streptococcus pneumoniae; identical to SEQ ID NO: 62613

SEQ ID NO: 67876 - protein, 689 aa, Streptococcus pneumoniae; identical to SEQ ID NO: 62612

SEQ ID NO: 67877 - protein, 605 aa, Streptococcus pneumoniae; identical to SEQ ID NO: 62783

SEQ ID NO: 67878 - protein, 641 aa, Yersinia frederiksenii
MLEKLTYLSHSDLKVLSKIHKTITISRLSFNLGGVMYLKILKVWNFRKYGSPEVIDLNKPNLCLHLKKGLNVLIGENDSGKTAIIDAIKLVLKTHSFEWIKADENDFYKNTDRFRIELVFDDMEKEAHHFNEWIEYHRDGDKIFPYLTLTYEVYKKNGRIIQSDISAGSHGQGKPLKAEAKEYLKTTYLKPLRDANFDLTPKQNSRLSQILKTHAAFNNKDENHRLLELFIEFNTNVSLYFEGKDSQGNTITDDSRGKELKDKIEGFARAFIDDSISTTFEVTPANIKSILEKLALKIQGGFNPGLGTLNKLFMAAELLHLEESDWSGLKLCLIEELEAHLHPQAQMKVIESLQKYDDIQILITSHSPNLTSKICLENLILCHSGNVFPLGKEYTELDVDNGDYLYLERFIDVTKSNLFFAKGVIMVEGWSEEILLPAIAKLLKKQGVIKKDFTDAGVAVVNVASAEFMRFSKIFLRKVEPLIPIPIAIITDVDVRAFERKLLNEDKAKKNEYDYIKIDEKIIEVESTRKVIEKESEFNSQNVKVFVTKYWTLEYSLLKSPVLGGYSKQVLYDMHKNINKEDIEKELAIKLFNKSLCKTDFAYKLAQMIDPSSEKHDDKIILKEDDKYISSLIEGVKYVCD

SEQ ID NO: 67879 - protein, 696 aa, Yersinia frederiksenii
MCVINISDNDILYAESILLNKGDSFDQERVDFIKNMQTIDLQAVPGSGKSTALLAKLLIIEKHMPLSDGRGVLVISHTNSAIEELKSRIGKYCPKLFTYPNFIGTIQSFTNTFLATHYLRLKFNSQLRIVDDQQFTESLIQSYKRIKWDENYGKISGLFYGRNINEAKRIAQDIGKKEQKDINSICEILTEDNIKNLHFDFIERNFKISGESKFLLSDEKNLKFLGLEKLFIDTFNNGILSYKYAYLFATEFVKIYPNIVESIGNRFQHAFVDEMQDMDALQYALLENCLNNGKTIYQRIGDINQSIYNTEDDEYVNWVERPSTLNIQGSHRLSSPIARVVSQLSLTNTIAIGNNNQSNIKPIILCYQSQDIKKVMGKFNELYADYIHADLIPKLNNPLVASIAWVAKPREDEKLSLINFINEGSLPKEKNNQLNTLQDFFLQLLSNSNLTINDACSSLINSAIYLLKNNNIKDYNGYYYTKKTLNTYIKSFDKGYYDDFKKKLYIISSKFISGDNTYLDFSKKTIIWIFNQFFDIDISKNTFFIFDVNNIPTPSTRVNDVHIENTPIQYIGTIHSVKGQTHSATLYLETYFKKNYESSVLKEFFEGKSCIEIIKSLREEIAKLEIEINELKNGRGEKTRRTKINKLQLRIKLIERYTRMMYVGFSRPQHLLCFALEASRYNQLKIDATRWDVINV

SEQ ID NO: 67880 - protein, 695 aa, Streptococcus pneumoniae; identical to SEQ ID NO: 64780

SEQ ID NO: 67881 - protein, 605 aa, Streptococcus pneumoniae; identical to SEQ ID NO: 64781

SEQ ID NO: 67882 - protein, 689 aa, Streptococcus pneumoniae; identical to SEQ ID NO: 62612

SEQ ID NO: 67883 - protein, 605 aa, Streptococcus pneumoniae; identical to SEQ ID NO: 62783

SEQ ID NO: 67884 - protein, 585 aa, Streptococcus pneumoniae; identical to SEQ ID NO: 62976

SEQ ID NO: 67885 - protein, 512 aa, Streptococcus pneumoniae; identical to SEQ ID NO: 62977

SEQ ID NO: 67886 - protein, 689 aa, Streptococcus pneumoniae; identical to SEQ ID NO: 62612

SEQ ID NO: 67887 - protein, 605 aa, Streptococcus pneumoniae; identical to SEQ ID NO: 62783

SEQ ID NO: 67888 - protein, 689 aa, Streptococcus pneumoniae; identical to SEQ ID NO: 62612

SEQ ID NO: 67889 - protein, 605 aa, Streptococcus pneumoniae; identical to SEQ ID NO: 62783

SEQ ID NO: 67890 - protein, 641 aa, Salmonella enterica; identical to SEQ ID NO: 62984
  subsp. enterica serovar Typhimurium str. DT104

SEQ ID NO: 67891 - protein, 553 aa, Salmonella enterica; identical to SEQ ID NO: 62985
  subsp. enterica serovar Typhimurium str. DT104

SEQ ID NO: 67892 - protein, 695 aa, Streptococcus pneumoniae; identical to SEQ ID NO: 64780

SEQ ID NO: 67893 - protein, 605 aa, Streptococcus pneumoniae; identical to SEQ ID NO: 64781

SEQ ID NO: 67894 - protein, 689 aa, Streptococcus pneumoniae; identical to SEQ ID NO: 67050

SEQ ID NO: 67895 - protein, 605 aa, Streptococcus pneumoniae; identical to SEQ ID NO: 62613

SEQ ID NO: 67896 - protein, 689 aa, Streptococcus pneumoniae; identical to SEQ ID NO: 62612

SEQ ID NO: 67897 - protein, 605 aa, Streptococcus pneumoniae; identical to SEQ ID NO: 62783

SEQ ID NO: 67898 - protein, 689 aa, Streptococcus pneumoniae; identical to SEQ ID NO: 62612

SEQ ID NO: 67899 - protein, 605 aa, Streptococcus pneumoniae; identical to SEQ ID NO: 62783

SEQ ID NO: 67900 - protein, 695 aa, Streptococcus pneumoniae; identical to SEQ ID NO: 64780

SEQ ID NO: 67901 - protein, 605 aa, Streptococcus pneumoniae; identical to SEQ ID NO: 66879

SEQ ID NO: 67902 - protein, 689 aa, Streptococcus pneumoniae; identical to SEQ ID NO: 62612

SEQ ID NO: 67903 - protein, 605 aa, Streptococcus pneumoniae; identical to SEQ ID NO: 62783

SEQ ID NO: 67904 - protein, 699 aa, Streptococcus pneumoniae; identical to SEQ ID NO: 64132

SEQ ID NO: 67905 - protein, 605 aa, Streptococcus pneumoniae; identical to SEQ ID NO: 64133

SEQ ID NO: 67906 - protein, 689 aa, Streptococcus pneumoniae; identical to SEQ ID NO: 62612

SEQ ID NO: 67907 - protein, 605 aa, Streptococcus pneumoniae; identical to SEQ ID NO: 62783

SEQ ID NO: 67908 - protein, 699 aa, Streptococcus pneumoniae; identical to SEQ ID NO: 64132

SEQ ID NO: 67909 - protein, 605 aa, Streptococcus pneumoniae; identical to SEQ ID NO: 64133

SEQ ID NO: 67910 - protein, 695 aa, Streptococcus pneumoniae; identical to SEQ ID NO: 64780

SEQ ID NO: 67911 - protein, 605 aa, Streptococcus pneumoniae; identical to SEQ ID NO: 64781

SEQ ID NO: 67912 - protein, 689 aa, Streptococcus pneumoniae; identical to SEQ ID NO: 62612

SEQ ID NO: 67913 - protein, 605 aa, Streptococcus pneumoniae; identical to SEQ ID NO: 62613

SEQ ID NO: 67914 - protein, 699 aa, Streptococcus pneumoniae; identical to SEQ ID NO: 64132

SEQ ID NO: 67915 - protein, 605 aa, Streptococcus pneumoniae; identical to SEQ ID NO: 64133

SEQ ID NO: 67916 - protein, 695 aa, Streptococcus pneumoniae; identical to SEQ ID NO: 64780

SEQ ID NO: 67917 - protein, 605 aa, Streptococcus pneumoniae; identical to SEQ ID NO: 64781

SEQ ID NO: 67918 - protein, 641 aa, Salmonella enterica; identical to SEQ ID NO: 62984
  subsp. enterica serovar Typhimurium str. DT104

SEQ ID NO: 67919 - protein, 553 aa, Salmonella enterica; identical to SEQ ID NO: 62985
  subsp. enterica serovar Typhimurium str. DT104

SEQ ID NO: 67920 - protein, 689 aa, Streptococcus pneumoniae; identical to SEQ ID NO: 62612

SEQ ID NO: 67921 - protein, 605 aa, Streptococcus pneumoniae; identical to SEQ ID NO: 62783

SEQ ID NO: 67922 - protein, 689 aa, Streptococcus pneumoniae; identical to SEQ ID NO: 62612

SEQ ID NO: 67923 - protein, 605 aa, Streptococcus pneumoniae; identical to SEQ ID NO: 62783

SEQ ID NO: 67924 - protein, 689 aa, Streptococcus pneumoniae; identical to SEQ ID NO: 62612

SEQ ID NO: 67925 - protein, 605 aa, Streptococcus pneumoniae; identical to SEQ ID NO: 62613

SEQ ID NO: 67926 - protein, 699 aa, Streptococcus pneumoniae; identical to SEQ ID NO: 64132

SEQ ID NO: 67927 - protein, 605 aa, Streptococcus pneumoniae; identical to SEQ ID NO: 64133

SEQ ID NO: 67928 - protein, 695 aa, Streptococcus pneumoniae; identical to SEQ ID NO: 64780

SEQ ID NO: 67929 - protein, 605 aa, Streptococcus pneumoniae; identical to SEQ ID NO: 64781

SEQ ID NO: 67930 - protein, 695 aa, Streptococcus pneumoniae; identical to SEQ ID NO: 64780

SEQ ID NO: 67931 - protein, 605 aa, Streptococcus pneumoniae; identical to SEQ ID NO: 64781

SEQ ID NO: 67932 - protein, 689 aa, Streptococcus pneumoniae; identical to SEQ ID NO: 62612

SEQ ID NO: 67933 - protein, 605 aa, Streptococcus pneumoniae; identical to SEQ ID NO: 62783

SEQ ID NO: 67934 - protein, 699 aa, Streptococcus pneumoniae; identical to SEQ ID NO: 64132

SEQ ID NO: 67935 - protein, 605 aa, Streptococcus pneumoniae; identical to SEQ ID NO: 64133

SEQ ID NO: 67936 - protein, 689 aa, Streptococcus pneumoniae; identical to SEQ ID NO: 62612

SEQ ID NO: 67937 - protein, 605 aa, Streptococcus pneumoniae; identical to SEQ ID NO: 62613

SEQ ID NO: 67938 - protein, 689 aa, Streptococcus pneumoniae; identical to SEQ ID NO: 62612

SEQ ID NO: 67939 - protein, 605 aa, Streptococcus pneumoniae; identical to SEQ ID NO: 62783

SEQ ID NO: 67940 - protein, 641 aa, Salmonella enterica; identical to SEQ ID NO: 62984
  subsp. enterica serovar Typhimurium str. DT104

SEQ ID NO: 67941 - protein, 553 aa, Salmonella enterica; identical to SEQ ID NO: 62985
  subsp. enterica serovar Typhimurium str. DT104

SEQ ID NO: 67942 - protein, 695 aa, Streptococcus pneumoniae; identical to SEQ ID NO: 64780

SEQ ID NO: 67943 - protein, 605 aa, Streptococcus pneumoniae; identical to SEQ ID NO: 64781

SEQ ID NO: 67944 - protein, 606 aa, Yersinia aldovae
MSILIDAVRISCFRGLNDLEIPLSRVTVLIGANNSGKTSVLKALQLALGDYSRYFSEEDFFIDENGVVSDKVTIDIKIVPESRNGAFSEEWQEEFEDKIRSEANGDQFLAIRTSTERDSIKGGFSTLRYYLDRWPEYSNWLSESTGTSKQLRKKIDSLAFTSIEAQRDIHIELRDKSSFVGKVLSSVEYNSDDIERLEGLVQVVNDEAVQKSQSLQNLKGHLERLSKSFRGSGHAEITPFPKKIRDLSKQFTVHFGEEADTSFSMEYHGMGTRSWASMLTVKAFIELVGEKHNLEAKQFFPIISAEEPEAHLHPNAQRTLYKQLSESNGQVLISTHSPYLAAIAKQDELRSLVKINGRVCVNRINSTLTDENKRKIQREVIHSRGELFFSNAIVLSEGETEEQSLPLLFSKYFSFEPFEMGVNFIGVGGSGEKYRPFLSFAYDFKIPVFIFSDGEAIIKNKLKKVYESIFGSTDIDNCNLITILDGTDFEGYLLDSGFSQVIESAIIDIDGAGAVDTWIQSKQGLPLKMKKTDEPDCPTCNQPILETPYRDYHVPDGRRKAITEIIDSKKPKYALAITNELCKLEPAHFPPKIIELFDKIKREANL

SEQ ID NO: 67945 - protein, 632 aa, Yersinia aldovae
MIKLSDAQRAVVEAEIGISMQVLASAGSGKTRVLTERVRYILDNTRKDSVIALTFTNKAADEMLERLNNSDDAMERCWIATIHSIAQRIIEQYGYTIGLPSEVHIFEREKDRMEVFLQSIREQGIDIDSYLDVTDNRERKTREKIMQNYMDGFSIIKRELLNEDGVKNKYPHDERFWYIYQDYQNALINSGGIDYDDILVYAHKILLTQDWVGNIYRSKYKHVCVDEAQDLNKAQYEFIKVLCGESIKSIMLVGDPNQMIYGFNSSSIRYLCNDFITDYSPVKFELKENYRSAKEVIRIANKLKPNSQNESEAAIVGAVHFQEAEDEFMEAGWVTLTIQHLLELKEHKDIEGDISLERMVVIARNRFVFSALEKSLSEYGIKYSLKRGERNEEPRSIFGKVLDYAIRIKLNPKDWVDGKKLCQSIKVVPPSTWGGHNVLVDLAKKVLHSDIAYPELQSELLTSLDKLETENPNIRKFINSFDEKLNSLVFLTKDEKLKSELESSILDLNEFSKCWTRFKQKGLGNTLQAFRNAISLGQLSEEVVHGGLTLSTVHTMKGLEKDIVFIIGLCEGIFPDYRAKSVNDINEERNSAFVAVTRAKRWLYLSYPMKRLMPWGDIKNQNPSRFFLEMSK

SEQ ID NO: 67946 - protein, 711 aa, Yersinia aldovae
MYLKSLVIHNFRKFSDVNNKVCFVKAGKTSPEQSPVASSTTVVIGKNNSGKTTITNSLSLICSDTEKLTGNDFNHNYLRKILSSMMASDFSNYPEIKFEMEFILDDIHNDSISNFAPFIDISSLSSLPGEEKKDTIALVLINFRVNDESIFQDKINNLIREKQENIYSDTETFRRFLDLISMTEFKRVIKNKSNRLIEKVRLKNLIDLRVIKVANNIHDQRLLAKSFNRIIKFMYEKNKDELKSILHLVDVNNNSLTEKIKISHQDNVESVLNTIILDESLGIELRANLTFDKLMGDLITYEHRDGENLIPEGQFGLGYANLINIISEIIDYSNRSLHEQKQLKIQLLCIEEPEVFMHPQMQVNFIRHIEEALVKILGLNFKDISSIKSQIIVTTHSSHILNSIIHGSGTFNEINYINSSKGNSECIVLNDNELCHGGDEFDYFNFIKKHVKHQVPELFFSDAIILVEGITEERVLNYHIDNNDVLNRKNISVFRIDGAHGKVYSNLLKKINIPTLIITDIDFKRDSSLFKKVTKMEDGSENTIEYFPQMEGIDNSTETTNSTLSHFLGSKKVGEYPEYHISDNIYLSYQLEKISIDITESKQHYYYATSFEEAFILKNYKNNLLRKVLLGIVGKDYSDIISEKQDDYYLLAMNSFKIQKKLSDSKSAFANSIIYELITSNDIKPELPSYILNGLSWLESQKPKLGGVDYV

SEQ ID NO: 67947 - protein, 676 aa, Yersinia aldovae
MYEIDEIKAEREREIIEEIYSLINNKESFYFQSGAGSGKTYALVKAIRHTGQLDLIKDNHGFRKILCITYTNNATNEIVERLPDSDLYYISTIHYFIWDLLKNYNKELIDVHVSFLESEIINIENTVFRNPDSKDSYKKFREIPISDLEFAIKNIHNDKINYYEVAFGPAKEYWDYLESVMGIDILHRIKSNKKDVSDVIKLLITVNNYKICLESIQKGHVKYKELIYKTNQNIEILHRNIIGHDTLLRYAKMLLLKNRGLSKLVIDLYPYVFIDECQDVNPDIMDFFSEVYEYSKQSEDNFVMGFFGDPMQTIFSKEIVQEPFYSRLNIINKDFNRRSYDEIINSINKIRGNHQPIIQTSIFKNKKGGLIKFQRLDEIYNEKSVIRKIIADHAREWNISSESSFACLVLKNKMLASLCDYEEIYSLVAKLYQTENSSYHNKVNEEFVVKGIKKAGRLAITLHKILLPLFFIVRNDSLSLNEIFPVIPKGQYSLNVVREAIYFFQRVSNCSLLEYIDNVRNKLNGSYPIEIKELIGCNFPEKLVDVGSSLESIILELSGFKNISECSPFLSELLQVNINEFLNWMDYLHGEQKLSGTNYLTCHSSKGLEFDNVLILLEDSMLHDKNIFSELLSSDLNIKLNDKLERARRIFYVSVSRAIKNVSIVLFSKNSVEFHT

SEQ ID NO: 67948 - protein, 729 aa, Staphylococcus aureus; identical to SEQ ID NO: 62500

SEQ ID NO: 67949 - protein, 597 aa, Staphylococcus aureus; identical to SEQ ID NO: 66639

SEQ ID NO: 67950 - protein, 689 aa, Streptococcus pneumoniae; identical to SEQ ID NO: 62612

SEQ ID NO: 67951 - protein, 605 aa, Streptococcus pneumoniae; identical to SEQ ID NO: 62613

SEQ ID NO: 67952 - protein, 689 aa, Streptococcus pneumoniae; identical to SEQ ID NO: 62612

SEQ ID NO: 67953 - protein, 605 aa, Streptococcus pneumoniae; identical to SEQ ID NO: 62783

SEQ ID NO: 67954 - protein, 699 aa, Streptococcus pneumoniae; identical to SEQ ID NO: 64132

SEQ ID NO: 67955 - protein, 605 aa, Streptococcus pneumoniae; identical to SEQ ID NO: 64133

SEQ ID NO: 67956 - protein, 699 aa, Streptococcus pneumoniae; identical to SEQ ID NO: 64132

SEQ ID NO: 67957 - protein, 605 aa, Streptococcus pneumoniae; identical to SEQ ID NO: 64133

SEQ ID NO: 67958 - protein, 689 aa, Streptococcus pneumoniae; identical to SEQ ID NO: 62612

SEQ ID NO: 67959 - protein, 605 aa, Streptococcus pneumoniae; identical to SEQ ID NO: 62613

SEQ ID NO: 67960 - protein, 641 aa, Salmonella enterica; identical to SEQ ID NO: 62984
  subsp. enterica serovar Typhimurium str. DT104

SEQ ID NO: 67961 - protein, 553 aa, Salmonella enterica; identical to SEQ ID NO: 62985
  subsp. enterica serovar Typhimurium str. DT104

SEQ ID NO: 67962 - protein, 689 aa, Streptococcus pneumoniae; identical to SEQ ID NO: 62612

SEQ ID NO: 67963 - protein, 605 aa, Streptococcus pneumoniae; identical to SEQ ID NO: 62783

SEQ ID NO: 67964 - protein, 699 aa, Streptococcus pneumoniae; identical to SEQ ID NO: 64132

SEQ ID NO: 67965 - protein, 605 aa, Streptococcus pneumoniae; identical to SEQ ID NO: 64133

SEQ ID NO: 67966 - protein, 695 aa, Streptococcus pneumoniae; identical to SEQ ID NO: 64780

SEQ ID NO: 67967 - protein, 605 aa, Streptococcus pneumoniae; identical to SEQ ID NO: 66879

SEQ ID NO: 67968 - protein, 699 aa, Streptococcus pneumoniae; identical to SEQ ID NO: 66962

SEQ ID NO: 67969 - protein, 605 aa, Streptococcus pneumoniae; identical to SEQ ID NO: 66963

SEQ ID NO: 67970 - protein, 689 aa, Streptococcus pneumoniae; identical to SEQ ID NO: 62612

SEQ ID NO: 67971 - protein, 605 aa, Streptococcus pneumoniae
MVKSEEWFPKGDIILEETALGAVKDVTNCLVIAGPGAGKTELLAQKLDYLFSTNKCVSPKKILALSFKTDAASNLKERVKKRYGDEYASRFTSLTYSAFEKRILDQFRDVLPEDIRPSRDYLIEDWYTIKELLSMNGINVNGWRMSDIRRYVENIILNNGDNHKFKTDLLKGTQDNKPVLLYRQITKLSTQIIDTNEYIRKALQMTYDFVFLDEFQDTTYAQYDLLKTCFLGSSCKLTAVGDDKQAIMRWAGAKPDIFPDYIRDFNSNEYQLLMNHRSVPKLVEFQKEVHQILNSNHSSIQTNNYPEFQEGEITLFEFENESLEAKLIANDIESKIQGGIRPSEICILAKQKVGIYSFELISILNSKGIKARIENEYQDILKDPTCNLLLDLISCSQGKRDPLIWENISNFYGNINGIDELTDELILAKSYKEIDNIVSDITYLISNFIPNEESMLKLIDCIIEKIDEKRIISNFSTYNGKSDLDIIVKNFSKILYIEYSQTQGEWLDTVSSFKGENSIPIMTIHKSKGLEYEVVYFLGLEDSAFWSFNDQPEEDKSAFFVALSRAKSHLIFTYCKLRNNSPQNNRNINEIYSLLTQSNLVNVIN

SEQ ID NO: 67972 - protein, 695 aa, Streptococcus pneumoniae; identical to SEQ ID NO: 64780

SEQ ID NO: 67973 - protein, 605 aa, Streptococcus pneumoniae; identical to SEQ ID NO: 64781

SEQ ID NO: 67974 - protein, 689 aa, Streptococcus pneumoniae; identical to SEQ ID NO: 62612

SEQ ID NO: 67975 - protein, 605 aa, Streptococcus pneumoniae; identical to SEQ ID NO: 62783

SEQ ID NO: 67976 - protein, 525 aa, Yersinia pseudotuberculosis
MEISSLKLKGFRNFKDARINFNSNTLIIGANDVGKSNMLHSLRMLLDKSVSDSEIEPNELDFHLENGNSSEEFEIIIHFKDINEDAVLSILKGNVSDSGESFIKYVAQKSDLSYKLFIGDSLESLQEINSRYYLKFVNLKYIQSQRDLERFIRKEKRQLLKIAQQSLNSDEREEDDDLLGEISSDLQSINDKISQLIYVERATKDVNDELKKLAHHYSEYSVQLDTGAIGINDFIDNLQLGANTNGSNVMLGGDGRNNQILLALWKAKSIKEHDIDNEVIFYVIEEPEAHLHPHQQRKLADYLIAELPGQTIISSHSPQIAVNFEPDSVIRLLDRTGHTVAASEGCSKGISDGWEDMSYRMSILPAESFFSNGVFLIEGPSEILFYHSLARSLNIDLDYLNISLISVDGISFKIYAAILDALEIPWVMRTDNDISKLKDQEKWQYAGINRCLDLVGIEKFEHSDKKITSIDTLTNGDWQTVSEEINKYGIYLSKIDLETDLVEELSASILDALNKKNNQSAIEYL

SEQ ID NO: 67977 - protein, 541 aa, Yersinia pseudotuberculosis
MSTFSPTTQQTLAIDYPKSMVITACPGSGKTTVIKEKIRYITGCLPEHKGVIAITLTRKASSELERRCKAEGHDTKHSFFGTIDSFCLKEIIIPFLPRIWGGKPTECKVLKKLESPYKYYLEEEFFGTPSVVNINEDSGYKKLYDEGMLWMSSFAALALKILNESPAAKRYIKARYSHIFIDEYQDSSLSQHQLFLKINELGLCSIAVGDVWQSIYEFRGGNAELLLDLVRDKLVFAHFEINLNHRCHPSIINYASRLLYSNFELLPSESINVYRKRLSGNLKDVSMKISSWISKWLNEGQWGLEQANQIAIFARKEQSLLLLCSGLTSNFRVYIDTPLDKLGTECSDLYKDLLAYRYKAIGTAQELINKVFDNLIINHNHQFLLRKKIKTLRGKLTDEELINKFHEIAEMLNIQFTTPNDNAALEIISDDIFLKQFMPLDKNEVQVMTLHKSKGLEFKIVLHLDLDEWSFPYRLVNEVDRNTALYPSLPQETNLHYVGITRAEECCVLINTEFRQNSTGAFKKSEASYFFKLPQLEGLYR

SEQ ID NO: 67978 - protein, 695 aa, Streptococcus pneumoniae; identical to SEQ ID NO: 64780

SEQ ID NO: 67979 - protein, 605 aa, Streptococcus pneumoniae; identical to SEQ ID NO: 64781

SEQ ID NO: 67980 - protein, 641 aa, Yersinia intermedia
MKLEAIRLSGFQSFGKEPTELSLEDVTYLIGPNGSGKTAALQALCRLFAFDPTLRRVQRTDFHVPFDEDEFPPERQLWIEADFLFHELAEDEDNSTVAPYFGHMRLDEPEGIPRVRFRLTATMGTDGDIEENLVYVLDVSPDSSPQTTAQVTRAERNNIQVHYLPARRDPADHIAYGANALLGRLLRAVRWDDERNTIRGLTNQISDSLAANPSINAFSESLKLTWATLHKGKFFSDPKITFVASEIEALLRHLSVSFTPGHDGSLVDFSRLSDGQKSMLYLSLVLSSQAIGRAVLAEEDVTFDPDKLRPPIFTLVAVEEPENSLSPHYLGRIVSALNTMAKNIDAQALIATHAPSMLRRVDPKFIRYLRLTEERKTRITCIKLPPKTDEAHKFVREAVQAFPEIYFSRLVVLGEGDSEGIVLPRLLQVKGTPVDESAITVAPLGGRHVNHFWRLLSALQIPYLTLLDLDVARYGAGWGRIKYVNDQLAAFEPEKVLPTEWKITKWNDETTPIRTHHFFNKGTQDIFKELENRSVFFSFPMDLDFSMLLAYPEAYGVEKEEPDESTIKAVLGKSYDNISQYSVDEQSFFATYHLRFKLGSKPAAHIDALAKLSDKKLIANMPESLNRLVDAVIAKLGELPE

SEQ ID NO: 67981 - protein, 555 aa, Yersinia intermedia
MIPIEAWQPADGLTLEPNAKRAAKARKRCLALTAGPGAGKTEMLAQRADFLLRTGTCRYPKRILAISFKVDASRNLKERVERRCGADLASRFDSYTFHAFAKRIIDRFRPVLKGREALDSDYTIVDKKISISRSQIEFSDLVPLAIKILQNSKIARNSIRQTYSDIFLDEFQDCTNLQYELVKLAFLGTKIRLTAVGDTKQKIMGWAGAMDGIFQTFTDDFNAVPLNMYRNFRSKPQLLRVQNEIIRRLDLASVMPDEQLNGDEGEIHVESFRNSQEEAIYLANIINDWINKEGLAPTEIAVLVSKQLDLYADHLMMELELRGIPYRNEQQMQDITVEPVARLIVDYLSCLYGKREPKAWIRLMNQLIPFADEEVQSCARKDLDRLLKKQRKEATSAEQLDSPFSCWWKFVKEFLKHIGTDTIVALSPDYESHKRLQEVFRDTKARIEELLEIESDLPQALGRFTDDQAVRILTIHKSKGLEFDSVIIMAVENEIFFGNQDENRCAFFVGVSRTKRRLFLTHAAQRERPANAKRWEVHRTVQSEYIGYVTPFIKR

SEQ ID NO: 67982 - protein, 689 aa, Streptococcus pneumoniae; identical to SEQ ID NO: 62612

SEQ ID NO: 67983 - protein, 605 aa, Streptococcus pneumoniae; identical to SEQ ID NO: 62783

SEQ ID NO: 67984 - protein, 699 aa, Streptococcus pneumoniae; identical to SEQ ID NO: 64132

SEQ ID NO: 67985 - protein, 605 aa, Streptococcus pneumoniae; identical to SEQ ID NO: 64133

SEQ ID NO: 67986 - protein, 689 aa, Streptococcus pneumoniae; identical to SEQ ID NO: 62612

SEQ ID NO: 67987 - protein, 605 aa, Streptococcus pneumoniae; identical to SEQ ID NO: 62613

SEQ ID NO: 67988 - protein, 699 aa, Streptococcus pneumoniae; identical to SEQ ID NO: 64132

SEQ ID NO: 67989 - protein, 605 aa, Streptococcus pneumoniae; identical to SEQ ID NO: 64133

SEQ ID NO: 67990 - protein, 695 aa, Streptococcus pneumoniae; identical to SEQ ID NO: 64780

SEQ ID NO: 67991 - protein, 392 aa, Streptococcus pneumoniae
  MOD_RES (369)..(377): Any amino acid
MVKSDDWLPKGDIILENAALEAVKNVNNCLVIAGPGAGKTELLAQKLDYLFSTNECISPKKILALSFKTDAAANMKNRVKKRYGDEYASRFTSLTYSAFEKMILDQYINALPEEIRPDRDYLVDDWDVIKATLIKNGINVNGRRMSDIRKSVEKTVLNDEANLKFKKDLLKGTRNNKAVLLYKQITKLATYIIYTNKYIRKALQMTYEFVFLDEFQDTTYDQYNLLKTCFLGSTCKLTAVGDNKQAIMRWAGANPDIFQDYKLDFKANEYQLLMNHRSVPKLIEFQKEVHQILNSNHSSIQSNYYPEFQEGEITLFEFENESLESKLIANDIESKIQGGIRPSEICILAKQKVDDYSSKLIITLSSKGXXXXXXXXXVKGLKQELKMNIKNF

SEQ ID NO: 67992 - protein, 695 aa, Streptococcus pneumoniae; identical to SEQ ID NO: 64780

SEQ ID NO: 67993 - protein, 605 aa, Streptococcus pneumoniae; identical to SEQ ID NO: 64781

SEQ ID NO: 67994 - protein, 699 aa, Streptococcus pneumoniae; identical to SEQ ID NO: 64132

SEQ ID NO: 67995 - protein, 605 aa, Streptococcus pneumoniae; identical to SEQ ID NO: 64133

SEQ ID NO: 67996 - protein, 695 aa, Streptococcus pneumoniae; identical to SEQ ID NO: 64780

SEQ ID NO: 67997 - protein, 605 aa, Streptococcus pneumoniae
MVKSDDWLPKGDIILENAALEAVKNVNNCLVIAGPGAGKTELLAQKLDYLFSTNECISPKKILALSFKTDAAANMKNRVKKRYGDEYASRFTSLTYSAFEKMILDQYINALPEEIRPDRDYLVDDWDVIKATLIKNGINVNGRRMSDIRKSVEKTVLNDEANLKFKKDLLKGTRNNKAVLLYKQITKLATYIIYTNKYIRKALQMTYEFVFLDEFQDTTYDQYNLLKTCFLGSTCKLTAVGDNKQAIMRWAGANPDIFQDYKLDFKANEYQLLMNHRSVPKLIEFQKEVHQILNSNHSSIQSNYYPEFQEGEITLFEFENESLESKLIANDIESKIQGGIRPSEICILAKQKVDDYSSKLIITLSSKGIKARIENEYQELLKDPTCNLLLDLISCSQGKRDPLIWENISNFYGNINGIDELTDELILAKSYKEIDNIVSDITYLISNVIPDKDRMLNLINCIIEKIDEKRIISNFSTYNRKSDLDIIVKNFSKLLYKEYSQTQGEWLNTVSSFKGENSIPIMTIHKSKGLEYEVVYFLGLEDSAFWSFNDQPEEDKSAFFVALSRAKSHLIFTYCKLRNNSPQNNRNINEIYSLLTQSNLVDVIN

SEQ ID NO: 67998 - protein, 699 aa, Streptococcus pneumoniae; identical to SEQ ID NO: 66962

SEQ ID NO: 67999 - protein, 605 aa, Streptococcus pneumoniae; identical to SEQ ID NO: 66963

SEQ ID NO: 68000 - protein, 695 aa, Streptococcus pneumoniae; identical to SEQ ID NO: 64780

SEQ ID NO: 68001 - protein, 605 aa, Streptococcus pneumoniae; identical to SEQ ID NO: 66879

SEQ ID NO: 68002 - protein, 699 aa, Streptococcus pneumoniae; identical to SEQ ID NO: 64132

SEQ ID NO: 68003 - protein, 605 aa, Streptococcus pneumoniae; identical to SEQ ID NO: 64133

SEQ ID NO: 68004 - protein, 729 aa, Staphylococcus aureus; identical to SEQ ID NO: 62500

SEQ ID NO: 68005 - protein, 597 aa, Staphylococcus aureus; identical to SEQ ID NO: 66639

SEQ ID NO: 68006 - protein, 689 aa, Streptococcus pneumoniae; identical to SEQ ID NO: 62612

SEQ ID NO: 68007 - protein, 605 aa, Streptococcus pneumoniae; identical to SEQ ID NO: 62783

SEQ ID NO: 68008 - protein, 689 aa, Streptococcus pneumoniae; identical to SEQ ID NO: 62612

SEQ ID NO: 68009 - protein, 605 aa, Streptococcus pneumoniae; identical to SEQ ID NO: 62783

SEQ ID NO: 68010 - protein, 695 aa, Streptococcus pneumoniae; identical to SEQ ID NO: 64780

SEQ ID NO: 68011 - protein, 605 aa, Streptococcus pneumoniae; identical to SEQ ID NO: 64781

SEQ ID NO: 68012 - protein, 699 aa, Streptococcus pneumoniae; identical to SEQ ID NO: 64132

SEQ ID NO: 68013 - protein, 605 aa, Streptococcus pneumoniae; identical to SEQ ID NO: 64133

SEQ ID NO: 68014 - protein, 527 aa, Salmonella enterica subsp. enterica serovar Typhi
MLHSLRILLDKSLSESEIEPDELDFHLENGTPCEEIEIIVHFKDINEDAVLSILKGNVSDSGESFIKYSAIKSDLSYKLFIGSSLESLQEINSRYYLKFVNLKYIQSQRDLEKFIRKEKRQLLKIAQQSLTPGERVEDDDLLREISSDLQVINDKISQLIYVERATKDVNDEIKKLAHHYSEYSVQLDTGVIGINEFIDSLQLGANSNGSSVMLGGDGRNNQILLALWKAKSIREHDIDNEVIFYVIEEPEAHLHPHQQRKLADYLTTELPGQTIISSHSPQIAVNFEPGSVIRLLDRAGHTVAASEGCSRYITDGWEGMSYRMSILPAESFFSNGVFLVEGPSEILFYQSLAKSLNIDLDYWNISIVSVDGIAFKIYVAILNALEIPWVMRTDNDISKIKDKWQYAGINRCLSIVGIDNFEHSDVEITPMDTVTNGEWLKVSKIINEHGVYLSKIDLETDLVEELNTPVLNALDKKSNQSAIKYLQKKKALRMRELLKIIRKDLHKLNAGNLVKPLNHLVKLIKGE

SEQ ID NO: 68015 - protein, 541 aa, Salmonella enterica subsp. enterica serovar Typhi
MSVFSPTHQQTLAIDYTGSMVITACPGSGKTTVIKEKIRNITASLPDHKGVIAITFTRKASSELERRCKSEGHDVKHSFFGTIDSFCLKELIIPFLSRLWGGTPTECKVLKRLDPPYSYFIENNFSGTPSIININEDSGYKKLYDNGILWMGSFSALALKILNESSAAKRYIKARYSHIFIDEYQDSSLSQHQLFLKINELGLYSIAVGDVWQSIYEFRGGNSKLLLELVSKTEVFKHFEINFNHRCHPSISNYASRLLNPSYNLLPTDDIRVFRRRLSGNLKDNAVTISSWISDWLESGEWELEKANQIAILARKEKSLTRFCSGLNLNFRLYIDTPLDKIGTECSDLYKDLLAYKYGSINTVQELINKVFDGVIINDNIKFFLRKKIKEIKTELKYEDLIHKFHDIADILGINSTEHTDEAVIKTISNEVLVKQFKPLDDNELQVMTLHKSKGLEFKVVFHLDLDEWSFPYRKPGSEDKYTPLYPTLQQELNLHYVGITRAENCIVLINSSLRENSGGEFKKSDESYFFKLPQLNGLYN

SEQ ID NO: 68016 - protein, 689 aa, Streptococcus pneumoniae; identical to SEQ ID NO: 62612

SEQ ID NO: 68017 - protein, 605 aa, Streptococcus pneumoniae; identical to SEQ ID NO: 62783

SEQ ID NO: 68018 - protein, 695 aa, Streptococcus pneumoniae; identical to SEQ ID NO: 64780

SEQ ID NO: 68019 - protein, 605 aa, Streptococcus pneumoniae; identical to SEQ ID NO: 64781

SEQ ID NO: 68020 - protein, 689 aa, Streptococcus pneumoniae; identical to SEQ ID NO: 62612

SEQ ID NO: 68021 - protein, 605 aa, Streptococcus pneumoniae; identical to SEQ ID NO: 62613

SEQ ID NO: 68022 - protein, 695 aa, Streptococcus pneumoniae; identical to SEQ ID NO: 64780

SEQ ID NO: 68023 - protein, 605 aa, Streptococcus pneumoniae; identical to SEQ ID NO: 66879

SEQ ID NO: 68024 - protein, 585 aa, Streptococcus pneumoniae; identical to SEQ ID NO: 62976

SEQ ID NO: 68025 - protein, 512 aa, Streptococcus pneumoniae; identical to SEQ ID NO: 62977

SEQ ID NO: 68026 - protein, 689 aa, Streptococcus pneumoniae; identical to SEQ ID NO: 62612

SEQ ID NO: 68027 - protein, 605 aa, Streptococcus pneumoniae; identical to SEQ ID NO: 62613

SEQ ID NO: 68028 - protein, 699 aa, Streptococcus pneumoniae; identical to SEQ ID NO: 64132

SEQ ID NO: 68029 - protein, 605 aa, Streptococcus pneumoniae; identical to SEQ ID NO: 64133

SEQ ID NO: 68030 - protein, 699 aa, Streptococcus pneumoniae; identical to SEQ ID NO: 64132

SEQ ID NO: 68031 - protein, 605 aa, Streptococcus pneumoniae; identical to SEQ ID NO: 64133

SEQ ID NO: 68032 - protein, 699 aa, Streptococcus pneumoniae; identical to SEQ ID NO: 64132

SEQ ID NO: 68033 - protein, 605 aa, Streptococcus pneumoniae; identical to SEQ ID NO: 64133

SEQ ID NO: 68034 - protein, 689 aa, Streptococcus pneumoniae; identical to SEQ ID NO: 62612

SEQ ID NO: 68035 - protein, 605 aa, Streptococcus pneumoniae; identical to SEQ ID NO: 62613

SEQ ID NO: 68036 - protein, 689 aa, Streptococcus pneumoniae; identical to SEQ ID NO: 62612

SEQ ID NO: 68037 - protein, 605 aa, Streptococcus pneumoniae; identical to SEQ ID NO: 62783

SEQ ID NO: 68038 - protein, 695 aa, Streptococcus pneumoniae; identical to SEQ ID NO: 64780

SEQ ID NO: 68039 - protein, 605 aa, Streptococcus pneumoniae; identical to SEQ ID NO: 64781

SEQ ID NO: 68040 - protein, 566 aa, Yersinia frederiksenii
MYIDNIYLKGYRNYSDAYIRLDKTTLIIGANDVGKTNLLYSLRLLLDKSLSELDLEPKSNDFHIDKNGAPAEEIEITLNFKDVTEDAVISKLSGYVSESNEVFIRYFANKTTLEYKIYIGHKVSDMEEISSRFYLKYLSLRYINSQRDLLKYIKLEKKHLLRLAQEHRTEEQSEKDKLTYEGLSSLLDSVNEKVKDLSYVAAATSELNTELQKLAYKNEGYTVQLDSGAIGVDQFIEKLELSASTNGQRVMLGGDGLNNQILLALWKAKSVREHDVENEVIIYCVEEPEAHLYPHQQRKISNYLINKLPGQSIVTSHSPQIAVNYQPSSIVKIYSEDGSSQAASDGCSDCISKAWDGMGYRISIIPAEAFFSDVVFLVEGPSEKIFYEQLAKVIDIDLDYYNISILSVDGIQFEVYTKILDAFNIRWVIRTDNDMSKIPYKDEWQFAGINRALYLCGMQAIENRPLPIPESDLITQWGNYSPILNRKGIFLSFIDLESDLAEQFSEEIQSYSHTDNNTDAAHYLRGKKAIRMRELLQFKRNKLINLVGSDLSRPLIMCQKIARGAI

SEQ ID NO: 68041 - protein, 538 aa, Yersinia frederiksenii
MNLTTEQKAAIDYPHNAVITACPGSGKTTILIYKIKSLLTHCKNYQGIIAISYTNKASDELKKRCQSLIFDTKESFFGTIDKFYLKEIIIPFLKQIWGTPTSLISTFKYSDLSVDNKELVNIYFPLDNIDFTLLNDNLNNLVKLFKSGIIVLETIPILAFIVLCNSESCKRYIKAKYKGIFIDEYQDSGVVQHRIFLKLAEIGLISIAVGDLEQSIYGYSGRSPENLKKLILEPRFKHLTITINHRCHPSISNYANRLMRPDCALLETNEQRVFRKKINGNQTEIARWIGVNLDKIKKHYAINKNRDVAILVRSNLCASIIASNVNYPNRAYFDDLLSKLDGVTTDLIKNLLSYRYENNTAQSIIDSFYKNISNKMIITSLRRKIKEVRVCDDDQLIIKIKDVVFLLIDKDISVSHVDAINEVINNVEIRNNYKKSSDNEIQILTLHKSKGLEFDFVFHIDLYDWILPRRAFIKGSYDIVFENEEQCLNLHYVGITRAKKGIVLITSTKRLNSDLEEKNGNPSQFLERQGLAELYLQL

SEQ ID NO: 68042 - protein, 695 aa, Streptococcus pneumoniae; identical to SEQ ID NO: 64780

SEQ ID NO: 68043 - protein, 605 aa, Streptococcus pneumoniae; identical to SEQ ID NO: 64781

SEQ ID NO: 68044 - protein, 695 aa, Streptococcus pneumoniae; identical to SEQ ID NO: 64780

SEQ ID NO: 68045 - protein, 605 aa, Streptococcus pneumoniae; identical to SEQ ID NO: 64781

SEQ ID NO: 68046 - protein, 695 aa, Streptococcus pneumoniae; identical to SEQ ID NO: 64780

SEQ ID NO: 68047 - protein, 605 aa, Streptococcus pneumoniae; identical to SEQ ID NO: 64781

SEQ ID NO: 68048 - protein, 699 aa, Streptococcus pneumoniae; identical to SEQ ID NO: 64132

SEQ ID NO: 68049 - protein, 605 aa, Streptococcus pneumoniae; identical to SEQ ID NO: 64133

SEQ ID NO: 68050 - protein, 695 aa, Streptococcus pneumoniae; identical to SEQ ID NO: 64780

SEQ ID NO: 68051 - protein, 605 aa, Streptococcus pneumoniae; identical to SEQ ID NO: 64781

SEQ ID NO: 68052 - protein, 641 aa, Salmonella enterica; identical to SEQ ID NO: 62984
  subsp. enterica serovar Typhimurium str. DT104

SEQ ID NO: 68053 - protein, 553 aa, Salmonella enterica; identical to SEQ ID NO: 62985
  subsp. enterica serovar Typhimurium str. DT104

SEQ ID NO: 68054 - protein, 699 aa, Streptococcus pneumoniae; identical to SEQ ID NO: 64132

SEQ ID NO: 68055 - protein, 605 aa, Streptococcus pneumoniae; identical to SEQ ID NO: 64133

SEQ ID NO: 68056 - protein, 585 aa, Streptococcus pneumoniae; identical to SEQ ID NO: 66870

SEQ ID NO: 68057 - protein, 512 aa, Streptococcus pneumoniae; identical to SEQ ID NO: 62977

SEQ ID NO: 68058 - protein, 689 aa, Streptococcus pneumoniae; identical to SEQ ID NO: 67080

SEQ ID NO: 68059 - protein, 605 aa, Streptococcus pneumoniae; identical to SEQ ID NO: 67081

SEQ ID NO: 68060 - protein, 710 aa, Yersinia ruckeri; identical to SEQ ID NO: 65078

SEQ ID NO: 68061 - protein, 598 aa, Yersinia ruckeri; identical to SEQ ID NO: 65079

SEQ ID NO: 68062 - protein, 695 aa, Streptococcus pneumoniae; identical to SEQ ID NO: 64780

SEQ ID NO: 68063 - protein, 605 aa, Streptococcus pneumoniae; identical to SEQ ID NO: 64781

SEQ ID NO: 68064 - protein, 689 aa, Streptococcus pneumoniae; identical to SEQ ID NO: 62612

SEQ ID NO: 68065 - protein, 605 aa, Streptococcus pneumoniae; identical to SEQ ID NO: 62783

SEQ ID NO: 68066 - protein, 695 aa, Streptococcus pneumoniae; identical to SEQ ID NO: 64780

SEQ ID NO: 68067 - protein, 605 aa, Streptococcus pneumoniae; identical to SEQ ID NO: 64781

SEQ ID NO: 68068 - protein, 695 aa, Streptococcus pneumoniae; identical to SEQ ID NO: 64780

SEQ ID NO: 68069 - protein, 605 aa, Streptococcus pneumoniae; identical to SEQ ID NO: 64781

SEQ ID NO: 68070 - protein, 689 aa, Streptococcus pneumoniae; identical to SEQ ID NO: 62612

SEQ ID NO: 68071 - protein, 605 aa, Streptococcus pneumoniae; identical to SEQ ID NO: 62613

SEQ ID NO: 68072 - protein, 689 aa, Streptococcus pneumoniae; identical to SEQ ID NO: 62612

SEQ ID NO: 68073 - protein, 605 aa, Streptococcus pneumoniae; identical to SEQ ID NO: 62783

SEQ ID NO: 68074 - protein, 689 aa, Streptococcus pneumoniae; identical to SEQ ID NO: 62612

SEQ ID NO: 68075 - protein, 605 aa, Streptococcus pneumoniae; identical to SEQ ID NO: 62783

SEQ ID NO: 68076 - protein, 689 aa, Streptococcus pneumoniae; identical to SEQ ID NO: 62612

SEQ ID NO: 68077 - protein, 605 aa, Streptococcus pneumoniae; identical to SEQ ID NO: 62783

SEQ ID NO: 68078 - protein, 607 aa, Salmonella enterica subsp. enterica serovar Typhi; identical to SEQ ID NO: 66932

SEQ ID NO: 68079 - protein, 630 aa, Salmonella enterica subsp. enterica serovar Typhi; identical to SEQ ID NO: 66933

SEQ ID NO: 68080 - protein, 585 aa, Streptococcus pneumoniae; identical to SEQ ID NO: 62976

SEQ ID NO: 68081 - protein, 512 aa, Streptococcus pneumoniae; identical to SEQ ID NO: 62977

SEQ ID NO: 68082 - protein, 699 aa, Streptococcus pneumoniae; identical to SEQ ID NO: 64132

SEQ ID NO: 68083 - protein, 649 aa, Streptococcus pneumoniae; identical to SEQ ID NO: 67299

SEQ ID NO: 68084 - protein, 699 aa, Streptococcus pneumoniae; identical to SEQ ID NO: 64132

SEQ ID NO: 68085 - protein, 605 aa, Streptococcus pneumoniae; identical to SEQ ID NO: 64133

SEQ ID NO: 68086 - protein, 689 aa, Streptococcus pneumoniae; identical to SEQ ID NO: 62612

SEQ ID NO: 68087 - protein, 605 aa, Streptococcus pneumoniae; identical to SEQ ID NO: 62783

SEQ ID NO: 68088 - protein, 689 aa, Streptococcus pneumoniae; identical to SEQ ID NO: 62612

SEQ ID NO: 68089 - protein, 605 aa, Streptococcus pneumoniae; identical to SEQ ID NO: 62783

SEQ ID NO: 68090 - protein, 695 aa, Streptococcus pneumoniae; identical to SEQ ID NO: 64780

SEQ ID NO: 68091 - protein, 605 aa, Streptococcus pneumoniae; identical to SEQ ID NO: 66879

SEQ ID NO: 68092 - protein, 585 aa, Streptococcus pneumoniae; identical to SEQ ID NO: 62976

SEQ ID NO: 68093 - protein, 512 aa, Streptococcus pneumoniae; identical to SEQ ID NO: 62977

SEQ ID NO: 68094 - protein, 761 aa, Yersinia enterocolitica
MYLRKLAVRNFRRLHDVVIDLASDISIFVGANNSGKTSVGHALQLFTGKGRFNIHDFNAELWTDIVRFGEGADAVSLPSLEVDIWFEVTSNDVHRVVDLLPSLSWSGSLVGMRVAFAPCNPEEIRSRFLAVRQLAVDATPKDENGTPKFDPSPRNLWEYLRDSLNDEYELRYFVLDPTRFNAEMISEEGYEPTSLTGRDRSGREILNSLIQINFLNAQRHLSDGSGGSRSEDLSRVLSRFYGRNLEQKGEDYEALSALAASESAFNQHLERVFAPTLKSLAKLGYPGLSNPRMMIRSALDPAQIMNNQNGAVIHYALGVDDGNPAPPTLPDSYNGLGFKNLIFMVVELLDIHNQWLAIEENRPPVHLIFIEEPEAHLHAQLQQAFIRKIMDLLAMESEELMHYTTQVVVTSHSTHILYERGFRPIRYFRRRRSSNMSATDVLNLSVFYDNTDPEIRDFLERYLKLTHCDLFFADGAVLVEGNVERLLLPQMIATAAPRLKSSYLTVLEIGGAFGYRFQKLIEYLGLTTLIITDLDSVFCTPPVQDETDTPAANDDGEEPDDDEEEEQANTETPGKACIASHPGAMTSNQTLRQWLPKCDTVAALWEATEEMKIQRRTAECDALVRVAYQCQTNVTWKEETLALAGRTLEEAFALENLPWCQDVSCKPLKLRIARAVSMDLLPLAQRIHKRVQSKSFSKTDFALNLLLKKPDEWSVPTYIAEGLKWLEAEIAPPELEITEGQEEGAEDMSVDLTEIDGGRVA

SEQ ID NO: 68095 - protein, 625 aa, Yersinia enterocolitica
MTSRIGSPDTQADLDVRACLDNSPPCSFVMVAGAGSGKTTSLIKALAHLAGTRGSDLRRAGQKISCITYTEVAVGEIAADVGNSQLFHISTIHSFLWSVIRPFHLDIAKWVVARIHEKIAEKQAHYDRPRTQAKTKSRLEDEIAYLSAQLEYIDDVDKFIYGTGSNYAKGILGHDDILKLVPACIEAHPLLRRIVAKRFPFVFVDESQDTDPDVISALRTIADDNPDMCIGFFGDPMQKIYMSGAGAVPLSDGWSEITKPENFRCPTSVLGVINSIRASGDGLQQIRGRTTIVDGVEQTVSGTVNLFILPSNVERSAYLTSVRRYLANETSDEQWLSDTREGDVRLLVLVHRMAANRLGFPNLFAALTDKAPMSLSEGVNDGSAWPLRPFVQHILPIFAAAQANDQFQIMSIMRSECPKLEPLRLHGQAMVAVLNELQQGIDGLLELLEEGSQATVRDILLHVKDCELLRLDDRFYNHLSDEPVNDGNDDFENVQNYLRCNAHELWAYRRYLSEESPFATHHGVKGAQFERVLVVIDDEEARFSQYSYGKYFQYIPLSDNDLANLEEGKESVLDRTRRLFYVCCSRALKDLAVVIFVPDVAAAQAAIVEKNLFPASAILGAHDLG

SEQ ID NO: 68096 - protein, 649 aa, Yersinia enterocolitica; identical to SEQ ID NO: 65958

SEQ ID NO: 68097 - protein, 592 aa, Yersinia enterocolitica
MMDNQFTDEQINYINSSIDKHIFLEACPGSGKTEVVAAKLAKEIYIWNKRPGGIAVLSFANSATEELIKRVSKYCNAGQSIYPHFIGTFDSFIYKNIVSPLATELTNYTGTGNDATIRIVEPSAQMGYRTKYSYAKRGNIHAHHYSHNLRSGGIIFETGDAVFDRALNTLKLENWQIQDFSETKRRMLDGGFATYRDIEYLALRALNEERFKHFVSLLAKRYPLIIIDECQDLSEEQLTILQILLNQGTKLQFVGDLYQAIYGFREVEPARVKKFIIDNNFNILELTRNFRSCQNIVNLCAKLTGRNNINGNVTWLDPRCLVVQYQNSPTELTDTFDSICKNYNKNVIVSRGHSNLLKFQTSENELNNIQKLALAISIYNSDDMSMLTNSLQLFSEFIRHHLKESCKTKDFNCPYSVNSSISWRKFLCASLSYMNSIGLQNMNISWSNWVKQAKSSIRILSSKEFCPTNISAALAPLASVNLTSPSGLANKEVNSTLGTISESTSLYGRSTIHGAKGETHDVTIVVSSTRSGKDSHWLDWLSDPKSEAARFAYVASSRPQHYLIWAVKTLKNEEKKKLEAIGFTVLPLDTNT

SEQ ID NO: 68098 - protein, 546 aa, Pseudomonas aeruginosa
MRLDSIRGVPRVRYRLDATLGLDDEIEQSLRYVSEVDEDGNPIATSPVPRDERNQIQVHYLPARRDPAEHITYGTNALLGRLLRAVNWTEQREKISQLSADISASLSTNQSVINLGDGIANAWGKLHKGKFFKDPSLTFVSHEIEALLRHLSVSFTPGHGEQQVDFSRLSDGQKSMLYLTLVLTSQAIGRAVLKGDDDSFDLDKLKPAVFTLVALEEPENSLSPHYLGRIVSSLKALVLGKDAYDAQAMIATHAPSMLRRVEPEQIRYLRLDDSRCTAVTKITMPPKAGEAYKFVREAVQAFPEIYFSRLVVLGEGDSEEIVLPRLLAAEGLMVDEAAVCIAPLGGRHVNHFWRLLSGLKIPYVTLLDLDVARHGGGWGRINYVATQLNLHCPNQGYMPDDQLAKLPSWDNPKYKILKVEKSREWRNYIAELEPFDVFFSSPMDLDFSMLCAFPQAFGVEAKDLVAPKIGQLRSVLGDSFFDEKQYTVTERKHFAAYHRLFKVDSKPKSHIEALSNLSDDDLREGMPPSLKRLVKHVIKMARELHE

SEQ ID NO: 68099 - protein, 555 aa, Pseudomonas aeruginosa; identical to SEQ ID NO: 65325

SEQ ID NO: 68100 - protein, 546 aa, Pseudomonas aeruginosa; identical to SEQ ID NO: 68098

SEQ ID NO: 68101 - protein, 555 aa, Pseudomonas aeruginosa; identical to SEQ ID NO: 65325

SEQ ID NO: 68102 - protein, 546 aa, Pseudomonas aeruginosa; identical to SEQ ID NO: 68098

SEQ ID NO: 68103 - protein, 555 aa, Pseudomonas aeruginosa; identical to SEQ ID NO: 65325

SEQ ID NO: 68104 - protein, 643 aa, Pseudomonas putida; identical to SEQ ID NO: 66850

SEQ ID NO: 68105 - protein, 552 aa, Pseudomonas putida; identical to SEQ ID NO: 62489

SEQ ID NO: 68106 - protein, 571 aa, Desulfocarbo indianensis
MRLSKVTIDNFRGIEHAEIELDRDVTVLIGENNTGKTSVLDALRLCLDTVKSDKTCNFSEFDFYRNETRSGLPSCQPISITLSFLESEEYIWPEHITQGLNDVIVGSDYSAIKFRITARYDADAGELVQSWSFLDDADNEMVGRAGIIKDLRRLRPFFFQTALRAAKDQFHGQSTYWASFLRNKDIDDATRRALEDELCQVNQKIVNAHASFKDVTDEVKRISGLMAVGQANAVTVDPVPADVYKALRYTDVNLLTTSNAKIPIRSHGEGTQSLSVLLLFSAYLKTRLQADVDRHAEPIIAIEEPEAHLHPNAVRAVWHLLRDLPGQKIVATHSGDILSEVPVPKLRRMNRNGNATECKAIPSGLLSDEELRKFNHHVRRNRGELLFARCWLLVEGETDVSVFAECADILGVDLHGKGVRIVECSQAGGPGIFIKVADALGIHWHLVADSDPGGQKYIDDAKALLNGRLEADHISPLTHPNIDILLCCCGYGQPYRDGVGPQKEVELAGLTIDCPQYWEKVYEIVNKARRFSKPEAAMKSILDMKTVGPSGVPSELKNILDRTTALGEPSP

SEQ ID NO: 68107 - protein, 626 aa, Desulfocarbo indianensis
MTITIDMLNANQRLAVEWSQGPLLVLAGPGSGKTAVLTLRIANLITNSPDESFRILGLTFTVKAANEMQNRIRELTGDEPRRIKLCTFHSFCTDLLRQHGSQLGLKPDFSVITDDKDRLAILGEMGASGEVEIDDPEDSLKKIDTMFTHGITADELPGYFDSGQEDTCRALQDVFRGYLARLVKDNQLDFGSMLHFTRELLASKPRIARQVRMVYRYVCVDEFQDTNLAQYKVLRLVSPDSSSNLFVVADDDQIIFQWNGADPKRLEELKQDYTPQIIQLPENYRCPAEVVKIANQLIAHNPGRASAKLDGVSQNKVDGTVKLQEFANFEDEVAGLISEIEPIPRNHRETCLVIARSNKLLTHVQTAMHEKGLSAEIVSRHQDFVSPLVQLMYFAMKVANAPDSRSLLNKLCSAATLVNDIIVSAEDVSAKAKVEDQTPLRAFFALAATSETLQPFADKGKELLCDSLEYASFVDACFQLFDQLNVTGGENEAYPDYSDDKQNWQRIAQEIRQSHGEGVSLHIFLQEMDLSPKAKPLSKDCVRLQTVHTAKGVEFDNVFVIGLAEEQFPTYFAIKKGELAIREERRNCFVAITRSSQNLYLSYARSYFGWDKRPSRFLDEMGLLDA

SEQ ID NO: 68108 - protein, 662 aa, Bacillus sp. FJAT-27238
MRAPYISRVKIKNYRNFKEVDVNLSDKQVIIGENNVGKTNFIRAIQLILDPQFSDEDRYLDETDFHDGLVSPMENGEEIEVIIEIKSFTHIKNILCQISGATISTDPETLRITYRYYPIKDDEGKIVDYDYIIFKGENEAERFGPSDRRYLNLKVIKPIRDVDSEMKNFKKSPLNSLLEQYDIDKTDLELIAAKLNDQSDEVLSFDEIRDLETRINNRFTKLINVDASSNINLKTNEVNPNRILNTLKLVLGARSVSETSLGLTNILYISLVILSIEDNTVPSLLKKVRLEELRVNDTYGILEKCYSLMASGNYILTDDLDEKLFEELYMFLESGDTSSKGVTILAIEEPEAHLHPSLQRIVYKDLFSRSSYSVLMTTHSTHITSVAPIESIVHLFKQNNETNVCSTANLGLTPEEYIDLSRYIDAKRGEIYFGKGIILVEGIAEEYLIPEFSNKINFPLDYNGIIVCNINSTNFKPYIKFLNALNIPFVVVTDGDFYEVIDGERKFHKMYDKDSSNSYGVLGLEIIRDTLIEIGIIISEELPIGLKNQMKFFRDKGYYMGVYTLEVEIMKSAKNQQAKDIICNCFDQLTSGGSKQKENFKNELNSGDYWACLRKIESSNNGIGKGRFAQRFTSLCTDQHIPIYIRKAIQYISSKVNERTNE

SEQ ID NO: 68109 - protein, 603 aa, Bacillus sp. FJAT-27238
MNNYEKKLNEIKNDEFQNAAYVSDKSTVVLAGPGSGKTTVLTLKIMKLLKEKIAPPQGLACVTFSKEAAYEFKHRLKKLGYQRRDNVFLGTVHSFCIAEVIGKFGHLYPKYQIPLPIKIISQKEKRKLFKQIKDELEIGDENLSLIELDKERSQNIKGKTRVEGSKNELAIKIAEEYERRLHSSGYTDFVSIVKFSTLLIQNESYVRKCLEAKFPWILVDEYQDLGRPLHEMILSFFNHTKIKIFAVGDPDQSIYGFGGAAPDYLIELYDLIGIERVRLITNYRSTQDIIEASELALNIAEKRNYVAGLRKEDAEFDFITCEYGMEQQYQYVVESIIPSCIEQNINLEEIALLVGYNDEIKDLSLVLENYKIPHYIAKHDFERSEIVLWLESCAMWTVDQSKASFEEIYEFWKRLLESHNKVITNKLDIKERRKVFDILTKNQQLSSNLLLWLRSTIQQFELKSLLELSTKYPEEAENLDNLLKVCADGKFKEYDVSKFTEIGKPENQVTVTTRHSSKGLEFEVVVLLGMEEGRFPYYNILNDTDKLAEAHRVFFVCVSRAKRVCYLIRSLRHTIYPRRGNPFEKRYPKSRFWSILEEKYGEA

SEQ ID NO: 68110 - protein, 712 aa, Klebsiella pneumoniae; identical to SEQ ID NO: 63712

SEQ ID NO: 68111 - protein, 599 aa, Klebsiella pneumoniae; identical to SEQ ID NO: 63713

SEQ ID NO: 68112 - protein, 592 aa, Planococcus sp. L10.15
MYISKVKISNFRNFKETEVELGKQMVIVGENKIGKSNFIHALRLVLDPTLSETSRVLQISDFWDGLTRPLDDQEIRIEIELTEFEQDDKLKTVLSDFLVESSPLTAGLTYKFFPEDEDGNKIYNFKVYGTKTENIFSYEQRKWLPLEVLSGLRDTESDLSNWRKSPLRPLIERAIETTDKQELEDVAKEITRSTDSLKELDEIGSLTKRINNQLEDIVGDRHTIETSLGFSPADASKLYRAIKMFIDDGNRGINEASLGSSNLLYLVLKLLSLEQYVDENERAHTFLAIEEPEAHLHPHLQRLLYKYLLNHDKLVVEGSQEQTHIHSVSTILTTHSPHIVSVAPLKSIVLLKETYGEEKSTKIVSTAKISLEDKDVKDLERYINVTRGEVLFSKGVVLVEGDAEEFLLPSLSELHGIDLDKHGITVCSVSGTNFLPYIKLLGSGGLDIPFVILTDYDPRDELPLIHNRLIKLLNFINNGDKYKDLETEDLITYGEEVGIFTNSHTLEIDLFDTMSEEITETLTELTTNSKAISRAQGWRSACSIGGDEKSFLSDIENIGKGRFAQRLSTNLTHNSIVPEYVKGALDYVIARV

SEQ ID NO: 68113 - protein, 608 aa, Planococcus sp. L10.15
MSLLEFDKELYRGATKDLANNEEQQKVYDSTGNCVVLAGPGSGKSKILTLKLARILNEDVEEPQGVACLTYNKECARELKEKLSNLGINESSRVFIDTVHSFCLNHVIKPYKHLVHTNLPKEIKVATSKEVRETMFQTYNLTIGKNERYTPSWSTAFNVYRRTFIDRKSSEWKTNDSDIAVWILNYENSLRRQGLIDFDDMVLNGFWMIEENQWIQGLLKAKFPVIAVDEYQDLGVSLDRIIRVLCIENDIRLLAVGDPDQSIYGFTGAQPILLNDLAHQSGVLKIQLKKNYRSKGNIVKASIASLLEERDFVSSRNGEGSIKFYDIRNGIETQCDYICKDIVPKILAANPSSTLGDIGVLYIDKNDGDRIAEKVSKEGLQFIRVDGNAPYNKNKLTMWIENCAMWCSGGWVKGNPQLYKIEGTFSSFFSNSNISEENLDAKKLNLSKFLFQSRDVELKLSDWLDEFNNDIVSELLDCFTEEPSIVEEYKKLNESAKSGQLKDFKVSSLSRQVGSKSHLNLYTLHSSKGLEFKYVIMFGLEHGRIPWLNVTEEKTNESRRLFYVGLTRAKDEIHLLCSGWYYDYFDRRQNHGSSNFVLELKEFVDNNL

SEQ ID NO: 68114 - protein, 659 aa, Escherichia coli M114
MLIKNVEIKGFKSFDCNGQNIRLDSFTSLIGGNGTGKTALLLALVRMFSVKSADRVIQADDFHVPPGEKIDDQDERNFTVRIRFEFADLKDGQDSTVSDFFGHLVSDGKDEIPYCIAKLRAKWIKTNLAGGDIESELVWEVGDEERKISAYERSRIHIHYVPAYRDPSTQLKQTAGTIMHRLINAVEWSDDIAHKIGEGARSIDEQFQNESGIKTITTSLAKNWNSLFTGGYFENLKIHPVMNGVEDVLKHIDTVFLPTPDTQPLSTDRLSDGMKSLFYLSLVKSAFDIESDIIEGLNENLAISIDALEPPDLTLILIEEPENHLSPQYFGRIINLCRAISSNKRAQVFLSTHSPALLNRVEPENIRYFRLCENQKTIVKNIILPEEDDNGEEIDEFTYVKEAIKSHPEIYFAKVVVLGEGDSEEIVIPKLAEANSIGLDNSLITFAPLGGRYVNHFWRLLSELSIPYITLLDYDRKRGGGGYGRIKYALKQLISTGVDKSDILKLQDGKVLSDKELDEMHTWVEDETTENSWINVLKRYGVFFSYPYDLDWIMLEKFYEEYKSFAPSRGGPTIPSSHDDNYTQKTQAAIASVLKKESIDIDISEFTDHEKYFWYRYLFLGRGKPLSHNYVLKKMNRDDLKERAPQVLNDLIEKIKGIL

SEQ ID NO: 68115 - protein, 291 aa, Escherichia coli M114
MKWISDDNWSLKDIESVEQEAMLVIKNFSDDSLVVAGPGAGKTELLAQKACFLIETGKCNNKKILSLSFKKDAANNLRDRICSRVNKGYSRKFESTTFDAFCKSILDRFYSTLPDVIRPTADYEIISNLNTKEFVQEIKKNGIGFAGLTEDDLHRVQPKRFEENYILRNRSSDDHSIDARITRFAWKYLLNGKSRLTFKMISVLASFILEKNKPLSNAIISTYKYVFVDEFQDTTYLQYKLLKTLFLNTDIKITAVGDDKQRIMGWAGALLTIFKDFKKRFQYCFRKSINK

SEQ ID NO: 68116 - protein, 663 aa, Vibrio parahaemolyticus; identical to SEQ ID NO: 63134

SEQ ID NO: 68117 - protein, 583 aa, Vibrio parahaemolyticus; identical to SEQ ID NO: 63135

SEQ ID NO: 68118 - protein, 663 aa, Vibrio parahaemolyticus; identical to SEQ ID NO: 63134

SEQ ID NO: 68119 - protein, 583 aa, Vibrio parahaemolyticus; identical to SEQ ID NO: 63135

SEQ ID NO: 68120 - protein, 569 aa, Vibrio sp. VPAP30
MYIRTVEIENYRAFKNFEIKLSPLSLIIGENEAGKTNLFSALTLPLNSNDISFNKKRLSVSDINREAIKNFYQAIIDDKEDDEVKALIPKVRIEIEFTEPKNIIEEGVVGKWIIGEEADDSYKIRYDFRPKDADLFVKTAKDLLEGIEDIKDTRWFNLPIELYDYDVTQSNNGLKVSYSDLRLISINSINAERDDFAESNTQKSNDILTKMLISSLVDTDKAKINSAYTSFFDAIENTETFEKIVTPDPDFENFFDEIVDKLECIPNLPNLKSILSNITLKSGESYLYQRGLGYRNLVYIYLLFEFFKGNKNALNLCCIEEPEAHLSVNNLRFATDFIYKSTQKGGSSLQTLISSHSPQVINKLELTNVIVLSGNDAIHLTDSKKQLTNYLRKRPNFDILKLLLSNKTVLVEGTTEEMLINAILYRDNKNVSSLEVISIEQTGFTTFMDVWLQVNKGNTKKKLSIIRDHDENETTKKKHEKYDIDNDNIRVRTTTKYTLEDDLAEADGNLDRLNTLFKKKYKTSDEMAKFLKKSKAERMLKIADSILDEKNEDPIKLPKHIQEALDFMK

SEQ ID NO: 68121 - protein, 491 aa, Vibrio sp. VPAP30
MIEVQIAGAGAGKTYGLAKKIIAHYDLKSHKKIFAITYTNSAAKNISQAIIKHLGYLPENIVVCTVHTFLLNEIIYPYSPFVLNEKHTTSSRCKTFSNFPPGKTEEQKKRETASTISRLKKSGVIHVDETYAAAWRVVDENYSKHSSQKKKSKVRKVHKILSSAIDKIFLDEAQDLDETALKAFQKIGELSVDIYMVGDPKQAIDYPKSFKGWLAANKANEKVKVLPNITTSRRVPQRILDISNNFCPRGQAQTSLSEVEGHLTYITSEDEHYDQVLGHHIKNGSLVSIFRKEGNYSTKKAGSLPEFDPEVEGLLTVKFPEYEEGVVIYSLQRYFASLLSNNDNKTSIRIFLNKLEIPYEKELFKKLCRSAEQYGSSKDNSAKYAISSIQITKGLESKVCVLILTPAIFKYLMQDGVEKFNKTWNMVYVALTRAQSELVVAVDMDLLGKKYKHDDIVEGLKSIGFEELNPNHPNHKTEEKFGSIISTKDNY

SEQ ID NO: 68122 - protein, 651 aa, Acinetobacter sp. V2
MHICSLKVKNFRAIEDAELRLDPNHKQDLTLIVGKNNSGKTSFIMIFDKFFKKDDNFNFHDFSTHLREKIYQIESTSISDVTIGLFLDISYTEDDNLEYLSEFIVDLNSVNNTVKLYFECSIDEDRLRKDLINIDQKHKKRFIEKNITSYLVKSLYVYENEDDLKNTNKQKLIKKEVGEVSNLINYQVIHAKRNLASSESKEKSSLPLSKLSTEYFNKENIFSEKDFIEINNAILEMDENLNNLYDTHFEGFFENVKEFLGSTALKVLSNLESRQIMSNSSKVVQIDNKENFLPESLNGLGNLNILYLLLQIDLKKRFFIQENRSINLFFIEEPEAHTHPQMQYVFSKKIKKIIAKIPNLQTFISTHSSHIVSQCNFEDIRYFHNKNGSVKIKNFYLELEEKYKFQTDFFKFLKQYITLYSAELFFAEKVIFIEGVSEKILLPYFIKNFDESNKEKEGYIPITSQNITYIEAGANAKAFQHLLEFFEIKSLILTDIDSVSGVNGNACSVELGTSSSNATINHYLSYDENNPDWFELLKNRSIKIDNENINVFYQTEENGYHARSFEDSFIAINYKLVRKYKENISGLKNKEKIIDKAENFYDLTNNIIKSKSEFASSILFLALVNSDKKDDERIEWKTPKYIYEALEWINQ

SEQ ID NO: 68123 - protein, 697 aa, Acinetobacter sp. V2
MDQSIKAIENVKEIIVNNQFKEDSFRNFVLQGGAGSGKTESLKEIIEFISNNYPNQKIACITHTNIAVDEIKSRINNDKLWVSTIHSFLNVQIKNFQKNLQEVLPNIFFIDSSDINDHDDYKKRYEKLSKLNYKLKNKKMDKVVGKRDYDRNPSDYNNFLLDEIKQINFFIKEEISLKDFRDIKYNETVFDSISEGTFSHDSLIKISFLLAEKYNLFSKIVSDKFDYIFIDEYQDTDKVLVDLLLKKIATNKKTTIGFFGDSMQGIYDGIGSLDDYIRDFNLIYIPKDDNYRCSQQVIDFLNVIRNDDIKQKVALKKDENLDSRQGSIKIYVNKIQKVKSNSRQEDKEKYIALINDAIKRVKEKNDILNLNILQLTNKSIASELKFSKLFKVFEDRYPNLEQAQIESNLKKIQIKDVIDLIVLYKNNRHNDLILKLKKNNLKIKKLDDKNNIIALLGYICDNELGLNEAIDYCYENKLLIKSPQRIDFESQSKHHFEQCDSDAVFKELKILLERDNLNTYNRAKQHCTYDIDQYDYDDFMSSYRKIKFSDSLLSNDLLLSEVLNYFNYIDENSNSDEKYLTMHKTKGTGIENVFVVLEEFFWSNYSFRSIYDPSYSNFKVKEKSEKLFYVACSRTIKNLMILINYETNNELELIREKFRGFEITELNSSDSNLLITNSDVENFTLPAVIESNIQVNI

SEQ ID NO: 68124 - protein, 566 aa, Trabulsiella odontotermitis
MEISSLKLKGFRNFKDAHINFNSNTLVIGANDVGKSNMLHSLRMLLDKSISDSEIEPNEFDFHLENGKSCEVFEIIIHFKDINEDAVLSILKGNVSDSGESFIKYIAQKTDLSYKLFIGESLESLQEINSRYYLKFVNLKYIQSQRDLERFIRKEKRQLLKIAQQSLNSEEREEDDDLLGEISLDLQSINDKISQLIYVERATKDVNDELKKLAHHYSEYSVQLDTGAIGINDFIDNLQLGANTNGSNVMLGGDGRNNQILLALWKAKSIKEHDIENEVIFYVIEEPEAHLHPHQQRKLADYLIAELPGQTIISSHSPQIAVNFEPGSVIRLLDRAGHTVAASEGCSNDISDGWEGMSYRMSILPAESFFSNGVFLIEGPSEVLFYHSLAENLNIDLDYLNISLVSVDGISFKIYVAILDALEIPWVMRTDNDISKLKDQDKWQYSGINRCLDIAGLKKFEHSDIQIVPIDTLTSGDWQTVSEEINKCGIYLSKIDLETDLAEELNAPILNALGKKNDQSAIEYLQKKKALRMRELLKDIKKDLHKLNAGELVKPLNHLVKIIRGE

SEQ ID NO: 68125 - protein, 541 aa, Trabulsiella odontotermitis
MSTFSPTPQQTLAIDYTESMVITACPGSGKTTVIKEKIRNITDGLPEHKGVIAITFTRKASSELERRCKADGHDVKNSFFGTIDSFCLNDIIIPFLSRIWGGKPRECKVLKKLESPFNHFIEKNFSGTPSITNINEDPGYKKLYDEGILWMGSFSALALKIINESPAAKRYIKARYSHIFIDEYQDSSLSQHELFLRINELGLCSIAVGDVWQSIYEFRGGNSELLLELVSNTECFKHFEINFNHRCHPSISNYASRLLDPSYILLPADEIRIFRRRLDGNLKDAAVTISPWISGWLSSGEWKLEKANQIAILARKEKSLILFCSGLNLNFRLYVDTPLDKIGTDCSDLYKDLLAYKYGSISTAQEFINKVFDGVIVDDNTMFLLRKKIKAIRNELKNEDLIHMFHDIADILGINSTEHIDGALIRTISDDILVKQFKPLDDNEIQVMTLHKSKGLEFKLVFHLDLDEWSFPYREYNSEDRHTALYPTLQQEINLHYVGITRAENCCILINSSLRQNASGNFKNADESYFFKLPQLDNLYS

SEQ ID NO: 68126 - protein, 588 aa, Bacillus licheniformis; identical to SEQ ID NO: 65702

SEQ ID NO: 68127 - protein, 458 aa, Bacillus licheniformis; identical to SEQ ID NO: 65703

SEQ ID NO: 68128 - protein, 296 aa, Lactobacillus farciminis; identical to SEQ ID NO: 66802

SEQ ID NO: 68129 - protein, 517 aa, Lactobacillus farciminis; identical to SEQ ID NO: 66803

SEQ ID NO: 68130 - protein, 641 aa, Virgibacillus pantothenticus
MYISKLSVKNYRNFGDGKFSIPLKPFTAIIGENNIGKSNLIDCIGLVLSQDITMFKKRFLDVDDINSKTKETFKKSIVNLIDEEIIDESKIKYPDVRVELIFDELDEEQLAVVGDWFYEKTFTKAKLTYWFKPRTGFKRQEWVERQVANLRELLTEGKIKKEELYNHVEFPIDQYEYVIFGGNNPTNKCDPYFLKMLKLEVLDALRDAKKELVANGEYKLLYRILNRNYENDFIEIQSLLGDLNQKLRENKKLDTIKRELTAYLDRVSLSNPTELNSIDFNFSSPEVNEILKKLSIVYGENPVSIERNGLGKNNLLFISLVLSHLASQTDEKTKLAFRVIGIEEPEAHLHPHLQTHLAKNLSKVINLENKEVEKDEEKEKEKKDTQIIITSHSTNITTSIDLNNLVILYRDKEQIKYHYILDGFSNKKEGQDHIKYLKKYLDATNSSMFYARRLILVEGTSEQILVPLFFELHAKKTLESIGSNIINVNGVAFKHFLEIIKNGYFIKCGVLTDRDAGKKTEKRAEKLKEHYKANKDVIAVEINDDTFEKELIKYNLKGKGRELLLRVFKQLHPIKYKEVESNWENQININTYFENIENDKSDFAFALHEELLKDSTGFKIPDYIVSIFKFIMGEENEEKTK

SEQ ID NO: 68131 - protein, 392 aa, Virgibacillus pantothenticus
MGNEEVKNRFCNRIRYLFVDEFQDSTSTQFEIFDTLRKGKNSEVILVGDPEQRIMNFRNKPRKRKGSTEVKKVPLHPIDALQKKKVYSISKLNYNYRSSETIVNFINHFHCSIQQEWSNKEITSKNPIMFIQSNKLKSIISDFNNLCVNHNYCKEVPRTRFFLAHENKVYKSYRKVDFNQKSKENLPLFTCIYEYLSAFYNIKINQLPIVLELDEIELRKKCLLLLYEINYNIDFDLEDFVDFVETTFNRKREEAGEEVKFNIKERTKRFVDELSNRMTANDEGMAKESNEYQDSFLTIHKSKGLQADAVLVVAKNEKELLMWLEDDKENRLLDQQDKCRLGYVAFSRPKEFLCIACLTPLSKETIEILNKFNVNLYSPIEEQEQLSLQNMN

SEQ ID NO: 68132 - protein, 567 aa, Escherichia coli
MYIDNVYLKGFRNYSDSFVKFNYSTLIIGGNDVGKTNLLYSLRILLDKSFSDLDLEPKNSDFHIDAKGNQCEELEIIINFREVKEDAVLSKLAGYVSDDAQTYIKYKAYRATLDYKLYIGHKESEMDEISGRFYLKYLNLRYVNSQRDLAKYISTEKKHLLRLAQEMRNEEQVRKDENTLNELTNLLNDVNDKVKEISYVSTATEELNDELKKLSYNNEKISVMLDSGAIGVDQFIEKLELSSNTNGKKVMLGGDGFNNQVLLALWKAKSVREHDTENEVVIYCVEEPESHLYPHQQRKLSEYLISKLPGQSLVTTHSPQIAINYSPDSIIKICSYNGESYAASEGCSDCISNAWSGMGYRMSILPAEAFFANVVFLVEGPSEMLFYQALAKECQIDLDFFNISILSVDGVQFEVYRKILDALEIKWVARTDNDSSKVPRKKEWQYSGLNRALALCGMEPLKNELTEISQVQRIEKHKIYKDKLKHHNIFVSINDLEGDIGVELSTQLKEYVGVDNEEIAADYLRGKKAIRMQEFLGEYSYALKNISDGELIQPLLTAVKLATEELR

SEQ ID NO: 68133 - protein, 540 aa, Escherichia coli
MIDFTHEQKAAIDYPSSMVLTACPGSGKTAVIVEKIVRDLVECKEYQGVIAISYTNKASDELKKRCLKATPNSKSSFFGTIDKFYLTEVILPFIKQLWGRVDDLHVVKLNELASSEKDRLSAFFNVEFICEKINEYDFKDIKELYANGILILEFIPLLAFYILRNSLACRRYIAKKYTSIYIDEYQDAGCVQHLLFLYLFELGVKAVAVGDADQSIYSYAGKSSKYLMSLLDEKSGFAPFKITINHRSHSSIVNYASRLLNEHCDLLITDEIRVYRKTVNGTQCEIAKWIDANINNIKRKFNISKEKEIAILTATNSSVALVSGLINSKARAYLDDELSVLGGDVSLLLKNLLNYRFNKTITAQAIIESLNYKVLERNAIRKMRGVIRDVRDSNDNQLIPDLRKAVKLLINADISANHIDAINSILHNKMMLNNYLPVSDDELQIMTLHKAKGLEFDFVFHLDLYDWILPRREYIKHCFDEVFSHYEQCLNLHYVGVTRAKKAVVLINSTERLNYQSELKKAKPSQFLSLKGLESLYKKI

SEQ ID NO: 68134 - protein, 695 aa, Streptococcus pneumoniae; identical to SEQ ID NO: 64780

SEQ ID NO: 68135 - protein, 605 aa, Streptococcus pneumoniae; identical to SEQ ID NO: 64781

SEQ ID NO: 68136 - protein, 695 aa, Streptococcus pneumoniae; identical to SEQ ID NO: 64780

SEQ ID NO: 68137 - protein, 605 aa, Streptococcus pneumoniae; identical to SEQ ID NO: 64781

SEQ ID NO: 68138 - protein, 695 aa, Streptococcus pneumoniae; identical to SEQ ID NO: 64780

SEQ ID NO: 68139 - protein, 605 aa, Streptococcus pneumoniae; identical to SEQ ID NO: 64781

SEQ ID NO: 68140 - protein, 689 aa, Streptococcus pneumoniae; identical to SEQ ID NO: 67080

SEQ ID NO: 68141 - protein, 605 aa, Streptococcus pneumoniae; identical to SEQ ID NO: 67081

SEQ ID NO: 68142 - protein, 699 aa, Streptococcus pneumoniae; identical to SEQ ID NO: 64132

SEQ ID NO: 68143 - protein, 605 aa, Streptococcus pneumoniae; identical to SEQ ID NO: 64133

SEQ ID NO: 68144 - protein, 695 aa, Streptococcus pneumoniae; identical to SEQ ID NO: 64780

SEQ ID NO: 68145 - protein, 605 aa, Streptococcus pneumoniae; identical to SEQ ID NO: 64781

SEQ ID NO: 68146 - protein, 695 aa, Streptococcus pneumoniae; identical to SEQ ID NO: 64780

SEQ ID NO: 68147 - protein, 605 aa, Streptococcus pneumoniae; identical to SEQ ID NO: 64781

SEQ ID NO: 68148 - protein, 689 aa, Streptococcus pneumoniae; identical to SEQ ID NO: 62612

SEQ ID NO: 68149 - protein, 605 aa, Streptococcus pneumoniae; identical to SEQ ID NO: 62613

SEQ ID NO: 68150 - protein, 695 aa, Streptococcus pneumoniae; identical to SEQ ID NO: 64780

SEQ ID NO: 68151 - protein, 605 aa, Streptococcus pneumoniae; identical to SEQ ID NO: 64781

SEQ ID NO: 68152 - protein, 699 aa, Streptococcus pneumoniae; identical to SEQ ID NO: 64132

SEQ ID NO: 68153 - protein, 605 aa, Streptococcus pneumoniae; identical to SEQ ID NO: 64133

SEQ ID NO: 68154 - protein, 695 aa, Streptococcus pneumoniae; identical to SEQ ID NO: 64780

SEQ ID NO: 68155 - protein, 605 aa, Streptococcus pneumoniae; identical to SEQ ID NO: 64781

SEQ ID NO: 68156 - protein, 689 aa, Streptococcus pneumoniae; identical to SEQ ID NO: 62612

SEQ ID NO: 68157 - protein, 605 aa, Streptococcus pneumoniae; identical to SEQ ID NO: 62613

SEQ ID NO: 68158 - protein, 695 aa, Streptococcus pneumoniae; identical to SEQ ID NO: 64780

SEQ ID NO: 68159 - protein, 605 aa, Streptococcus pneumoniae; identical to SEQ ID NO: 64781

SEQ ID NO: 68160 - protein, 695 aa, Streptococcus pneumoniae; identical to SEQ ID NO: 64780

SEQ ID NO: 68161 - protein, 605 aa, Streptococcus pneumoniae; identical to SEQ ID NO: 64781

SEQ ID NO: 68162 - protein, 695 aa, Streptococcus pneumoniae; identical to SEQ ID NO: 64780

SEQ ID NO: 68163 - protein, 605 aa, Streptococcus pneumoniae; identical to SEQ ID NO: 64781

SEQ ID NO: 68164 - protein, 695 aa, Streptococcus pneumoniae; identical to SEQ ID NO: 64780

SEQ ID NO: 68165 - protein, 605 aa, Streptococcus pneumoniae; identical to SEQ ID NO: 64781

SEQ ID NO: 68166 - protein, 689 aa, Streptococcus pneumoniae; identical to SEQ ID NO: 62612

SEQ ID NO: 68167 - protein, 605 aa, Streptococcus pneumoniae; identical to SEQ ID NO: 62783

SEQ ID NO: 68168 - protein, 667 aa, Staphylococcus aureus; identical to SEQ ID NO: 66148

SEQ ID NO: 68169 - protein, 641 aa, Staphylococcus aureus; identical to SEQ ID NO: 63103

SEQ ID NO: 68170 - protein, 695 aa, Streptococcus pneumoniae; identical to SEQ ID NO: 64780

SEQ ID NO: 68171 - protein, 605 aa, Streptococcus pneumoniae; identical to SEQ ID NO: 66879

SEQ ID NO: 68172 - protein, 695 aa, Streptococcus pneumoniae; identical to SEQ ID NO: 64780

SEQ ID NO: 68173 - protein, 605 aa, Streptococcus pneumoniae; identical to SEQ ID NO: 64781

SEQ ID NO: 68174 - protein, 699 aa, Streptococcus pneumoniae; identical to SEQ ID NO: 64132

SEQ ID NO: 68175 - protein, 605 aa, Streptococcus pneumoniae; identical to SEQ ID NO: 64133

SEQ ID NO: 68176 - protein, 699 aa, Streptococcus pneumoniae; identical to SEQ ID NO: 64132

SEQ ID NO: 68177 - protein, 605 aa, Streptococcus pneumoniae; identical to SEQ ID NO: 64133

SEQ ID NO: 68178 - protein, 699 aa, Streptococcus pneumoniae; identical to SEQ ID NO: 64132

SEQ ID NO: 68179 - protein, 605 aa, Streptococcus pneumoniae; identical to SEQ ID NO: 64133

SEQ ID NO: 68180 - protein, 695 aa, Streptococcus pneumoniae; identical to SEQ ID NO: 64780

SEQ ID NO: 68181 - protein, 605 aa, Streptococcus pneumoniae; identical to SEQ ID NO: 64781

SEQ ID NO: 68182 - protein, 695 aa, Streptococcus pneumoniae; identical to SEQ ID NO: 64780

SEQ ID NO: 68183 - protein, 605 aa, Streptococcus pneumoniae; identical to SEQ ID NO: 64781

SEQ ID NO: 68184 - protein, 695 aa, Streptococcus pneumoniae; identical to SEQ ID NO: 64780

SEQ ID NO: 68185 - protein, 605 aa, Streptococcus pneumoniae; identical to SEQ ID NO: 66879

SEQ ID NO: 68186 - protein, 699 aa, Streptococcus pneumoniae; identical to SEQ ID NO: 64132

SEQ ID NO: 68187 - protein, 605 aa, Streptococcus pneumoniae; identical to SEQ ID NO: 64133

SEQ ID NO: 68188 - protein, 699 aa, Streptococcus pneumoniae; identical to SEQ ID NO: 64132

SEQ ID NO: 68189 - protein, 605 aa, Streptococcus pneumoniae; identical to SEQ ID NO: 64133

SEQ ID NO: 68190 - protein, 729 aa, Streptococcus pneumoniae; identical to SEQ ID NO: 62500

SEQ ID NO: 68191 - protein, 597 aa, Streptococcus pneumoniae; identical to SEQ ID NO: 62501

SEQ ID NO: 68192 - protein, 695 aa, Streptococcus pneumoniae; identical to SEQ ID NO: 64780

SEQ ID NO: 68193 - protein, 605 aa, Streptococcus pneumoniae; identical to SEQ ID NO: 64781

SEQ ID NO: 68194 - protein, 695 aa, Streptococcus pneumoniae; identical to SEQ ID NO: 64780

SEQ ID NO: 68195 - protein, 605 aa, Streptococcus pneumoniae; identical to SEQ ID NO: 66879

SEQ ID NO: 68196 - protein, 695 aa, Streptococcus pneumoniae; identical to SEQ ID NO: 64780

SEQ ID NO: 68197 - protein, 605 aa, Streptococcus pneumoniae; identical to SEQ ID NO: 66879

SEQ ID NO: 68198 - protein, 667 aa, Staphylococcus aureus; identical to SEQ ID NO: 66148

SEQ ID NO: 68199 - protein, 641 aa, Staphylococcus aureus; identical to SEQ ID NO: 63103

SEQ ID NO: 68200 - protein, 695 aa, Streptococcus pneumoniae; identical to SEQ ID NO: 64780

SEQ ID NO: 68201 - protein, 605 aa, Streptococcus pneumoniae; identical to SEQ ID NO: 66879

SEQ ID NO: 68202 - protein, 695 aa, Streptococcus pneumoniae; identical to SEQ ID NO: 64780

SEQ ID NO: 68203 - protein, 605 aa, Streptococcus pneumoniae; identical to SEQ ID NO: 64781

SEQ ID NO: 68204 - protein, 695 aa, Streptococcus pneumoniae; identical to SEQ ID NO: 64780

SEQ ID NO: 68205 - protein, 605 aa, Streptococcus pneumoniae; identical to SEQ ID NO: 64781

SEQ ID NO: 68206 - protein, 695 aa, Streptococcus pneumoniae; identical to SEQ ID NO: 64780

SEQ ID NO: 68207 - protein, 605 aa, Streptococcus pneumoniae; identical to SEQ ID NO: 66879

SEQ ID NO: 68208 - protein, 689 aa, Streptococcus pneumoniae; identical to SEQ ID NO: 62612

SEQ ID NO: 68209 - protein, 605 aa, Streptococcus pneumoniae; identical to SEQ ID NO: 62613

SEQ ID NO: 68210 - protein, 695 aa, Streptococcus pneumoniae; identical to SEQ ID NO: 64780

SEQ ID NO: 68211 - protein, 605 aa, Streptococcus pneumoniae; identical to SEQ ID NO: 66879

SEQ ID NO: 68212 - protein, 695 aa, Streptococcus pneumoniae; identical to SEQ ID NO: 64780

SEQ ID NO: 68213 - protein, 605 aa, Streptococcus pneumoniae; identical to SEQ ID NO: 66879

SEQ ID NO: 68214 - protein, 695 aa, Streptococcus pneumoniae; identical to SEQ ID NO: 64780

SEQ ID NO: 68215 - protein, 605 aa, Streptococcus pneumoniae; identical to SEQ ID NO: 66879

SEQ ID NO: 68216 - protein, 695 aa, Streptococcus pneumoniae; identical to SEQ ID NO: 66982

SEQ ID NO: 68217 - protein, 605 aa, Streptococcus pneumoniae; identical to SEQ ID NO: 66879

SEQ ID NO: 68218 - protein, 695 aa, Streptococcus pneumoniae; identical to SEQ ID NO: 64780

SEQ ID NO: 68219 - protein, 605 aa, Streptococcus pneumoniae; identical to SEQ ID NO: 64781

SEQ ID NO: 68220 - protein, 667 aa, Staphylococcus aureus; identical to SEQ ID NO: 66148

SEQ ID NO: 68221 - protein, 641 aa, Staphylococcus aureus; identical to SEQ ID NO: 63103

SEQ ID NO: 68222 - protein, 699 aa, Streptococcus pneumoniae; identical to SEQ ID NO: 64132

SEQ ID NO: 68223 - protein, 605 aa, Streptococcus pneumoniae; identical to SEQ ID NO: 64133

SEQ ID NO: 68224 - protein, 695 aa, Streptococcus pneumoniae; identical to SEQ ID NO: 64780

SEQ ID NO: 68225 - protein, 605 aa, Streptococcus pneumoniae; identical to SEQ ID NO: 66879

SEQ ID NO: 68226 - protein, 699 aa, Streptococcus pneumoniae; identical to SEQ ID NO: 64132

SEQ ID NO: 68227 - protein, 605 aa, Streptococcus pneumoniae; identical to SEQ ID NO: 64133

SEQ ID NO: 68228 - protein, 699 aa, Streptococcus pneumoniae; identical to SEQ ID NO: 64132

SEQ ID NO: 68229 - protein, 605 aa, Streptococcus pneumoniae; identical to SEQ ID NO: 64133

SEQ ID NO: 68230 - protein, 695 aa, Streptococcus pneumoniae; identical to SEQ ID NO: 64780

SEQ ID NO: 68231 - protein, 605 aa, Streptococcus pneumoniae; identical to SEQ ID NO: 66879

SEQ ID NO: 68232 - protein, 695 aa, Streptococcus pneumoniae; identical to SEQ ID NO: 64780

SEQ ID NO: 68233 - protein, 605 aa, Streptococcus pneumoniae; identical to SEQ ID NO: 66879

SEQ ID NO: 68234 - protein, 689 aa, Streptococcus pneumoniae; identical to SEQ ID NO: 62612

SEQ ID NO: 68235 - protein, 605 aa, Streptococcus pneumoniae; identical to SEQ ID NO: 62613

SEQ ID NO: 68236 - protein, 695 aa, Streptococcus pneumoniae; identical to SEQ ID NO: 64780

SEQ ID NO: 68237 - protein, 605 aa, Streptococcus pneumoniae; identical to SEQ ID NO: 66879

SEQ ID NO: 68238 - protein, 695 aa, Streptococcus pneumoniae; identical to SEQ ID NO: 64780

SEQ ID NO: 68239 - protein, 605 aa, Streptococcus pneumoniae; identical to SEQ ID NO: 66879

SEQ ID NO: 68240 - protein, 689 aa, Streptococcus pneumoniae; identical to SEQ ID NO: 62612

SEQ ID NO: 68241 - protein, 605 aa, Streptococcus pneumoniae; identical to SEQ ID NO: 62613

SEQ ID NO: 68242 - protein, 699 aa, Streptococcus pneumoniae; identical to SEQ ID NO: 64132

SEQ ID NO: 68243 - protein, 605 aa, Streptococcus pneumoniae; identical to SEQ ID NO: 64133

SEQ ID NO: 68244 - protein, 695 aa, Streptococcus pneumoniae; identical to SEQ ID NO: 64780

SEQ ID NO: 68245 - protein, 605 aa, Streptococcus pneumoniae; identical to SEQ ID NO: 64781

SEQ ID NO: 68246 - protein, 699 aa, Streptococcus pneumoniae; identical to SEQ ID NO: 64132

SEQ ID NO: 68247 - protein, 605 aa, Streptococcus pneumoniae; identical to SEQ ID NO: 64133

SEQ ID NO: 68248 - protein, 699 aa, Streptococcus pneumoniae; identical to SEQ ID NO: 64132

SEQ ID NO: 68249 - protein, 605 aa, Streptococcus pneumoniae; identical to SEQ ID NO: 64133

SEQ ID NO: 68250 - protein, 610 aa, Streptococcus pneumoniae; identical to SEQ ID NO: 67352

SEQ ID NO: 68251 - protein, 605 aa, Streptococcus pneumoniae; identical to SEQ ID NO: 66963

SEQ ID NO: 68252 - protein, 695 aa, Streptococcus pneumoniae; identical to SEQ ID NO: 64780

SEQ ID NO: 68253 - protein, 605 aa, Streptococcus pneumoniae; identical to SEQ ID NO: 66879

SEQ ID NO: 68254 - protein, 699 aa, Streptococcus pneumoniae; identical to SEQ ID NO: 64132

SEQ ID NO: 68255 - protein, 605 aa, Streptococcus pneumoniae; identical to SEQ ID NO: 64133

SEQ ID NO: 68256 - protein, 597 aa, Streptococcus pneumoniae
MKLTKMVINNFRSFGECQAINFNNQTVLIGNNSSGKTTVLQALSKLFSDKQSERIIRKSDFHLPKGLKPGENTRNLFIETIFEFDELAGTVYGPAIPTFFEHFTVSQDGAKPFLRIRLESSWEDDGTVEGSIDTQIYYISSDEDTIRDEDKHRAPRKDLDKIRVLYVPASRTPEKELGNASGSMLSRLVNSINWTKDEINEIKDKIDELNNTFLSENGALTQINNEIQKSWELYHEDNRFSQAELIINSSEMAAALRQIALKFSPTTTEEAFTVSDLGDGLRSIFYFSLVDSILDIELEITKDREENPDNPRFKLVPPILTILAIEEPENHIAPHHIGKLVKRFKQLSNNDNSQVILTSHSPAIVKRIEPEELRYLRIESNGRVLQTIVSDIKLPQDTDESYKYIKGAIQAYPELYFAKLVVLGEGDSEELLLPKFFDLLGNEIDSSQISIVPLGGRHVNYFWKLLNSLKIPHITLLDFDNERYGGGWGRVQYVIQQLLKIGIARNDLVRMKDGRILDDQDIARISSNQISDILSQPLLSWINHLEKFNVFFSAPLDIDFLMLQYYKDYYLETLSTNEGPVVSYTDENSDNKKIKNN

SEQ ID NO: 68257 - protein, 605 aa, Streptococcus pneumoniae; identical to SEQ ID NO: 66879

SEQ ID NO: 68258 - protein, 699 aa, Streptococcus pneumoniae; identical to SEQ ID NO: 64132

SEQ ID NO: 68259 - protein, 605 aa, Streptococcus pneumoniae; identical to SEQ ID NO: 64133

SEQ ID NO: 68260 - protein, 695 aa, Streptococcus pneumoniae; identical to SEQ ID NO: 64780

SEQ ID NO: 68261 - protein, 605 aa, Streptococcus pneumoniae; identical to SEQ ID NO: 64781

SEQ ID NO: 68262 - protein, 689 aa, Streptococcus pneumoniae; identical to SEQ ID NO: 67080

SEQ ID NO: 68263 - protein, 605 aa, Streptococcus pneumoniae; identical to SEQ ID NO: 67081

SEQ ID NO: 68264 - protein, 689 aa, Streptococcus pneumoniae; identical to SEQ ID NO: 62612

SEQ ID NO: 68265 - protein, 605 aa, Streptococcus pneumoniae; identical to SEQ ID NO: 62613

SEQ ID NO: 68266 - protein, 689 aa, Streptococcus pneumoniae; identical to SEQ ID NO: 62612

SEQ ID NO: 68267 - protein, 605 aa, Streptococcus pneumoniae; identical to SEQ ID NO: 62783

SEQ ID NO: 68268 - protein, 561 aa, Burkholderia pseudomallei; identical to SEQ ID NO: 63122

SEQ ID NO: 68269 - protein, 631 aa, Burkholderia pseudomallei; identical to SEQ ID NO: 62563

SEQ ID NO: 68270 - protein, 695 aa, Streptococcus pneumoniae; identical to SEQ ID NO: 64780

SEQ ID NO: 68271 - protein, 605 aa, Streptococcus pneumoniae; identical to SEQ ID NO: 66879

SEQ ID NO: 68272 - protein, 699 aa, Streptococcus pneumoniae; identical to SEQ ID NO: 64132

SEQ ID NO: 68273 - protein, 605 aa, Streptococcus pneumoniae; identical to SEQ ID NO: 64133

SEQ ID NO: 68274 - protein, 699 aa, Streptococcus pneumoniae; identical to SEQ ID NO: 64132

SEQ ID NO: 68275 - protein, 605 aa, Streptococcus pneumoniae; identical to SEQ ID NO: 64133

SEQ ID NO: 68276 - protein, 689 aa, Streptococcus pneumoniae; identical to SEQ ID NO: 62612

SEQ ID NO: 68277 - protein, 605 aa, Streptococcus pneumoniae; identical to SEQ ID NO: 62613

SEQ ID NO: 68278 - protein, 699 aa, Streptococcus pneumoniae; identical to SEQ ID NO: 64132

SEQ ID NO: 68279 - protein, 605 aa, Streptococcus pneumoniae; identical to SEQ ID NO: 64133

SEQ ID NO: 68280 - protein, 667 aa, Staphylococcus aureus; identical to SEQ ID NO: 66148

SEQ ID NO: 68281 - protein, 641 aa, Staphylococcus aureus; identical to SEQ ID NO: 63103

SEQ ID NO: 68282 - protein, 695 aa, Streptococcus pneumoniae; identical to SEQ ID NO: 64780

SEQ ID NO: 68283 - protein, 605 aa, Streptococcus pneumoniae; identical to SEQ ID NO: 64781

SEQ ID NO: 68284 - protein, 695 aa, Streptococcus pneumoniae; identical to SEQ ID NO: 64780

SEQ ID NO: 68285 - protein, 605 aa, Streptococcus pneumoniae; identical to SEQ ID NO: 66879

SEQ ID NO: 68286 - protein, 695 aa, Streptococcus pneumoniae; identical to SEQ ID NO: 64780

SEQ ID NO: 68287 - protein, 605 aa, Streptococcus pneumoniae; identical to SEQ ID NO: 64781

SEQ ID NO: 68288 - protein, 695 aa, Streptococcus pneumoniae; identical to SEQ ID NO: 64780

SEQ ID NO: 68289 - protein, 605 aa, Streptococcus pneumoniae; identical to SEQ ID NO: 64781

SEQ ID NO: 68290 - protein, 695 aa, Streptococcus pneumoniae; identical to SEQ ID NO: 64780

SEQ ID NO: 68291 - protein, 605 aa, Streptococcus pneumoniae; identical to SEQ ID NO: 64781

SEQ ID NO: 68292 - protein, 699 aa, Streptococcus pneumoniae; identical to SEQ ID NO: 64132

SEQ ID NO: 68293 - protein, 605 aa, Streptococcus pneumoniae; identical to SEQ ID NO: 64133

SEQ ID NO: 68294 - protein, 695 aa, Streptococcus pneumoniae; identical to SEQ ID NO: 64780

SEQ ID NO: 68295 - protein, 605 aa, Streptococcus pneumoniae; identical to SEQ ID NO: 64781

SEQ ID NO: 68296 - protein, 689 aa, Streptococcus pneumoniae; identical to SEQ ID NO: 62612

SEQ ID NO: 68297 - protein, 605 aa, Streptococcus pneumoniae; identical to SEQ ID NO: 62783

SEQ ID NO: 68298 - protein, 689 aa, Streptococcus pneumoniae; identical to SEQ ID NO: 62612

SEQ ID NO: 68299 - protein, 605 aa, Streptococcus pneumoniae; identical to SEQ ID NO: 62613

SEQ ID NO: 68300 - protein, 689 aa, Streptococcus pneumoniae; identical to SEQ ID NO: 62612

SEQ ID NO: 68301 - protein, 605 aa, Streptococcus pneumoniae; identical to SEQ ID NO: 62613

SEQ ID NO: 68302 - protein, 695 aa, Streptococcus pneumoniae; identical to SEQ ID NO: 64780

SEQ ID NO: 68303 - protein, 605 aa, Streptococcus pneumoniae; identical to SEQ ID NO: 66879

SEQ ID NO: 68304 - protein, 695 aa, Streptococcus pneumoniae; identical to SEQ ID NO: 64780

SEQ ID NO: 68305 - protein, 605 aa, Streptococcus pneumoniae; identical to SEQ ID NO: 64781

SEQ ID NO: 68306 - protein, 699 aa, Streptococcus pneumoniae; identical to SEQ ID NO: 64132

SEQ ID NO: 68307 - protein, 605 aa, Streptococcus pneumoniae; identical to SEQ ID NO: 64133

SEQ ID NO: 68308 - protein, 689 aa, Streptococcus pneumoniae; identical to SEQ ID NO: 62612

SEQ ID NO: 68309 - protein, 605 aa, Streptococcus pneumoniae; identical to SEQ ID NO: 62613

SEQ ID NO: 68310 - protein, 695 aa, Streptococcus pneumoniae; identical to SEQ ID NO: 64780

SEQ ID NO: 68311 - protein, 605 aa, Streptococcus pneumoniae; identical to SEQ ID NO: 66879

SEQ ID NO: 68312 - protein, 695 aa, Streptococcus pneumoniae; identical to SEQ ID NO: 64780

SEQ ID NO: 68313 - protein, 605 aa, Streptococcus pneumoniae; identical to SEQ ID NO: 66879

SEQ ID NO: 68314 - protein, 699 aa, Streptococcus pneumoniae; identical to SEQ ID NO: 64132

SEQ ID NO: 68315 - protein, 605 aa, Streptococcus pneumoniae; identical to SEQ ID NO: 64133

SEQ ID NO: 68316 - protein, 699 aa, Streptococcus pneumoniae; identical to SEQ ID NO: 64132

SEQ ID NO: 68317 - protein, 605 aa, Streptococcus pneumoniae; identical to SEQ ID NO: 64133

SEQ ID NO: 68318 - protein, 561 aa, Burkholderia pseudomallei; identical to SEQ ID NO: 63122

SEQ ID NO: 68319 - protein, 631 aa, Burkholderia pseudomallei; identical to SEQ ID NO: 62563

SEQ ID NO: 68320 - protein, 689 aa, Streptococcus pneumoniae; identical to SEQ ID NO: 62612

SEQ ID NO: 68321 - protein, 605 aa, Streptococcus pneumoniae; identical to SEQ ID NO: 62613

SEQ ID NO: 68322 - protein, 561 aa, Burkholderia pseudomallei; identical to SEQ ID NO: 63122

SEQ ID NO: 68323 - protein, 631 aa, Burkholderia pseudomallei; identical to SEQ ID NO: 62563

SEQ ID NO: 68324 - protein, 695 aa, Streptococcus pneumoniae; identical to SEQ ID NO: 66982

SEQ ID NO: 68325 - protein, 605 aa, Streptococcus pneumoniae; identical to SEQ ID NO: 66879

SEQ ID NO: 68326 - protein, 695 aa, Streptococcus pneumoniae; identical to SEQ ID NO: 64780

SEQ ID NO: 68327 - protein, 605 aa, Streptococcus pneumoniae; identical to SEQ ID NO: 64781

SEQ ID NO: 68328 - protein, 695 aa, Streptococcus pneumoniae; identical to SEQ ID NO: 64780

SEQ ID NO: 68329 - protein, 605 aa, Streptococcus pneumoniae; identical to SEQ ID NO: 64781

SEQ ID NO: 68330 - protein, 667 aa, Staphylococcus aureus; identical to SEQ ID NO: 66148

SEQ ID NO: 68331 - protein, 641 aa, Staphylococcus aureus; identical to SEQ ID NO: 63103

SEQ ID NO: 68332 - protein, 667 aa, Staphylococcus aureus; identical to SEQ ID NO: 66148

SEQ ID NO: 68333 - protein, 641 aa, Staphylococcus aureus; identical to SEQ ID NO: 63103

SEQ ID NO: 68334 - protein, 695 aa, Streptococcus pneumoniae; identical to SEQ ID NO: 64780

SEQ ID NO: 68335 - protein, 605 aa, Streptococcus pneumoniae; identical to SEQ ID NO: 66879

SEQ ID NO: 68336 - protein, 689 aa, Streptococcus pneumoniae; identical to SEQ ID NO: 67080

SEQ ID NO: 68337 - protein, 605 aa, Streptococcus pneumoniae; identical to SEQ ID NO: 67081

SEQ ID NO: 68338 - protein, 695 aa, Streptococcus pneumoniae; identical to SEQ ID NO: 64780

SEQ ID NO: 68339 - protein, 605 aa, Streptococcus pneumoniae; identical to SEQ ID NO: 64781

SEQ ID NO: 68340 - protein, 695 aa, Streptococcus pneumoniae; identical to SEQ ID NO: 64780

SEQ ID NO: 68341 - protein, 605 aa, Streptococcus pneumoniae; identical to SEQ ID NO: 66879

SEQ ID NO: 68342 - protein, 699 aa, Streptococcus pneumoniae; identical to SEQ ID NO: 64132

SEQ ID NO: 68343 - protein, 605 aa, Streptococcus pneumoniae; identical to SEQ ID NO: 64133

SEQ ID NO: 68344 - protein, 695 aa, Streptococcus pneumoniae; identical to SEQ ID NO: 64780

SEQ ID NO: 68345 - protein, 605 aa, Streptococcus pneumoniae; identical to SEQ ID NO: 66879

SEQ ID NO: 68346 - protein, 786 aa, Burkholderia pseudomallei
MDIPEVSSTTDPASSSAPSASAVPPAEIVALPGDSPIRLACVEVCNFRRLAKTRLELDDATTILVGANNSGKTSLLTVLRNFLSDSPGFRAFDISLSQWAKLRQLSELWEALDEDPTTESKDAEKWEQQYLQLLGCMPFIDLWFDAKEGAYNYVAPFITSLKWRGGAVGVRVRLEPVADSDELRKLAWRYREARSPVRTLPKDGHAWPMDLLDYWLRYSADLRRIAVYRLDPAKGPLATEQCNELQELPPDSQPVELQLLRKLVRVDFVPAQRGLGAEDDETRSESASTRPGLFSSQLLKFARQHLNVAPSGHGNREDLVAAIARAQAELDDSIYKALQPAMEDVEVLGYPGLHDPQQLHFRTRIQTADLLAHSTAVQYRLDETAVDESLPEHSIGLGYQNLQSLSFMLVSFRAARLNPPQGSPAAVHLVMVEEPEAHLHVQVQRNFSSNAHELIRPKELVHSNLRSQLLISTHSSHLAHGDSFTRLRYVKRIAGTGAGVRPSSEVVNLGDAFGDDIQTRTFAERYFQVQHTDLLFADAAIFVEGTAERMLVPLFIERDFPKLAKKYVSFLDIGGSHAHRLRPLVERLGIPTAVITDLDPVVPTTSKGGRVVRAAVHIAGQADLECGNDTLMSWHPKLADFHAYAKPTSAHLEWVSDSGVKVRFAWQLPVAAASDQWPSSFEDALVLTNIDWFKALDEEKDSVSGKKKDHRGTLGKVIGLVLDHSDHTELLKELHAMLHGNFSKGDFAATLFERLNAGQALACPTYIADALAWLSGQLEATAGETA

SEQ ID NO: 68347 - protein, 576 aa, Burkholderia pseudomallei
MRVITYTNNATAVVNGRLGENYLTAVSTIHAFCWELIKGFDEDIRDALLARNAESLATAKAKALSKAKGESDRDREKYAEIEAKAEEIRKIDAFIYHPDRNTYGQGALSHTDVLHVTAWLIRERPTLQRILEDRHPLILIDESQDTMKSVLDALFELSMSRPGHITLGLLGDHRQRIYPDGHDDLPSHVPEDWARPALQMNHRSQQRIVELINKIWDADIEGRTQPKTGVPQHSRTEKNGGTVRLFVGDTKTSTAEKIRRESDCALAMAAETGCAAWQDGTRGYKTLALEHKLAAKRGDFFDAYSAMDLLDKDAAMPKSNGERTGPAMVRPLLGPMLELAECLQADGSLNEFAAVDVLRRHGTLARLPEASAERQADLDKLHAAVVKFAGVISTPDATVRDVLGPVLEGGIFDADPRLVQAYGDTSPPPPEPKPRSKEAKEDRRRRGWCALFGTPWQQIARYRTYLSGDAELATHQVVKGSEFKHVMVVMDDQEAGGSLFSYDKLFGAEELSSNDRENVDEGNETIIDRTLRLLYVTCSRAEESLALVLWAKNPTAALDAIKRSEWFAANEVSALE

SEQ ID NO: 68348 - protein, 561 aa, Burkholderia pseudomallei; identical to SEQ ID NO: 63122

SEQ ID NO: 68349 - protein, 631 aa, Burkholderia pseudomallei; identical to SEQ ID NO: 62563

SEQ ID NO: 68350 - protein, 636 aa, Chlamydia trachomatis; identical to SEQ ID NO: 64514

SEQ ID NO: 68351 - protein, 620 aa, Chlamydia trachomatis; identical to SEQ ID NO: 63719

SEQ ID NO: 68352 - protein, 641 aa, Salmonella enterica; identical to SEQ ID NO: 62984
  subsp. enterica serovar Typhimurium str. DT104

SEQ ID NO: 68353 - protein, 553 aa, Salmonella enterica; identical to SEQ ID NO: 62985
  subsp. enterica serovar Typhimurium str. DT104

SEQ ID NO: 68354 - protein, 641 aa, Salmonella enterica; identical to SEQ ID NO: 62984
  subsp. enterica serovar Typhimurium str. DT104

SEQ ID NO: 68355 - protein, 553 aa, Salmonella enterica; identical to SEQ ID NO: 62985
  subsp. enterica serovar Typhimurium str. DT104

SEQ ID NO: 68356 - protein, 641 aa, Salmonella enterica; identical to SEQ ID NO: 62984
  subsp. enterica serovar Typhimurium str. DT104

SEQ ID NO: 68357 - protein, 553 aa, Salmonella enterica; identical to SEQ ID NO: 62985
  subsp. enterica serovar Typhimurium str. DT104

SEQ ID NO: 68358 - protein, 641 aa, Salmonella enterica; identical to SEQ ID NO: 62984
  subsp. enterica serovar Typhimurium str. DT104

SEQ ID NO: 68359 - protein, 553 aa, Salmonella enterica; identical to SEQ ID NO: 62985
  subsp. enterica serovar Typhimurium str. DT104

SEQ ID NO: 68360 - protein, 641 aa, Salmonella enterica; identical to SEQ ID NO: 62984
  subsp. enterica serovar Typhimurium str. DT104

SEQ ID NO: 68361 - protein, 553 aa, Salmonella enterica
  subsp. enterica serovar Typhimurium str. DT104
MIAVDAWLPSDGLTLEPNALLAAKEQARCLALTAGPGAGKTEMLAQRADFLLRPGTCRYPKRILAISFKVDASKNLKERIQRRCGQELASRFDSYTFHAFAKRIIDRFRVVLTGNDALDTDYSIGERKVTRRQITFHDLVPLAIQILKASVVARNAIRQTYSDVFLDEFQDCTDQQYELVKVAFQSTSIRLTAVGDTKQKIMGWAGALDGIFQTFAKDFSAVPLNMYRNFRSKPRLLRMQNEIIRVLDPASVMPDHQLAGEEGEVFAWQFENAQGEAEYLADLIAGWIRNEKVPLSEIAVLVSKQLDLYANHLMTALEVRGIPYRNEQEMQDITVEPAARLVVDYLSCLYGQREPKAWVRLMNQLIPFADDEVQSSARQSFQRFFKEQRKIITMTELLDEPFSGWWDSVCSFLKKIGMETLVALSPDYESHARLGEVVRDTKARIEELLELTPDLPQALTRFSDDQAVRILTIHKSKGLEFDSTIIMAVENEIFFGDQDANRCAFFVGVSRAKRRLVVTYAKERDKPDNYSGIWRTNRSAQLEYFGYTSPFVK

SEQ ID NO: 68362 - protein, 641 aa, Salmonella enterica; identical to SEQ ID NO: 62984
  subsp. enterica serovar Typhimurium str. DT104

SEQ ID NO: 68363 - protein, 553 aa, Salmonella enterica; identical to SEQ ID NO: 62985
  subsp. enterica serovar Typhimurium str. DT104

SEQ ID NO: 68364 - protein, 641 aa, Salmonella enterica; identical to SEQ ID NO: 62984
  subsp. enterica serovar Typhimurium str. DT104

SEQ ID NO: 68365 - protein, 553 aa, Salmonella enterica; identical to SEQ ID NO: 62985
  subsp. enterica serovar Typhimurium str. DT104

SEQ ID NO: 68366 - protein, 641 aa, Salmonella enterica; identical to SEQ ID NO: 62984
  subsp. enterica serovar Typhimurium str. DT104

SEQ ID NO: 68367 - protein, 553 aa, Salmonella enterica; identical to SEQ ID NO: 62985
  subsp. enterica serovar Typhimurium str. DT104

SEQ ID NO: 68368 - protein, 641 aa, Salmonella enterica; identical to SEQ ID NO: 62984
  subsp. enterica serovar Typhimurium str. DT104

SEQ ID NO: 68369 - protein, 553 aa, Salmonella enterica; identical to SEQ ID NO: 62985
  subsp. enterica serovar Typhimurium str. DT104

SEQ ID NO: 68370 - protein, 641 aa, Salmonella enterica; identical to SEQ ID NO: 62984
  subsp. enterica serovar Typhimurium str. DT104

SEQ ID NO: 68371 - protein, 553 aa, Salmonella enterica; identical to SEQ ID NO: 62985
  subsp. enterica serovar Typhimurium str. DT104

SEQ ID NO: 68372 - protein, 641 aa, Salmonella enterica; identical to SEQ ID NO: 62984
  subsp. enterica serovar Typhimurium str. DT104

SEQ ID NO: 68373 - protein, 553 aa, Salmonella enterica; identical to SEQ ID NO: 62985
  subsp. enterica serovar Typhimurium str. DT104

SEQ ID NO: 68374 - protein, 641 aa, Salmonella enterica; identical to SEQ ID NO: 62984
  subsp. enterica serovar Typhimurium str. DT104

SEQ ID NO: 68375 - protein, 553 aa, Salmonella enterica; identical to SEQ ID NO: 62985
  subsp. enterica serovar Typhimurium str. DT104

SEQ ID NO: 68376 - protein, 641 aa, Salmonella enterica; identical to SEQ ID NO: 62984
  subsp. enterica serovar Typhimurium str. DT104

SEQ ID NO: 68377 - protein, 553 aa, Salmonella enterica; identical to SEQ ID NO: 62985
  subsp. enterica serovar Typhimurium str. DT104

SEQ ID NO: 68378 - protein, 641 aa, Salmonella enterica; identical to SEQ ID NO: 62984
  subsp. enterica serovar Typhimurium str. DT104

SEQ ID NO: 68379 - protein, 553 aa, Salmonella enterica; identical to SEQ ID NO: 62985
  subsp. enterica serovar Typhimurium str. DT104

SEQ ID NO: 68380 - protein, 641 aa, Salmonella enterica; identical to SEQ ID NO: 62984
  subsp. enterica serovar Typhimurium str. DT104

SEQ ID NO: 68381 - protein, 553 aa, Salmonella enterica; identical to SEQ ID NO: 62985
  subsp. enterica serovar Typhimurium str. DT104

SEQ ID NO: 68382 - protein, 641 aa, Salmonella enterica; identical to SEQ ID NO: 62984
  subsp. enterica serovar Typhimurium str. DT104

SEQ ID NO: 68383 - protein, 553 aa, Salmonella enterica; identical to SEQ ID NO: 62985
  subsp. enterica serovar Typhimurium str. DT104

SEQ ID NO: 68384 - protein, 641 aa, Salmonella enterica; identical to SEQ ID NO: 62984
  subsp. enterica serovar Typhimurium str. DT104

SEQ ID NO: 68385 - protein, 553 aa, Salmonella enterica; identical to SEQ ID NO: 62985
  subsp. enterica serovar Typhimurium str. DT104

SEQ ID NO: 68386 - protein, 641 aa, Salmonella enterica; identical to SEQ ID NO: 62984
  subsp. enterica serovar Typhimurium str. DT104

SEQ ID NO: 68387 - protein, 553 aa, Salmonella enterica; identical to SEQ ID NO: 62985
  subsp. enterica serovar Typhimurium str. DT104

SEQ ID NO: 68388 - protein, 641 aa, Salmonella enterica; identical to SEQ ID NO: 62984
  subsp. enterica serovar Typhimurium str. DT104

SEQ ID NO: 68389 - protein, 553 aa, Salmonella enterica; identical to SEQ ID NO: 62985
  subsp. enterica serovar Typhimurium str. DT104

SEQ ID NO: 68390 - protein, 641 aa, Salmonella enterica; identical to SEQ ID NO: 62984
  subsp. enterica serovar Typhimurium str. DT104

SEQ ID NO: 68391 - protein, 553 aa, Salmonella enterica; identical to SEQ ID NO: 62985
  subsp. enterica serovar Typhimurium str. DT104

SEQ ID NO: 68392 - protein, 641 aa, Salmonella enterica; identical to SEQ ID NO: 62984
  subsp. enterica serovar Typhimurium str. DT104

SEQ ID NO: 68393 - protein, 553 aa, Salmonella enterica; identical to SEQ ID NO: 62985
  subsp. enterica serovar Typhimurium str. DT104

SEQ ID NO: 68394 - protein, 641 aa, Salmonella enterica; identical to SEQ ID NO: 62984
  subsp. enterica serovar Typhimurium str. DT104

SEQ ID NO: 68395 - protein, 553 aa, Salmonella enterica; identical to SEQ ID NO: 62985
  subsp. enterica serovar Typhimurium str. DT104

SEQ ID NO: 68396 - protein, 641 aa, Salmonella enterica; identical to SEQ ID NO: 62984
  subsp. enterica serovar Typhimurium str. DT104

SEQ ID NO: 68397 - protein, 553 aa, Salmonella enterica; identical to SEQ ID NO: 62985
  subsp. enterica serovar Typhimurium str. DT104

SEQ ID NO: 68398 - protein, 363 aa, Salmonella enterica
  subsp. enterica serovar Typhimurium str. DT104
MLYLSLVLSSQAVGRAVLAGEDDSFDPEKLRPPVFTLIALEEPENSLSPHYLGRIVNALNSMTSNEDAQALVATHAPSMLRRVDPEHIRYLRLTETRQSRIKKIQLPAKTDEAHKFVREAVQAFPEIYFSRLIVLGEGDSEEIVLPRLFQAKGAPVDESAVTIAPLGGRHVNHFWRLLSELQIPFLTLLDLDVGRYQAGWGRIKYVNNQLGLYQPEKVLPTTFSLSDWNDDKVPVRTHHFFENGTKSVFLELETRGVFFSFPMDLDFSMLLAFPNAYGVQQEVSDESTIKAVLGKSHHGSYQYSGDELNLFSTYHKLFKLGSKPAAHIDALAQLSNEELLANMPGSFGRLADAVIAKLAELPE

SEQ ID NO: 68399 - protein, 553 aa, Salmonella enterica; identical to SEQ ID NO: 62985
  subsp. enterica serovar Typhimurium str. DT104

SEQ ID NO: 68400 - protein, 641 aa, Salmonella enterica; identical to SEQ ID NO: 62984
  subsp. enterica serovar Typhimurium str. DT104

SEQ ID NO: 68401 - protein, 553 aa, Salmonella enterica; identical to SEQ ID NO: 62985
  subsp. enterica serovar Typhimurium str. DT104

SEQ ID NO: 68402 - protein, 641 aa, Salmonella enterica; identical to SEQ ID NO: 62984
  subsp. enterica serovar Typhimurium str. DT104

SEQ ID NO: 68403 - protein, 553 aa, Salmonella enterica; identical to SEQ ID NO: 62985
  subsp. enterica serovar Typhimurium str. DT104

SEQ ID NO: 68404 - protein, 641 aa, Salmonella enterica; identical to SEQ ID NO: 62984
  subsp. enterica serovar Typhimurium str. DT104

SEQ ID NO: 68405 - protein, 553 aa, Salmonella enterica; identical to SEQ ID NO: 62985
  subsp. enterica serovar Typhimurium str. DT104

SEQ ID NO: 68406 - protein, 641 aa, Salmonella enterica; identical to SEQ ID NO: 62984
  subsp. enterica serovar Typhimurium str. DT104

SEQ ID NO: 68407 - protein, 546 aa, Salmonella enterica
  subsp. enterica serovar Typhimurium str. DT104
MASDGLTLEPNALLAAKEQARCLALTAGPGAGKTEMLAQRADFLLRTGTCRYPKRILAISFKVDASKNLKERIQRRCGQELASRFDSYTFHAFAKRIIDRFRVVLTGNDALDTDYSIGERKVTRRQITFHDLVPLAIQILKASVVARNAIRQTYSDVFLDEFQDCTDQQYELVKVAFQSTSIRLTAVGDTKQKIMGWAGALDGIFQTFAKDFSAVPLNMYRNFRSKPRLLRMQNEIIRVLDPASVMPDHQLAGEEGEVFAWQFENAQGEAEYLADLIAGWIRNEKVPLSEIAVLVSKQLDLYANHLMTALEVRGIPYRNEQEMQDITVEPAARLVVDYLSCLYGQREPKAWVRLMNQLIPFADDEVQSSARQSFQRFFKEQRKIITMTELLDEPFSGWWDSVCSFLKKIGMETLVALSPDYESHARLGEVVRDTKARIEELLELTPDLPQALTRFSDDQAVRILTIHKSKGLEFDSTIIMAVENEIFFGDQDANRCAFFVGVSRAKRRLVVTYAKERDKPDNYSGIWRTNRSAQLEYFGYTSPFVK

SEQ ID NO: 68408 - protein, 641 aa, Salmonella enterica; identical to SEQ ID NO: 62984
  subsp. enterica serovar Typhimurium str. DT104

SEQ ID NO: 68409 - protein, 553 aa, Salmonella enterica; identical to SEQ ID NO: 62985
  subsp. enterica serovar Typhimurium str. DT104

SEQ ID NO: 68410 - protein, 641 aa, Salmonella enterica; identical to SEQ ID NO: 62984
  subsp. enterica serovar Typhimurium str. DT104

SEQ ID NO: 68411 - protein, 553 aa, Salmonella enterica; identical to SEQ ID NO: 62985
  subsp. enterica serovar Typhimurium str. DT104

SEQ ID NO: 68412 - protein, 641 aa, Salmonella enterica; identical to SEQ ID NO: 62984
  subsp. enterica serovar Typhimurium str. DT104

SEQ ID NO: 68413 - protein, 553 aa, Salmonella enterica; identical to SEQ ID NO: 62985
  subsp. enterica serovar Typhimurium str. DT104

SEQ ID NO: 68414 - protein, 641 aa, Salmonella enterica; identical to SEQ ID NO: 62984
  subsp. enterica serovar Typhimurium str. DT104

SEQ ID NO: 68415 - protein, 553 aa, Salmonella enterica; identical to SEQ ID NO: 62985
  subsp. enterica serovar Typhimurium str. DT104

SEQ ID NO: 68416 - protein, 641 aa, Salmonella enterica; identical to SEQ ID NO: 62984
  subsp. enterica serovar Typhimurium str. DT104

SEQ ID NO: 68417 - protein, 553 aa, Salmonella enterica; identical to SEQ ID NO: 62985
  subsp. enterica serovar Typhimurium str. DT104

SEQ ID NO: 68418 - protein, 641 aa, Salmonella enterica; identical to SEQ ID NO: 62984
  subsp. enterica serovar Typhimurium str. DT104

SEQ ID NO: 68419 - protein, 553 aa, Salmonella enterica; identical to SEQ ID NO: 62985
  subsp. enterica serovar Typhimurium str. DT104

SEQ ID NO: 68420 - protein, 641 aa, Salmonella enterica; identical to SEQ ID NO: 62984
  subsp. enterica serovar Typhimurium str. DT104

SEQ ID NO: 68421 - protein, 553 aa, Salmonella enterica; identical to SEQ ID NO: 62985
  subsp. enterica serovar Typhimurium str. DT104

SEQ ID NO: 68422 - protein, 641 aa, Salmonella enterica; identical to SEQ ID NO: 62984
  subsp. enterica serovar Typhimurium str. DT104

SEQ ID NO: 68423 - protein, 553 aa, Salmonella enterica; identical to SEQ ID NO: 62985
  subsp. enterica serovar Typhimurium str. DT104

SEQ ID NO: 68424 - protein, 641 aa, Salmonella enterica; identical to SEQ ID NO: 62984
  subsp. enterica serovar Typhimurium str. DT104

SEQ ID NO: 68425 - protein, 553 aa, Salmonella enterica; identical to SEQ ID NO: 62985
  subsp. enterica serovar Typhimurium str. DT104

SEQ ID NO: 68426 - protein, 641 aa, Salmonella enterica; identical to SEQ ID NO: 62984
  subsp. enterica serovar Typhimurium str. DT104

SEQ ID NO: 68427 - protein, 553 aa, Salmonella enterica; identical to SEQ ID NO: 62985
  subsp. enterica serovar Typhimurium str. DT104

SEQ ID NO: 68428 - protein, 641 aa, Salmonella enterica; identical to SEQ ID NO: 62984
  subsp. enterica serovar Typhimurium str. DT104

SEQ ID NO: 68429 - protein, 553 aa, Salmonella enterica; identical to SEQ ID NO: 62985
  subsp. enterica serovar Typhimurium str. DT104

SEQ ID NO: 68430 - protein, 641 aa, Salmonella enterica; identical to SEQ ID NO: 62984
  subsp. enterica serovar Typhimurium str. DT104

SEQ ID NO: 68431 - protein, 553 aa, Salmonella enterica; identical to SEQ ID NO: 62985
  subsp. enterica serovar Typhimurium str. DT104

SEQ ID NO: 68432 - protein, 641 aa, Salmonella enterica; identical to SEQ ID NO: 62984
  subsp. enterica serovar Typhimurium str. DT104

SEQ ID NO: 68433 - protein, 553 aa, Salmonella enterica; identical to SEQ ID NO: 62985
  subsp. enterica serovar Typhimurium str. DT104

SEQ ID NO: 68434 - protein, 641 aa, Salmonella enterica; identical to SEQ ID NO: 62984
  subsp. enterica serovar Typhimurium str. DT104

SEQ ID NO: 68435 - protein, 553 aa, Salmonella enterica; identical to SEQ ID NO: 62985
  subsp. enterica serovar Typhimurium str. DT104

SEQ ID NO: 68436 - protein, 641 aa, Salmonella enterica; identical to SEQ ID NO: 62984
  subsp. enterica serovar Typhimurium str. DT104

SEQ ID NO: 68437 - protein, 553 aa, Salmonella enterica; identical to SEQ ID NO: 62985
  subsp. enterica serovar Typhimurium str. DT104

SEQ ID NO: 68438 - protein, 641 aa, Salmonella enterica; identical to SEQ ID NO: 62984
  subsp. enterica serovar Typhimurium str. DT104

SEQ ID NO: 68439 - protein, 553 aa, Salmonella enterica; identical to SEQ ID NO: 62985
  subsp. enterica serovar Typhimurium str. DT104

SEQ ID NO: 68440 - protein, 641 aa, Salmonella enterica; identical to SEQ ID NO: 62984
  subsp. enterica serovar Typhimurium str. DT104

SEQ ID NO: 68441 - protein, 553 aa, Salmonella enterica; identical to SEQ ID NO: 62985
  subsp. enterica serovar Typhimurium str. DT104

SEQ ID NO: 68442 - protein, 641 aa, Salmonella enterica; identical to SEQ ID NO: 62984
  subsp. enterica serovar Typhimurium str. DT104

SEQ ID NO: 68443 - protein, 553 aa, Salmonella enterica; identical to SEQ ID NO: 62985
  subsp. enterica serovar Typhimurium str. DT104

SEQ ID NO: 68444 - protein, 641 aa, Salmonella enterica; identical to SEQ ID NO: 62984
  subsp. enterica serovar Typhimurium str. DT104

SEQ ID NO: 68445 - protein, 553 aa, Salmonella enterica; identical to SEQ ID NO: 62985
  subsp. enterica serovar Typhimurium str. DT104

SEQ ID NO: 68446 - protein, 641 aa, Salmonella enterica; identical to SEQ ID NO: 62984
  subsp. enterica serovar Typhimurium str. DT104

SEQ ID NO: 68447 - protein, 553 aa, Salmonella enterica; identical to SEQ ID NO: 62985
  subsp. enterica serovar Typhimurium str. DT104

SEQ ID NO: 68448 - protein, 641 aa, Salmonella enterica; identical to SEQ ID NO: 62984
  subsp. enterica serovar Typhimurium str. DT104

SEQ ID NO: 68449 - protein, 553 aa, Salmonella enterica; identical to SEQ ID NO: 62985
  subsp. enterica serovar Typhimurium str. DT104

SEQ ID NO: 68450 - protein, 641 aa, Salmonella enterica; identical to SEQ ID NO: 62984
  subsp. enterica serovar Typhimurium str. DT104

SEQ ID NO: 68451 - protein, 553 aa, Salmonella enterica; identical to SEQ ID NO: 62985
  subsp. enterica serovar Typhimurium str. DT104

SEQ ID NO: 68452 - protein, 641 aa, Salmonella enterica; identical to SEQ ID NO: 62984
  subsp. enterica serovar Typhimurium str. DT104

SEQ ID NO: 68453 - protein, 553 aa, Salmonella enterica; identical to SEQ ID NO: 62985
  subsp. enterica serovar Typhimurium str. DT104

SEQ ID NO: 68454 - protein, 641 aa, Salmonella enterica; identical to SEQ ID NO: 62984
  subsp. enterica serovar Typhimurium str. DT104

SEQ ID NO: 68455 - protein, 553 aa, Salmonella enterica; identical to SEQ ID NO: 62985
  subsp. enterica serovar Typhimurium str. DT104

SEQ ID NO: 68456 - protein, 641 aa, Salmonella enterica; identical to SEQ ID NO: 62984
  subsp. enterica serovar Typhimurium str. DT104

SEQ ID NO: 68457 - protein, 553 aa, Salmonella enterica; identical to SEQ ID NO: 62985
  subsp. enterica serovar Typhimurium str. DT104

SEQ ID NO: 68458 - protein, 641 aa, Salmonella enterica; identical to SEQ ID NO: 62984
  subsp. enterica serovar Typhimurium str. DT104

SEQ ID NO: 68459 - protein, 553 aa, Salmonella enterica; identical to SEQ ID NO: 62985
  subsp. enterica serovar Typhimurium str. DT104

SEQ ID NO: 68460 - protein, 651 aa, Yersinia enterocolitica
MHLSKLKINGFRCFNDYFNIHLSRGLNVIVGENGAGKTAIISAIRQLFIDSESGRYSVSNDDFSFPFKINGEAANSFSIQAEFDELSVSDKVTLLPWIGSNKTAVLNLEAENKEIRGRFRKILWGGKSKSSLFEPELLDLIQCIYLPPLRDAESKLSNGRQSRLSKLLRALNRRELKRSRKDGKPHPLEEKIKEFNTTLAADENLGIKDANELITKNLIKAIGYNFGQKTSIQFAESDFTKIVESLKLLFFPDLSNEDQSLFRSLSQNSLGYNNLLYIASILAELTLDDDDDDDDEQPLLKLLLIEEPEAHLHPQLQIRLLNHIKSVADENKNVQIIVTTHSTVLASSVELESIIHLSKSHNPVATPLRNCGLKENSSQFINRWLDVTKSNLLFASGVILVEGIAEQMLIPALAKRVLSNQNDGKRSLEDIGVSTINLNGIYFKHFMQLYCNVKSVDDVDEEINGENIPIRCAGLTDLDPPKTIKKKVAGLDNTDEIKEIIEDFIPYDGNIKDGNNHAIKLVESINNSSNARLFVSKYKTLEYDLAMEGNNAALMSKIIASLWPKPQKGESEIINDFNIMSNIDWTKKTNKEVAEAAYKILNRIDDDNIGKGMFAQVMTEKLKDPTLDFIVPAYIRDAILWATSLEVGGEK

SEQ ID NO: 68461 - protein, 592 aa, Yersinia enterocolitica
MMDNQFTDEQINYINSSIDKHIFLEACPGSGKTEVVAAKLAKEIYIWNKRPGGIAVLSFANSATEELIKRVSKYCNAGQSIYPHFIGTFDSFIYKNIVSPLATELTNYTGTGNDATIRIVEPSAQMGYRTKYSYAKRGNIHAHHYSHNLRSGGIIFETGDAVFDRALNTLKLENWQIQDFSETKRRMLDGGFATYRDIEYLALRALNEERFKHFVSLLAKRYPLIIIDECQDLSEEQLTILQILLNQGTKLQFVGDLHQAIYGFREVEPARVKKFIIDNNFNILELTRNFRSCQNIVNLCAKLTGRNNINGNVTWLDPRCLVVQYQNSPTELTDTFDSICKNYNKNVIVSRGHSNLLKFQTSENELNNIQKLALAISIYNSDDMSMLTNSLQLFSEFIRHHLKESCKTKDFNCPYSVNSSISWRKFLCASLSYMNSIGLQNMNISWSNWVKQAKSSIRILSSKEFCPTNISAALAPLASVNLTSPSGLANKEVNSTLGTISESTSLYGRSTIHGAKGETHDVTIVVSSTRSGKDSHWLDWLSDPKSEAARFAYVASSRPQHYLIWAVKTLKNEEKKKLEAIGFTVLPLDTNT

SEQ ID NO: 68462 - protein, 641 aa, Salmonella enterica; identical to SEQ ID NO: 62984
  subsp. enterica serovar Typhimurium str. DT104

SEQ ID NO: 68463 - protein, 553 aa, Salmonella enterica; identical to SEQ ID NO: 62985
  subsp. enterica serovar Typhimurium str. DT104

SEQ ID NO: 68464 - protein, 769 aa, Yersinia enterocolitica
MHLHSYRLRNYRRLKDAHIELADDISIFVGSNNSGKTSATQAIHAFVTGGRDRFSLYDFSSSCWKSFDEAGNINLADPIPEEFSLPSIDLDLWFEVAAPDLYLVIPLLPSTAWEGTKVGIRVSLTAKNSINLIQNFQEAKARGAAQAAELPPGSQYTPWPRSMTDYLQRELKSEYELRYFILDRTRFDETTFREIGNYVPDELSGEPGGGTILKSLIHIDNLGAQRHLADPNPEAGGRSEDLSKRLSRFYKRNLNQRQDDHIALKALFDSEQALNLHLDGVFKPMLDRLARLGYPGVNNPRLKIMSALDPAHVMSQDARVHYQIGDGEDTATLPDSYNGLGFKNLIYMVVEILDSQARWATMDNRPPLHLLFVEEPEAHLHAQLQQVFIRNILELLNIEGDDGSIFGSQMVITTHSPHILYERGFKPIRYFRRKKTGKGQVTEVLNLSAFYQSQTDDRDFLERYLKLTHCDLFFSDAAILVEGNVERLLLPVMIRKSAKTLRSACLCVLEVGGAFGHRFQSLIEFLGLTTLIITDIDSVALKAQAVDDAEEEELEEFEVPADAEDDAAGQAQDNGQYPGGEPMVPASKKKYGKACLPSTQGAATSNQTLIKWLPGKLTIEDLRNASETEKTHVFENDAKVRVAYQTERAITWNGTTEILCGRTLEEDFGLENPDWSQAIARKPLGLIVKGGAVSPAALAEGLHKKVSRKSFDKTKFALAVLTEDEEAWHVPAYIRDGLVWLKDEIRIELETVLPELIAEEDVVMRGGHE

SEQ ID NO: 68465 - protein, 651 aa, Yersinia enterocolitica
MSSRANKPDTQADMDLRNCLRNVPPRSFIMRAGAGSGKTTSLIKGLSSVIQIHGDKLKKTRQRVACITYTEIAAGEIWRDVGSDPLVHVSTIHSFMWLLAKPFQNDIRAWVSGRIVEKIDALEEKCATYGPRVQQRTKDKDARDLERLRRQSERIAAVKGFRYGTGSNYAKGILGHDDILKLVSYLISQHPLFRTLIARQFPFVFVDESQDTTTEVVQALKSVESEPGVTFCLGFFGDPMQRIYVTGTGQVEAEPTWVDIPKPENFRCSTKVLNLANAIRRDGDDLVQTPGQRLGPQGIIPIPEGSAHLFILPADETRDANLVRVREWMATRTGDDYWRSGDDDQARVKLLVIVHQMAARRLGFGDLYAALNSKAPSAFKDGFLDGSAWPISSCVKFLIPITIAHTNGQQLEVMRLIREYSLLLDKESLGGASVAERLNVLGELVASISAGIAGHSGATIGDLLKQVNSSDLLVLDPRLISYLDPNAVLPVQPEPEAGENNDDDVQENGETDKEMASMDAFLACPASQLLPYHTYISERSPFWTQQGIKGAEFDRVLVVLDDAESNHFQFSYEKYLGLEEPSNNDQKHMDAGEETTMDRTRRLFYVSCTRALKDLAVVLFTANPKQAEAHIRQLDLFEDEAIHTQGVFEMT

SEQ ID NO: 68466 - protein, 641 aa, Salmonella enterica; identical to SEQ ID NO: 62984
  subsp. enterica serovar Typhimurium str. DT104

SEQ ID NO: 68467 - protein, 553 aa, Salmonella enterica; identical to SEQ ID NO: 62985
  subsp. enterica serovar Typhimurium str. DT104

SEQ ID NO: 68468 - protein, 641 aa, Salmonella enterica; identical to SEQ ID NO: 62984
  subsp. enterica serovar Typhimurium str. DT104

SEQ ID NO: 68469 - protein, 553 aa, Salmonella enterica; identical to SEQ ID NO: 62985
  subsp. enterica serovar Typhimurium str. DT104

SEQ ID NO: 68470 - protein, 641 aa, Salmonella enterica; identical to SEQ ID NO: 62984
  subsp. enterica serovar Typhimurium str. DT104

SEQ ID NO: 68471 - protein, 553 aa, Salmonella enterica; identical to SEQ ID NO: 62985
  subsp. enterica serovar Typhimurium str. DT104

SEQ ID NO: 68472 - protein, 641 aa, Salmonella enterica; identical to SEQ ID NO: 62984
  subsp. enterica serovar Typhimurium str. DT104

SEQ ID NO: 68473 - protein, 553 aa, Salmonella enterica; identical to SEQ ID NO: 62985
  subsp. enterica serovar Typhimurium str. DT104

SEQ ID NO: 68474 - protein, 641 aa, Salmonella enterica; identical to SEQ ID NO: 62984
  subsp. enterica serovar Typhimurium str. DT104

SEQ ID NO: 68475 - protein, 553 aa, Salmonella enterica; identical to SEQ ID NO: 62985
  subsp. enterica serovar Typhimurium str. DT104

SEQ ID NO: 68476 - protein, 641 aa, Salmonella enterica; identical to SEQ ID NO: 62984
  subsp. enterica serovar Typhimurium str. DT104

SEQ ID NO: 68477 - protein, 553 aa, Salmonella enterica; identical to SEQ ID NO: 62985
  subsp. enterica serovar Typhimurium str. DT104

SEQ ID NO: 68478 - protein, 641 aa, Salmonella enterica; identical to SEQ ID NO: 62984
  subsp. enterica serovar Typhimurium str. DT104

SEQ ID NO: 68479 - protein, 553 aa, Salmonella enterica; identical to SEQ ID NO: 62985
  subsp. enterica serovar Typhimurium str. DT104

SEQ ID NO: 68480 - protein, 641 aa, Salmonella enterica; identical to SEQ ID NO: 62984
  subsp. enterica serovar Typhimurium str. DT104

SEQ ID NO: 68481 - protein, 553 aa, Salmonella enterica; identical to SEQ ID NO: 62985
  subsp. enterica serovar Typhimurium str. DT104

SEQ ID NO: 68482 - protein, 641 aa, Salmonella enterica; identical to SEQ ID NO: 62984
  subsp. enterica serovar Typhimurium str. DT104

SEQ ID NO: 68483 - protein, 553 aa, Salmonella enterica; identical to SEQ ID NO: 62985
  subsp. enterica serovar Typhimurium str. DT104

SEQ ID NO: 68484 - protein, 641 aa, Salmonella enterica; identical to SEQ ID NO: 62984
  subsp. enterica serovar Typhimurium str. DT104

SEQ ID NO: 68485 - protein, 553 aa, Salmonella enterica; identical to SEQ ID NO: 62985
  subsp. enterica serovar Typhimurium str. DT104

SEQ ID NO: 68486 - protein, 641 aa, Salmonella enterica; identical to SEQ ID NO: 62984
  subsp. enterica serovar Typhimurium str. DT104

SEQ ID NO: 68487 - protein, 553 aa, Salmonella enterica; identical to SEQ ID NO: 62985
  subsp. enterica serovar Typhimurium str. DT104

SEQ ID NO: 68488 - protein, 634 aa, Yersinia enterocolitica
MYLHTIKINGFKCFDNNFSIELSDGLNVLVGENGAGKTAIISAIRQLFNDSESGKRAIRDRDFYRSFIHNAVAAESIHIEATFTELNQDESTAFIDWCGQEPEAKLTFSAANRESRGHYRHQIWGGAQRIKPVEIEVLDLIHCIYLPPLRDAEVKLREGRQSRLARLLKALCRKELEDCRKAGAVHPLEQRVGAFNKELAESEDYAIKQANQRIGDNLKEALGMNLSQSTIIQFSEVNFSKIVEGLRLLYYPDLSDADATQFRSLEENSLGYNNLLYIASILAELILDVEEEQVEKTYLRLLLIEEPEAHLHPQLQIRLLRHLKAVAEARGIQVIITTHSTVISSAVSINNIIHISRADKPTAIPLRHCGLPDASRRFIDRWLDVTKSNLLFSKGVILVEGIAEAIVVPELARIVLQAYGKGRDSLDDYGVSVINLNGIYFNHFMQLFCDVKGTEESRSIPVRCAGLTDNDPPKSIEKIVNEEGKETSMPYLPHAEAFQAGNNPALTLIPLIAQSQYARLYAGKYKTFEYDIALEGNNLRKMFEIAAAHWPTRGPVEAVLRASSELSFAEMPNAEKAEYAWYLLQRIDSDDMGKGLYAQVLADALVEHLEDFVVPEYIREAILWACNIPQEIVA

SEQ ID NO: 68489 - protein, 580 aa, Yersinia enterocolitica
MMTLTEEQQAYIDAPLNEHIYLRACPGSGKTEVVAARVTRAIRDWQQFPSGIAVLTFCNSATDELKERLTEYLGEPVSHPHCISTFDSFLLTHIVAKIASQITGYTGKNGDFRIRLLDRSADIFRTNTRICGRTISACKYDYDLDSNSFVFSTGELTDIALNAAVLSAENMRDLIDTKKRLWREGFATYRDIDMLALMAFKNEAFGEYFARVARRFPVVIVDECQDLSAEQLAVIRYLDRLGIRFHFVGDLNQSIYGFRKSDPARVQKLLNDLHFREFALSANWRSSQAIANLCSDLLNVGRGAGNPDIESLKPKIIQYQRCPSELTQRITELTQGYENVVVVARGHSTLQRLTRGVTLNTVEELAMSCVSVESKNLERVRLALNSFSQWIALKLSLEVAPMNLYRPIEIDSTLVWRQFILNCLKFLSICGASDVELTWAQWAAITKRAIRQLPDQPFIPIEIAEKLSGLKKINLSAPSGQGSDKLSTRLSMVELQPVVTHRYATIHQVKGETHDATVVISSLKSGNQSHWKDWLNDPSTEAARFAYVASSRPRHLLIWGVKTLKPTEQKRLVQLGFEIC

SEQ ID NO: 68490 - protein, 641 aa, Salmonella enterica; identical to SEQ ID NO: 62984
  subsp. enterica serovar Typhimurium str. DT104

SEQ ID NO: 68491 - protein, 553 aa, Salmonella enterica; identical to SEQ ID NO: 62985
  subsp. enterica serovar Typhimurium str. DT104

SEQ ID NO: 68492 - protein, 641 aa, Salmonella enterica; identical to SEQ ID NO: 62984
  subsp. enterica serovar Typhimurium str. DT104

SEQ ID NO: 68493 - protein, 553 aa, Salmonella enterica; identical to SEQ ID NO: 62985
  subsp. enterica serovar Typhimurium str. DT104

SEQ ID NO: 68494 - protein, 641 aa, Salmonella enterica; identical to SEQ ID NO: 62984
  subsp. enterica serovar Typhimurium str. DT104

SEQ ID NO: 68495 - protein, 553 aa, Salmonella enterica; identical to SEQ ID NO: 62985
  subsp. enterica serovar Typhimurium str. DT104

SEQ ID NO: 68496 - protein, 641 aa, Salmonella enterica; identical to SEQ ID NO: 62984
  subsp. enterica serovar Typhimurium str. DT104

SEQ ID NO: 68497 - protein, 553 aa, Salmonella enterica; identical to SEQ ID NO: 62985
  subsp. enterica serovar Typhimurium str. DT104

SEQ ID NO: 68498 - protein, 641 aa, Salmonella enterica; identical to SEQ ID NO: 62984
  subsp. enterica serovar Typhimurium str. DT104

SEQ ID NO: 68499 - protein, 553 aa, Salmonella enterica; identical to SEQ ID NO: 62985
  subsp. enterica serovar Typhimurium str. DT104

SEQ ID NO: 68500 - protein, 641 aa, Salmonella enterica; identical to SEQ ID NO: 62984
  subsp. enterica serovar Typhimurium str. DT104

SEQ ID NO: 68501 - protein, 553 aa, Salmonella enterica; identical to SEQ ID NO: 62985
  subsp. enterica serovar Typhimurium str. DT104

SEQ ID NO: 68502 - protein, 564 aa, Yersinia frederiksenii
MEISSLKLKGFRNFKDAHINFNSNTLIIGANDVGKSNMLHSLRMLLDKSVSDSEIEPNELDFHLENGKSSEEFQIIIHFKDINEDAVLSILKGSVSDSGESFIKYVAQKSDLSYKLFIGDSLASLQEINSRYYLKFINLKYIQSQRDLERFIRKEKRQLLKIAQQSLNPDEREEDDDLLGEISSDLQLINDKISQLIYVERATKDVNDELKKLAHHYSEYSVQLDTGAIGINDFIDNLQLGANTNGSNVMLGGDGRNNQILLALWKAKSIKEHDIDNEVIFYVIEEPEAHLHPHQQRKLADYLIAELPGQTIISSHSPQIAVNFEPDSVIRLLDRAGHTVAASEGCSKGISDGWEGMSYRMSILPAESFFSNGVFLVEGPSEILFYQCLSKSLGIDLDYLNISIVSVDGISFKIYVAILDALEIPWVMRTDNDISKIKDKWQYAGINRCLGIAGIDKFEHSDVQIVPMDTLTNGDWQAVSEEINKHGIYLSKIDLENDLIEELSAPILNALGNKNNQSAIEYLQKKKALRMRVLLKDIKKDLHKLNTGELVKPLNHLVTIIKGE

SEQ ID NO: 68503 - protein, 541 aa, Yersinia frederiksenii
MSAFSPTPQQTLAIDYTGSMVITACPGSGKTTVIKEKIRNITDCLPEHKGVIAITFTRKASSELERRCKAEGHNVKHSFFGTIDSFCLKEIIIPFLSRLWGGTPTECKILKKLESPYSHFIESNFSGTPSIININEDPGYKKLYDEGMLWMGSFSALALKILNESSAAKRYIKARYSHIFIDEYQDSSLSQHQLFLRINELGLCSIAVGDVWQSIYEFRGGNSELLLELVGKTEYFKHFEINFNHRCHPSIGNYASRLLDPAYNLLPTDEIRMFRRRLGGNIKDAAVTISPWILGWLDSGEWNLEKANQIAILARKEKSLNLFCSGLKLNFRLYVDTPLDKIGTDCSDLYKDLLAYKYGSISTAQEFINKFFDGIIIDDNIQFLLRKKIKTIREELKNEDLIYKFHDIADILGINSTEHTDGAVIRTISDDILIKQFKPLDDSEIQVMTLHKSKGLEFKLVFHLDLDEWSFPYREYNSEDRYTPLYPTLQQELNLHYVGITRAENCCILINSSLRENASGEFKKTDESYFFKLPQLNNLYT

SEQ ID NO: 68504 - protein, 641 aa, Salmonella enterica; identical to SEQ ID NO: 62984
  subsp. enterica serovar Typhimurium str. DT104

SEQ ID NO: 68505 - protein, 553 aa, Salmonella enterica; identical to SEQ ID NO: 62985
  subsp. enterica serovar Typhimurium str. DT104

SEQ ID NO: 68506 - protein, 641 aa, Salmonella enterica; identical to SEQ ID NO: 62984
  subsp. enterica serovar Typhimurium str. DT104

SEQ ID NO: 68507 - protein, 553 aa, Salmonella enterica; identical to SEQ ID NO: 62985
  subsp. enterica serovar Typhimurium str. DT104

SEQ ID NO: 68508 - protein, 641 aa, Salmonella enterica; identical to SEQ ID NO: 62984
  subsp. enterica serovar Typhimurium str. DT104

SEQ ID NO: 68509 - protein, 553 aa, Salmonella enterica; identical to SEQ ID NO: 62985
  subsp. enterica serovar Typhimurium str. DT104

SEQ ID NO: 68510 - protein, 641 aa, Salmonella enterica; identical to SEQ ID NO: 62984
  subsp. enterica serovar Typhimurium str. DT104

SEQ ID NO: 68511 - protein, 553 aa, Salmonella enterica; identical to SEQ ID NO: 62985
  subsp. enterica serovar Typhimurium str. DT104

SEQ ID NO: 68512 - protein, 641 aa, Salmonella enterica; identical to SEQ ID NO: 62984
  subsp. enterica serovar Typhimurium str. DT104

SEQ ID NO: 68513 - protein, 553 aa, Salmonella enterica; identical to SEQ ID NO: 62985
  subsp. enterica serovar Typhimurium str. DT104

SEQ ID NO: 68514 - protein, 641 aa, Salmonella enterica; identical to SEQ ID NO: 62984
  subsp. enterica serovar Typhimurium str. DT104

SEQ ID NO: 68515 - protein, 553 aa, Salmonella enterica; identical to SEQ ID NO: 62985
  subsp. enterica serovar Typhimurium str. DT104

SEQ ID NO: 68516 - protein, 641 aa, Salmonella enterica; identical to SEQ ID NO: 62984
  subsp. enterica serovar Typhimurium str. DT104

SEQ ID NO: 68517 - protein, 553 aa, Salmonella enterica; identical to SEQ ID NO: 62985
  subsp. enterica serovar Typhimurium str. DT104

SEQ ID NO: 68518 - protein, 641 aa, Salmonella enterica; identical to SEQ ID NO: 62984
  subsp. enterica serovar Typhimurium str. DT104

SEQ ID NO: 68519 - protein, 553 aa, Salmonella enterica; identical to SEQ ID NO: 62985
  subsp. enterica serovar Typhimurium str. DT104

SEQ ID NO: 68520 - protein, 641 aa, Salmonella enterica; identical to SEQ ID NO: 62984
  subsp. enterica serovar Typhimurium str. DT104

SEQ ID NO: 68521 - protein, 553 aa, Salmonella enterica; identical to SEQ ID NO: 62985
  subsp. enterica serovar Typhimurium str. DT104

SEQ ID NO: 68522 - protein, 641 aa, Salmonella enterica; identical to SEQ ID NO: 62984
  subsp. enterica serovar Typhimurium str. DT104

SEQ ID NO: 68523 - protein, 553 aa, Salmonella enterica; identical to SEQ ID NO: 62985
  subsp. enterica serovar Typhimurium str. DT104

SEQ ID NO: 68524 - protein, 641 aa, Salmonella enterica; identical to SEQ ID NO: 62984
  subsp. enterica serovar Typhimurium str. DT104

SEQ ID NO: 68525 - protein, 553 aa, Salmonella enterica; identical to SEQ ID NO: 62985
  subsp. enterica serovar Typhimurium str. DT104

SEQ ID NO: 68526 - protein, 641 aa, Salmonella enterica; identical to SEQ ID NO: 62984
  subsp. enterica serovar Typhimurium str. DT104

SEQ ID NO: 68527 - protein, 553 aa, Salmonella enterica; identical to SEQ ID NO: 62985
  subsp. enterica serovar Typhimurium str. DT104

SEQ ID NO: 68528 - protein, 641 aa, Salmonella enterica; identical to SEQ ID NO: 62984
  subsp. enterica serovar Typhimurium str. DT104

SEQ ID NO: 68529 - protein, 553 aa, Salmonella enterica; identical to SEQ ID NO: 62985
  subsp. enterica serovar Typhimurium str. DT104

SEQ ID NO: 68530 - protein, 641 aa, Salmonella enterica; identical to SEQ ID NO: 62984
  subsp. enterica serovar Typhimurium str. DT104

SEQ ID NO: 68531 - protein, 553 aa, Salmonella enterica; identical to SEQ ID NO: 62985
  subsp. enterica serovar Typhimurium str. DT104

SEQ ID NO: 68532 - protein, 641 aa, Salmonella enterica; identical to SEQ ID NO: 62984
  subsp. enterica serovar Typhimurium str. DT104

SEQ ID NO: 68533 - protein, 553 aa, Salmonella enterica; identical to SEQ ID NO: 62985
  subsp. enterica serovar Typhimurium str. DT104

SEQ ID NO: 68534 - protein, 641 aa, Salmonella enterica; identical to SEQ ID NO: 62984
  subsp. enterica serovar Typhimurium str. DT104

SEQ ID NO: 68535 - protein, 553 aa, Salmonella enterica; identical to SEQ ID NO: 62985
  subsp. enterica serovar Typhimurium str. DT104

SEQ ID NO: 68536 - protein, 641 aa, Salmonella enterica; identical to SEQ ID NO: 62984
  subsp. enterica serovar Typhimurium str. DT104

SEQ ID NO: 68537 - protein, 553 aa, Salmonella enterica; identical to SEQ ID NO: 62985
  subsp. enterica serovar Typhimurium str. DT104

SEQ ID NO: 68538 - protein, 641 aa, Salmonella enterica; identical to SEQ ID NO: 62984
  subsp. enterica serovar Typhimurium str. DT104

SEQ ID NO: 68539 - protein, 553 aa, Salmonella enterica; identical to SEQ ID NO: 62985
  subsp. enterica serovar Typhimurium str. DT104

SEQ ID NO: 68540 - protein, 706 aa, Yersinia mollaretii
MKICSIEIKNYRLLTEFRLDLEDNLSLVIGKNNTGKTSLLSALEKLYAETRKISFDDFNVKLRDRLKAFVGGEKALPNEDVYEPLGVELRLVLVYEDEDDLGQVSPLIMSLDPDDKSILLGFEYKISHSQLVSFRNDFLEERDNYDDDVLLYMAEKHKKYFGGISRRSYLSNDLSVFTDLIKEKISLDEVISFKAISAKRNVTNRENDKTLSGQTADIYKITEESEEQKDTVNRFKKTLRGADKNLNGIYEEMFSKVLKSVERFGGISQYETSITIASTLQHQELLDGNTTVFYRHETHDLPEHYNGLGYMNLISMIFEIELLMTSFRRSLLERPAAVNLLFIEEPEVHTHPQMQYVFIKNIKDLLEEGVVREDGLVVNLQTVISTHSSHIVAECNFDDIKYMKRKGGVVNCSNLKDLKKEYDREDSKGIDGHYKFLKQYLTLNRAELFFADKAIFVEGDTERVLLPAMMKKIDEEYPENEVAPLTSQNVSIVEVGAHSQVFEKFISFLGIKTLILTDIDTGKTVPDLDSAGNHKRTQKDEPKYTTEKCSPMDSDVSHTSNNALCFFHSKEREDIKYFLSLFKDDKKFLFDGEKWVRDKIGQIFTAFQIEEEGYRGRSFEDAFFHVNKEFLGTDSVVFPSLIAKHFELYVAGHTTAYEFAEKGVDKKTTLAIDILLNSQTQETPKRTFSNWNTPAYIREGLEWLRK

SEQ ID NO: 68541 - protein, 571 aa, Yersinia mollaretii; identical to SEQ ID NO: 67215

SEQ ID NO: 68542 - protein, 641 aa, Salmonella enterica; identical to SEQ ID NO: 62984
  subsp. enterica serovar Typhimurium str. DT104

SEQ ID NO: 68543 - protein, 553 aa, Salmonella enterica; identical to SEQ ID NO: 62985
  subsp. enterica serovar Typhimurium str. DT104

SEQ ID NO: 68544 - protein, 641 aa, Salmonella enterica; identical to SEQ ID NO: 62984
  subsp. enterica serovar Typhimurium str. DT104

SEQ ID NO: 68545 - protein, 553 aa, Salmonella enterica; identical to SEQ ID NO: 62985
  subsp. enterica serovar Typhimurium str. DT104

SEQ ID NO: 68546 - protein, 641 aa, Salmonella enterica; identical to SEQ ID NO: 62984
  subsp. enterica serovar Typhimurium str. DT104

SEQ ID NO: 68547 - protein, 553 aa, Salmonella enterica; identical to SEQ ID NO: 62985
  subsp. enterica serovar Typhimurium str. DT104

SEQ ID NO: 68548 - protein, 641 aa, Salmonella enterica; identical to SEQ ID NO: 62984
  subsp. enterica serovar Typhimurium str. DT104

SEQ ID NO: 68549 - protein, 553 aa, Salmonella enterica; identical to SEQ ID NO: 62985
  subsp. enterica serovar Typhimurium str. DT104

SEQ ID NO: 68550 - protein, 641 aa, Salmonella enterica; identical to SEQ ID NO: 62984
  subsp. enterica serovar Typhimurium str. DT104

SEQ ID NO: 68551 - protein, 553 aa, Salmonella enterica; identical to SEQ ID NO: 62985
  subsp. enterica serovar Typhimurium str. DT104

SEQ ID NO: 68552 - protein, 641 aa, Salmonella enterica; identical to SEQ ID NO: 62984
  subsp. enterica serovar Typhimurium str. DT104

SEQ ID NO: 68553 - protein, 553 aa, Salmonella enterica; identical to SEQ ID NO: 62985
  subsp. enterica serovar Typhimurium str. DT104

SEQ ID NO: 68554 - protein, 641 aa, Salmonella enterica; identical to SEQ ID NO: 62984
  subsp. enterica serovar Typhimurium str. DT104

SEQ ID NO: 68555 - protein, 553 aa, Salmonella enterica; identical to SEQ ID NO: 62985
  subsp. enterica serovar Typhimurium str. DT104

SEQ ID NO: 68556 - protein, 641 aa, Salmonella enterica; identical to SEQ ID NO: 62984
  subsp. enterica serovar Typhimurium str. DT104

SEQ ID NO: 68557 - protein, 553 aa, Salmonella enterica; identical to SEQ ID NO: 62985
  subsp. enterica serovar Typhimurium str. DT104

SEQ ID NO: 68558 - protein, 641 aa, Salmonella enterica; identical to SEQ ID NO: 62984
  subsp. enterica serovar Typhimurium str. DT104

SEQ ID NO: 68559 - protein, 553 aa, Salmonella enterica; identical to SEQ ID NO: 62985
  subsp. enterica serovar Typhimurium str. DT104

SEQ ID NO: 68560 - protein, 641 aa, Salmonella enterica; identical to SEQ ID NO: 62984
  subsp. enterica serovar Typhimurium str. DT104

SEQ ID NO: 68561 - protein, 553 aa, Salmonella enterica; identical to SEQ ID NO: 62985
  subsp. enterica serovar Typhimurium str. DT104

SEQ ID NO: 68562 - protein, 641 aa, Salmonella enterica; identical to SEQ ID NO: 62984
  subsp. enterica serovar Typhimurium str. DT104

SEQ ID NO: 68563 - protein, 553 aa, Salmonella enterica; identical to SEQ ID NO: 62985
  subsp. enterica serovar Typhimurium str. DT104

SEQ ID NO: 68564 - protein, 641 aa, Salmonella enterica; identical to SEQ ID NO: 62984
  subsp. enterica serovar Typhimurium str. DT104

SEQ ID NO: 68565 - protein, 553 aa, Salmonella enterica; identical to SEQ ID NO: 62985
  subsp. enterica serovar Typhimurium str. DT104

SEQ ID NO: 68566 - protein, 641 aa, Salmonella enterica; identical to SEQ ID NO: 62984
  subsp. enterica serovar Typhimurium str. DT104

SEQ ID NO: 68567 - protein, 553 aa, Salmonella enterica; identical to SEQ ID NO: 62985
  subsp. enterica serovar Typhimurium str. DT104

SEQ ID NO: 68568 - protein, 641 aa, Salmonella enterica; identical to SEQ ID NO: 62984
  subsp. enterica serovar Typhimurium str. DT104

SEQ ID NO: 68569 - protein, 553 aa, Salmonella enterica; identical to SEQ ID NO: 62985
  subsp. enterica serovar Typhimurium str. DT104

SEQ ID NO: 68570 - protein, 641 aa, Salmonella enterica; identical to SEQ ID NO: 62984
  subsp. enterica serovar Typhimurium str. DT104

SEQ ID NO: 68571 - protein, 553 aa, Salmonella enterica; identical to SEQ ID NO: 62985
  subsp. enterica serovar Typhimurium str. DT104

SEQ ID NO: 68572 - protein, 641 aa, Salmonella enterica; identical to SEQ ID NO: 62984
  subsp. enterica serovar Typhimurium str. DT104

SEQ ID NO: 68573 - protein, 553 aa, Salmonella enterica; identical to SEQ ID NO: 62985
  subsp. enterica serovar Typhimurium str. DT104

SEQ ID NO: 68574 - protein, 641 aa, Salmonella enterica; identical to SEQ ID NO: 62984
  subsp. enterica serovar Typhimurium str. DT104

SEQ ID NO: 68575 - protein, 553 aa, Salmonella enterica; identical to SEQ ID NO: 62985
  subsp. enterica serovar Typhimurium str. DT104

SEQ ID NO: 68576 - protein, 641 aa, Salmonella enterica; identical to SEQ ID NO: 62984
  subsp. enterica serovar Typhimurium str. DT104

SEQ ID NO: 68577 - protein, 553 aa, Salmonella enterica; identical to SEQ ID NO: 62985
  subsp. enterica serovar Typhimurium str. DT104

SEQ ID NO: 68578 - protein, 641 aa, Salmonella enterica; identical to SEQ ID NO: 62984
  subsp. enterica serovar Typhimurium str. DT104

SEQ ID NO: 68579 - protein, 553 aa, Salmonella enterica; identical to SEQ ID NO: 62985
  subsp. enterica serovar Typhimurium str. DT104

SEQ ID NO: 68580 - protein, 641 aa, Salmonella enterica; identical to SEQ ID NO: 62984
  subsp. enterica serovar Typhimurium str. DT104

SEQ ID NO: 68581 - protein, 553 aa, Salmonella enterica; identical to SEQ ID NO: 62985
  subsp. enterica serovar Typhimurium str. DT104

SEQ ID NO: 68582 - protein, 641 aa, Salmonella enterica; identical to SEQ ID NO: 62984
  subsp. enterica serovar Typhimurium str. DT104

SEQ ID NO: 68583 - protein, 553 aa, Salmonella enterica; identical to SEQ ID NO: 62985
  subsp. enterica serovar Typhimurium str. DT104

SEQ ID NO: 68584 - protein, 641 aa, Salmonella enterica; identical to SEQ ID NO: 62984
  subsp. enterica serovar Typhimurium str. DT104

SEQ ID NO: 68585 - protein, 553 aa, Salmonella enterica; identical to SEQ ID NO: 62985
  subsp. enterica serovar Typhimurium str. DT104

SEQ ID NO: 68586 - protein, 641 aa, Salmonella enterica; identical to SEQ ID NO: 62984
  subsp. enterica serovar Typhimurium str. DT104

SEQ ID NO: 68587 - protein, 553 aa, Salmonella enterica; identical to SEQ ID NO: 62985
  subsp. enterica serovar Typhimurium str. DT104

SEQ ID NO: 68588 - protein, 641 aa, Salmonella enterica; identical to SEQ ID NO: 62984
  subsp. enterica serovar Typhimurium str. DT104

SEQ ID NO: 68589 - protein, 553 aa, Salmonella enterica; identical to SEQ ID NO: 62985
  subsp. enterica serovar Typhimurium str. DT104

SEQ ID NO: 68590 - protein, 641 aa, Salmonella enterica; identical to SEQ ID NO: 62984
  subsp. enterica serovar Typhimurium str. DT104

SEQ ID NO: 68591 - protein, 553 aa, Salmonella enterica; identical to SEQ ID NO: 62985
  subsp. enterica serovar Typhimurium str. DT104

SEQ ID NO: 68592 - protein, 641 aa, Salmonella enterica; identical to SEQ ID NO: 62984
  subsp. enterica serovar Typhimurium str. DT104

SEQ ID NO: 68593 - protein, 553 aa, Salmonella enterica; identical to SEQ ID NO: 62985
  subsp. enterica serovar Typhimurium str. DT104

SEQ ID NO: 68594 - protein, 641 aa, Salmonella enterica; identical to SEQ ID NO: 62984
  subsp. enterica serovar Typhimurium str. DT104

SEQ ID NO: 68595 - protein, 553 aa, Salmonella enterica; identical to SEQ ID NO: 62985
  subsp. enterica serovar Typhimurium str. DT104

SEQ ID NO: 68596 - protein, 641 aa, Salmonella enterica; identical to SEQ ID NO: 62984
  subsp. enterica serovar Typhimurium str. DT104

SEQ ID NO: 68597 - protein, 553 aa, Salmonella enterica; identical to SEQ ID NO: 62985
  subsp. enterica serovar Typhimurium str. DT104

SEQ ID NO: 68598 - protein, 641 aa, Salmonella enterica; identical to SEQ ID NO: 62984
  subsp. enterica serovar Typhimurium str. DT104

SEQ ID NO: 68599 - protein, 553 aa, Salmonella enterica; identical to SEQ ID NO: 62985
  subsp. enterica serovar Typhimurium str. DT104

SEQ ID NO: 68600 - protein, 641 aa, Salmonella enterica; identical to SEQ ID NO: 62984
  subsp. enterica serovar Typhimurium str. DT104

SEQ ID NO: 68601 - protein, 553 aa, Salmonella enterica; identical to SEQ ID NO: 62985
  subsp. enterica serovar Typhimurium str. DT104

SEQ ID NO: 68602 - protein, 641 aa, Salmonella enterica; identical to SEQ ID NO: 62984
  subsp. enterica serovar Typhimurium str. DT104

SEQ ID NO: 68603 - protein, 553 aa, Salmonella enterica; identical to SEQ ID NO: 62985
  subsp. enterica serovar Typhimurium str. DT104

SEQ ID NO: 68604 - protein, 641 aa, Salmonella enterica; identical to SEQ ID NO: 62984
  subsp. enterica serovar Typhimurium str. DT104

SEQ ID NO: 68605 - protein, 553 aa, Salmonella enterica; identical to SEQ ID NO: 62985
  subsp. enterica serovar Typhimurium str. DT104

SEQ ID NO: 68606 - protein, 641 aa, Salmonella enterica; identical to SEQ ID NO: 62984
  subsp. enterica serovar Typhimurium str. DT104

SEQ ID NO: 68607 - protein, 553 aa, Salmonella enterica; identical to SEQ ID NO: 62985
  subsp. enterica serovar Typhimurium str. DT104

SEQ ID NO: 68608 - protein, 641 aa, Salmonella enterica; identical to SEQ ID NO: 62984
  subsp. enterica serovar Typhimurium str. DT104

SEQ ID NO: 68609 - protein, 553 aa, Salmonella enterica; identical to SEQ ID NO: 62985
  subsp. enterica serovar Typhimurium str. DT104

SEQ ID NO: 68610 - protein, 641 aa, Salmonella enterica; identical to SEQ ID NO: 62984
  subsp. enterica serovar Typhimurium str. DT104

SEQ ID NO: 68611 - protein, 553 aa, Salmonella enterica; identical to SEQ ID NO: 62985
  subsp. enterica serovar Typhimurium str. DT104

SEQ ID NO: 68612 - protein, 641 aa, Salmonella enterica; identical to SEQ ID NO: 62984
  subsp. enterica serovar Typhimurium str. DT104

SEQ ID NO: 68613 - protein, 553 aa, Salmonella enterica; identical to SEQ ID NO: 62985
  subsp. enterica serovar Typhimurium str. DT104

SEQ ID NO: 68614 - protein, 641 aa, Salmonella enterica; identical to SEQ ID NO: 62984
  subsp. enterica serovar Typhimurium str. DT104

SEQ ID NO: 68615 - protein, 553 aa, Salmonella enterica; identical to SEQ ID NO: 62985
  subsp. enterica serovar Typhimurium str. DT104

SEQ ID NO: 68616 - protein, 641 aa, Salmonella enterica; identical to SEQ ID NO: 62984
  subsp. enterica serovar Typhimurium str. DT104

SEQ ID NO: 68617 - protein, 553 aa, Salmonella enterica; identical to SEQ ID NO: 62985
  subsp. enterica serovar Typhimurium str. DT104

SEQ ID NO: 68618 - protein, 641 aa, Salmonella enterica; identical to SEQ ID NO: 62984
  subsp. enterica serovar Typhimurium str. DT104

SEQ ID NO: 68619 - protein, 553 aa, Salmonella enterica; identical to SEQ ID NO: 62985
  subsp. enterica serovar Typhimurium str. DT104

SEQ ID NO: 68620 - protein, 641 aa, Salmonella enterica; identical to SEQ ID NO: 62984
  subsp. enterica serovar Typhimurium str. DT104

SEQ ID NO: 68621 - protein, 553 aa, Salmonella enterica; identical to SEQ ID NO: 62985
  subsp. enterica serovar Typhimurium str. DT104

SEQ ID NO: 68622 - protein, 641 aa, Salmonella enterica; identical to SEQ ID NO: 62984
  subsp. enterica serovar Typhimurium str. DT104

SEQ ID NO: 68623 - protein, 553 aa, Salmonella enterica; identical to SEQ ID NO: 62985
  subsp. enterica serovar Typhimurium str. DT104

SEQ ID NO: 68624 - protein, 641 aa, Salmonella enterica; identical to SEQ ID NO: 62984
  subsp. enterica serovar Typhimurium str. DT104

SEQ ID NO: 68625 - protein, 553 aa, Salmonella enterica; identical to SEQ ID NO: 62985
  subsp. enterica serovar Typhimurium str. DT104

SEQ ID NO: 68626 - protein, 641 aa, Salmonella enterica; identical to SEQ ID NO: 62984
  subsp. enterica serovar Typhimurium str. DT104

SEQ ID NO: 68627 - protein, 553 aa, Salmonella enterica; identical to SEQ ID NO: 62985
  subsp. enterica serovar Typhimurium str. DT104

SEQ ID NO: 68628 - protein, 641 aa, Salmonella enterica; identical to SEQ ID NO: 62984
  subsp. enterica serovar Typhimurium str. DT104

SEQ ID NO: 68629 - protein, 553 aa, Salmonella enterica; identical to SEQ ID NO: 62985
  subsp. enterica serovar Typhimurium str. DT104

SEQ ID NO: 68630 - protein, 641 aa, Salmonella enterica; identical to SEQ ID NO: 62984
  subsp. enterica serovar Typhimurium str. DT104

SEQ ID NO: 68631 - protein, 553 aa, Salmonella enterica; identical to SEQ ID NO: 62985
  subsp. enterica serovar Typhimurium str. DT104

SEQ ID NO: 68632 - protein, 641 aa, Salmonella enterica; identical to SEQ ID NO: 62984
  subsp. enterica serovar Typhimurium str. DT104

SEQ ID NO: 68633 - protein, 553 aa, Salmonella enterica; identical to SEQ ID NO: 62985
  subsp. enterica serovar Typhimurium str. DT104

SEQ ID NO: 68634 - protein, 641 aa, Salmonella enterica; identical to SEQ ID NO: 62984
  subsp. enterica serovar Typhimurium str. DT104

SEQ ID NO: 68635 - protein, 553 aa, Salmonella enterica; identical to SEQ ID NO: 62985
  subsp. enterica serovar Typhimurium str. DT104

SEQ ID NO: 68636 - protein, 641 aa, Salmonella enterica; identical to SEQ ID NO: 62984
  subsp. enterica serovar Typhimurium str. DT104

SEQ ID NO: 68637 - protein, 553 aa, Salmonella enterica; identical to SEQ ID NO: 62985
  subsp. enterica serovar Typhimurium str. DT104

SEQ ID NO: 68638 - protein, 641 aa, Salmonella enterica; identical to SEQ ID NO: 62984
  subsp. enterica serovar Typhimurium str. DT104

SEQ ID NO: 68639 - protein, 553 aa, Salmonella enterica; identical to SEQ ID NO: 62985
  subsp. enterica serovar Typhimurium str. DT104

SEQ ID NO: 68640 - protein, 641 aa, Salmonella enterica; identical to SEQ ID NO: 62984
  subsp. enterica serovar Typhimurium str. DT104

SEQ ID NO: 68641 - protein, 553 aa, Salmonella enterica; identical to SEQ ID NO: 62985
  subsp. enterica serovar Typhimurium str. DT104

SEQ ID NO: 68642 - protein, 641 aa, Salmonella enterica; identical to SEQ ID NO: 62984
  subsp. enterica serovar Typhimurium str. DT104

SEQ ID NO: 68643 - protein, 553 aa, Salmonella enterica; identical to SEQ ID NO: 62985
  subsp. enterica serovar Typhimurium str. DT104

SEQ ID NO: 68644 - protein, 641 aa, Salmonella enterica; identical to SEQ ID NO: 62984
  subsp. enterica serovar Typhimurium str. DT104

SEQ ID NO: 68645 - protein, 553 aa, Salmonella enterica; identical to SEQ ID NO: 62985
  subsp. enterica serovar Typhimurium str. DT104

SEQ ID NO: 68646 - protein, 641 aa, Salmonella enterica; identical to SEQ ID NO: 62984
  subsp. enterica serovar Typhimurium str. DT104

SEQ ID NO: 68647 - protein, 553 aa, Salmonella enterica; identical to SEQ ID NO: 62985
  subsp. enterica serovar Typhimurium str. DT104

SEQ ID NO: 68648 - protein, 641 aa, Salmonella enterica; identical to SEQ ID NO: 62984
  subsp. enterica serovar Typhimurium str. DT104

SEQ ID NO: 68649 - protein, 553 aa, Salmonella enterica; identical to SEQ ID NO: 62985
  subsp. enterica serovar Typhimurium str. DT104

SEQ ID NO: 68650 - protein, 641 aa, Salmonella enterica; identical to SEQ ID NO: 62984
  subsp. enterica serovar Typhimurium str. DT104

SEQ ID NO: 68651 - protein, 553 aa, Salmonella enterica; identical to SEQ ID NO: 62985
  subsp. enterica serovar Typhimurium str. DT104

SEQ ID NO: 68652 - protein, 641 aa, Salmonella enterica; identical to SEQ ID NO: 62984
  subsp. enterica serovar Typhimurium str. DT104

SEQ ID NO: 68653 - protein, 553 aa, Salmonella enterica; identical to SEQ ID NO: 62985
  subsp. enterica serovar Typhimurium str. DT104

SEQ ID NO: 68654 - protein, 641 aa, Salmonella enterica; identical to SEQ ID NO: 62984
  subsp. enterica serovar Typhimurium str. DT104

SEQ ID NO: 68655 - protein, 553 aa, Salmonella enterica; identical to SEQ ID NO: 62985
  subsp. enterica serovar Typhimurium str. DT104

SEQ ID NO: 68656 - protein, 641 aa, Salmonella enterica; identical to SEQ ID NO: 62984
  subsp. enterica serovar Typhimurium str. DT104

SEQ ID NO: 68657 - protein, 553 aa, Salmonella enterica; identical to SEQ ID NO: 62985
  subsp. enterica serovar Typhimurium str. DT104

SEQ ID NO: 68658 - protein, 641 aa, Salmonella enterica; identical to SEQ ID NO: 62984
  subsp. enterica serovar Typhimurium str. DT104

SEQ ID NO: 68659 - protein, 553 aa, Salmonella enterica; identical to SEQ ID NO: 62985
  subsp. enterica serovar Typhimurium str. DT104

SEQ ID NO: 68660 - protein, 641 aa, Salmonella enterica; identical to SEQ ID NO: 62984
  subsp. enterica serovar Typhimurium str. DT104

SEQ ID NO: 68661 - protein, 553 aa, Salmonella enterica; identical to SEQ ID NO: 62985
  subsp. enterica serovar Typhimurium str. DT104

SEQ ID NO: 68662 - protein, 641 aa, Salmonella enterica; identical to SEQ ID NO: 62984
  subsp. enterica serovar Typhimurium str. DT104

SEQ ID NO: 68663 - protein, 553 aa, Salmonella enterica; identical to SEQ ID NO: 62985
  subsp. enterica serovar Typhimurium str. DT104

SEQ ID NO: 68664 - protein, 641 aa, Salmonella enterica; identical to SEQ ID NO: 62984
  subsp. enterica serovar Typhimurium str. DT104

SEQ ID NO: 68665 - protein, 553 aa, Salmonella enterica; identical to SEQ ID NO: 62985
  subsp. enterica serovar Typhimurium str. DT104

SEQ ID NO: 68666 - protein, 641 aa, Salmonella enterica; identical to SEQ ID NO: 62984
  subsp. enterica serovar Typhimurium str. DT104

SEQ ID NO: 68667 - protein, 553 aa, Salmonella enterica; identical to SEQ ID NO: 62985
  subsp. enterica serovar Typhimurium str. DT104

SEQ ID NO: 68668 - protein, 641 aa, Salmonella enterica; identical to SEQ ID NO: 62984
  subsp. enterica serovar Typhimurium str. DT104

SEQ ID NO: 68669 - protein, 553 aa, Salmonella enterica; identical to SEQ ID NO: 62985
  subsp. enterica serovar Typhimurium str. DT104

SEQ ID NO: 68670 - protein, 641 aa, Salmonella enterica; identical to SEQ ID NO: 62984
  subsp. enterica serovar Typhimurium str. DT104

SEQ ID NO: 68671 - protein, 553 aa, Salmonella enterica; identical to SEQ ID NO: 62985
  subsp. enterica serovar Typhimurium str. DT104

SEQ ID NO: 68672 - protein, 641 aa, Salmonella enterica; identical to SEQ ID NO: 62984
  subsp. enterica serovar Typhimurium str. DT104

SEQ ID NO: 68673 - protein, 553 aa, Salmonella enterica; identical to SEQ ID NO: 62985
  subsp. enterica serovar Typhimurium str. DT104

SEQ ID NO: 68674 - protein, 641 aa, Salmonella enterica; identical to SEQ ID NO: 62984
  subsp. enterica serovar Typhimurium str. DT104

SEQ ID NO: 68675 - protein, 553 aa, Salmonella enterica; identical to SEQ ID NO: 62985
  subsp. enterica serovar Typhimurium str. DT104

SEQ ID NO: 68676 - protein, 641 aa, Salmonella enterica; identical to SEQ ID NO: 62984
  subsp. enterica serovar Typhimurium str. DT104

SEQ ID NO: 68677 - protein, 553 aa, Salmonella enterica; identical to SEQ ID NO: 62985
  subsp. enterica serovar Typhimurium str. DT104

SEQ ID NO: 68678 - protein, 641 aa, Salmonella enterica; identical to SEQ ID NO: 62984
  subsp. enterica serovar Typhimurium str. DT104

SEQ ID NO: 68679 - protein, 553 aa, Salmonella enterica; identical to SEQ ID NO: 62985
  subsp. enterica serovar Typhimurium str. DT104

SEQ ID NO: 68680 - protein, 641 aa, Salmonella enterica; identical to SEQ ID NO: 62984
  subsp. enterica serovar Typhimurium str. DT104

SEQ ID NO: 68681 - protein, 553 aa, Salmonella enterica; identical to SEQ ID NO: 62985
  subsp. enterica serovar Typhimurium str. DT104

SEQ ID NO: 68682 - protein, 641 aa, Salmonella enterica; identical to SEQ ID NO: 62984
  subsp. enterica serovar Typhimurium str. DT104

SEQ ID NO: 68683 - protein, 553 aa, Salmonella enterica; identical to SEQ ID NO: 62985
  subsp. enterica serovar Typhimurium str. DT104

SEQ ID NO: 68684 - protein, 641 aa, Salmonella enterica; identical to SEQ ID NO: 62984
  subsp. enterica serovar Typhimurium str. DT104

SEQ ID NO: 68685 - protein, 553 aa, Salmonella enterica; identical to SEQ ID NO: 62985
  subsp. enterica serovar Typhimurium str. DT104

SEQ ID NO: 68686 - protein, 641 aa, Salmonella enterica; identical to SEQ ID NO: 62984
  subsp. enterica serovar Typhimurium str. DT104

SEQ ID NO: 68687 - protein, 553 aa, Salmonella enterica; identical to SEQ ID NO: 62985
  subsp. enterica serovar Typhimurium str. DT104

SEQ ID NO: 68688 - protein, 641 aa, Salmonella enterica; identical to SEQ ID NO: 62984
  subsp. enterica serovar Typhimurium str. DT104

SEQ ID NO: 68689 - protein, 553 aa, Salmonella enterica; identical to SEQ ID NO: 62985
  subsp. enterica serovar Typhimurium str. DT104

SEQ ID NO: 68690 - protein, 641 aa, Salmonella enterica; identical to SEQ ID NO: 62984
  subsp. enterica serovar Typhimurium str. DT104

SEQ ID NO: 68691 - protein, 553 aa, Salmonella enterica; identical to SEQ ID NO: 62985
  subsp. enterica serovar Typhimurium str. DT104

SEQ ID NO: 68692 - protein, 641 aa, Salmonella enterica; identical to SEQ ID NO: 62984
  subsp. enterica serovar Typhimurium str. DT104

SEQ ID NO: 68693 - protein, 553 aa, Salmonella enterica; identical to SEQ ID NO: 62985
  subsp. enterica serovar Typhimurium str. DT104

SEQ ID NO: 68694 - protein, 641 aa, Salmonella enterica; identical to SEQ ID NO: 62984
  subsp. enterica serovar Typhimurium str. DT104

SEQ ID NO: 68695 - protein, 553 aa, Salmonella enterica; identical to SEQ ID NO: 62985
  subsp. enterica serovar Typhimurium str. DT104

SEQ ID NO: 68696 - protein, 641 aa, Salmonella enterica; identical to SEQ ID NO: 62984
  subsp. enterica serovar Typhimurium str. DT104

SEQ ID NO: 68697 - protein, 553 aa, Salmonella enterica; identical to SEQ ID NO: 62985
  subsp. enterica serovar Typhimurium str. DT104

SEQ ID NO: 68698 - protein, 659 aa, Yersinia pseudotuberculosis; identical to SEQ ID NO: 67438

SEQ ID NO: 68699 - protein, 615 aa, Yersinia pseudotuberculosis
MPIIKDDNWVLKDIQEVEDEAMRVIRNSTNHNLVLAGPGAGKTELLAQKACFLIETGKCRNKKIIALSFKKDAAKNLQDRVNSRLDSKYRHKFESTTFDAFCKSIVDRFKSTLPVAYRPSDDYEIYFPENKKFVEEVKRDAVGFEGLTAEELKKLKHTNFENNYIVMPYKKGEEHSVDARIKRFVWFRLLEGKSRVSFKMINFLSNYIIRNNKFLSNAINSTYEYAFIDEFQDTTYQQYEIFKSIFLDKKIKITAVGDTKQRIMGWAGALHSAFEFFKNDFAIEHHNELLSNRRSLKNLISYQRMMEAFMNHADNKPEMELIENEGSAKLIQFDESNIEGAYIALCIQKWIEEGVDEREICILFRNPSKHYTDKIISSLQYLEIKCRIENTYQELLNEAIVQLILKMLMFTCDKKSIEGWNSTMELLCNIRGVNKSRDITRLEKELSRFIKSNKDINGNVVDYIYGLISIFGIDEIKSYFPQYISGNGLDHAINSLSQNLETLGIKDNKSAAIDMLLGNKTIPLMTIHKSKGLEFKKVIIVGLEPGAYFGDEEEQIENQKTVFMGFSRAIEEVILTRCAKRVNWWDELCSQNFSEIPLITDMLSYCGLEAEIYKD

SEQ ID NO: 68700 - protein, 764 aa, Yersinia mollaretii
MYIQHVEISNFRKLLSVRIDFANETTLLVGANNSGKSSAMLALRRFLVSKASAFRLQDLTLCHLAKLDEIGKVWENAPKNFEIPTAKDWADWLPSLDIWVSADQGEFHYIRDLIPNFAWRGGLVGMRFLLEPDDMNTLYTDYRKERTRVVELEDALEKEEPPGSPLKLWPQSLHDYLSRRLGDKFKIRWYRLDPQQLKKPDKSTRMAQMQQLSPTALPLESNPLSRLIRVHEINAQRGFADHSDDNQGDNTRPSGTRKLSEQLRSYYSRHLDPGDSPDVSDLEALRAIEAAQSAFDTKLGSSFELAIREVEGLGYPGRNDPRIKVASRLATTDGMNHEAAVLFELDSIQGAPGAPPLHLPETANGLGYQNLISMIFQLMGFRDEWLRKTRAASTEVIDRVEPIHLVLIEEPEAHLHVQVQQVFVRHAYQVLCRDALLERYPNLKTQLLVSTHSSHVTHEVEYQNLRYFRRLPAGMYGIGVPVSTVSNLSNVFGEGTKTKEFVTRYLRAQHADIFFADAVILVEGSAERMMLPHFLRNKFPFLDRCYITTLDIGGSHAHRLRPLIDALGILTLVITDLDAGLNKAAKPVQRNTNQITNNPTLRSWMKLMHLGSTVDELLELPAHQKEHQIDDLYSVRIAYQTPISTLLPATGEAIQALPNTFEDSFVLSNAGHFAEKTNGTGLMKAFVKVLTEAQTSEAVGEGFFNELREGKKAEFVLLVLGDKNFPSLEIPEYIIEGLNWLESKLRSKQKELLVIPPEGAEVTP

SEQ ID NO: 68701 - protein, 615 aa, Yersinia mollaretii
MNEAAVADADTIMQACLNLADPKSFFLYAGAGSGKTHSLVEAIRELKSRERERLTFEGRCIAVITYTNAACEEILRRLEFDPLVEVSTIHAFAWRLIQGFDNEIREWLRIKLAQDIEKIEGELARSRGDNKTSRANRRKLQSKIRRLETLDEITKFIYSPTSNNRERQALNHDEVIKLSAAFAPERPLLDVLVDRYPVVLIDESQDTHAPVMEAFLKVQQLAQTRFCLGLLGDTMQQIYGHGVTRLDKAIPGDWRKPEKIVNRRCPRRVVDLINVIRSAVDTHQQTPKPDAIQGVVRMYCINQNQEQAPNLEEGIAHSMAAITDDGEWATGPKGRKTLILEHKMAGRRMGFEKLFTSLHAVEHLQTGLLDGTLPALRIFSEGVLPILTAKDDHFLLLEAVRSRSSLLSKDAMQSTGDQSAHMQRVEDATHALLSLFEGNDPTLSEVATLLLQTQLLDVPENLVGAMVLGAPGEAPDPEDTNAITNYAYQLFLERPFSELAAFATYTDGLSPYGTHQGVKGLEYPRVMVVINDDEADGFLFSYDKLLGVKEPTKTDRDNERDGKDNALARTRRLLYVTCSRAENSLAIVVYTPQPALAKRNVVAAGWLQENEVEIL

SEQ ID NO: 68702 - protein, 641 aa, Salmonella enterica; identical to SEQ ID NO: 62984
  subsp. enterica serovar Typhimurium str. DT104

SEQ ID NO: 68703 - protein, 553 aa, Salmonella enterica; identical to SEQ ID NO: 62985
  subsp. enterica serovar Typhimurium str. DT104

SEQ ID NO: 68704 - protein, 641 aa, Salmonella enterica; identical to SEQ ID NO: 62984
  subsp. enterica serovar Typhimurium str. DT104

SEQ ID NO: 68705 - protein, 553 aa, Salmonella enterica; identical to SEQ ID NO: 62985
  subsp. enterica serovar Typhimurium str. DT104

SEQ ID NO: 68706 - protein, 641 aa, Salmonella enterica; identical to SEQ ID NO: 62984
  subsp. enterica serovar Typhimurium str. DT104

SEQ ID NO: 68707 - protein, 553 aa, Salmonella enterica; identical to SEQ ID NO: 62985
  subsp. enterica serovar Typhimurium str. DT104

SEQ ID NO: 68708 - protein, 641 aa, Salmonella enterica; identical to SEQ ID NO: 62984
  subsp. enterica serovar Typhimurium str. DT104

SEQ ID NO: 68709 - protein, 553 aa, Salmonella enterica; identical to SEQ ID NO: 62985
  subsp. enterica serovar Typhimurium str. DT104

SEQ ID NO: 68710 - protein, 641 aa, Salmonella enterica; identical to SEQ ID NO: 62984
  subsp. enterica serovar Typhimurium str. DT104

SEQ ID NO: 68711 - protein, 553 aa, Salmonella enterica; identical to SEQ ID NO: 62985
  subsp. enterica serovar Typhimurium str. DT104

SEQ ID NO: 68712 - protein, 641 aa, Salmonella enterica; identical to SEQ ID NO: 62984
  subsp. enterica serovar Typhimurium str. DT104

SEQ ID NO: 68713 - protein, 553 aa, Salmonella enterica; identical to SEQ ID NO: 62985
  subsp. enterica serovar Typhimurium str. DT104

SEQ ID NO: 68714 - protein, 641 aa, Salmonella enterica; identical to SEQ ID NO: 62984
  subsp. enterica serovar Typhimurium str. DT104

SEQ ID NO: 68715 - protein, 553 aa, Salmonella enterica; identical to SEQ ID NO: 62985
  subsp. enterica serovar Typhimurium str. DT104

SEQ ID NO: 68716 - protein, 641 aa, Salmonella enterica; identical to SEQ ID NO: 62984
  subsp. enterica serovar Typhimurium str. DT104

SEQ ID NO: 68717 - protein, 553 aa, Salmonella enterica; identical to SEQ ID NO: 62985
  subsp. enterica serovar Typhimurium str. DT104

SEQ ID NO: 68718 - protein, 641 aa, Salmonella enterica; identical to SEQ ID NO: 62984
  subsp. enterica serovar Typhimurium str. DT104

SEQ ID NO: 68719 - protein, 553 aa, Salmonella enterica; identical to SEQ ID NO: 62985
  subsp. enterica serovar Typhimurium str. DT104

SEQ ID NO: 68720 - protein, 641 aa, Salmonella enterica; identical to SEQ ID NO: 62984
  subsp. enterica serovar Typhimurium str. DT104

SEQ ID NO: 68721 - protein, 553 aa, Salmonella enterica; identical to SEQ ID NO: 62985
  subsp. enterica serovar Typhimurium str. DT104

SEQ ID NO: 68722 - protein, 641 aa, Salmonella enterica; identical to SEQ ID NO: 62984
  subsp. enterica serovar Typhimurium str. DT104

SEQ ID NO: 68723 - protein, 553 aa, Salmonella enterica; identical to SEQ ID NO: 62985
  subsp. enterica serovar Typhimurium str. DT104

SEQ ID NO: 68724 - protein, 641 aa, Salmonella enterica; identical to SEQ ID NO: 62984
  subsp. enterica serovar Typhimurium str. DT104

SEQ ID NO: 68725 - protein, 553 aa, Salmonella enterica; identical to SEQ ID NO: 62985
  subsp. enterica serovar Typhimurium str. DT104

SEQ ID NO: 68726 - protein, 641 aa, Salmonella enterica; identical to SEQ ID NO: 62984
  subsp. enterica serovar Typhimurium str. DT104

SEQ ID NO: 68727 - protein, 553 aa, Salmonella enterica; identical to SEQ ID NO: 62985
  subsp. enterica serovar Typhimurium str. DT104

SEQ ID NO: 68728 - protein, 641 aa, Salmonella enterica; identical to SEQ ID NO: 62984
  subsp. enterica serovar Typhimurium str. DT104

SEQ ID NO: 68729 - protein, 553 aa, Salmonella enterica; identical to SEQ ID NO: 62985
  subsp. enterica serovar Typhimurium str. DT104

SEQ ID NO: 68730 - protein, 641 aa, Salmonella enterica; identical to SEQ ID NO: 62984
  subsp. enterica serovar Typhimurium str. DT104

SEQ ID NO: 68731 - protein, 553 aa, Salmonella enterica; identical to SEQ ID NO: 62985
  subsp. enterica serovar Typhimurium str. DT104

SEQ ID NO: 68732 - protein, 641 aa, Salmonella enterica; identical to SEQ ID NO: 62984
  subsp. enterica serovar Typhimurium str. DT104

SEQ ID NO: 68733 - protein, 553 aa, Salmonella enterica; identical to SEQ ID NO: 62985
  subsp. enterica serovar Typhimurium str. DT104

SEQ ID NO: 68734 - protein, 641 aa, Salmonella enterica; identical to SEQ ID NO: 62984
  subsp. enterica serovar Typhimurium str. DT104

SEQ ID NO: 68735 - protein, 553 aa, Salmonella enterica; identical to SEQ ID NO: 62985
  subsp. enterica serovar Typhimurium str. DT104

SEQ ID NO: 68736 - protein, 641 aa, Salmonella enterica; identical to SEQ ID NO: 62984
  subsp. enterica serovar Typhimurium str. DT104

SEQ ID NO: 68737 - protein, 553 aa, Salmonella enterica; identical to SEQ ID NO: 62985
  subsp. enterica serovar Typhimurium str. DT104

SEQ ID NO: 68738 - protein, 641 aa, Salmonella enterica; identical to SEQ ID NO: 62984
  subsp. enterica serovar Typhimurium str. DT104

SEQ ID NO: 68739 - protein, 553 aa, Salmonella enterica; identical to SEQ ID NO: 62985
  subsp. enterica serovar Typhimurium str. DT104

SEQ ID NO: 68740 - protein, 641 aa, Salmonella enterica; identical to SEQ ID NO: 62984
  subsp. enterica serovar Typhimurium str. DT104

SEQ ID NO: 68741 - protein, 553 aa, Salmonella enterica; identical to SEQ ID NO: 62985
  subsp. enterica serovar Typhimurium str. DT104

SEQ ID NO: 68742 - protein, 641 aa, Salmonella enterica; identical to SEQ ID NO: 62984
  subsp. enterica serovar Typhimurium str. DT104

SEQ ID NO: 68743 - protein, 553 aa, Salmonella enterica; identical to SEQ ID NO: 62985
  subsp. enterica serovar Typhimurium str. DT104

SEQ ID NO: 68744 - protein, 641 aa, Salmonella enterica; identical to SEQ ID NO: 62984
  subsp. enterica serovar Typhimurium str. DT104

SEQ ID NO: 68745 - protein, 553 aa, Salmonella enterica; identical to SEQ ID NO: 62985
  subsp. enterica serovar Typhimurium str. DT104

SEQ ID NO: 68746 - protein, 641 aa, Salmonella enterica; identical to SEQ ID NO: 62984
  subsp. enterica serovar Typhimurium str. DT104

SEQ ID NO: 68747 - protein, 553 aa, Salmonella enterica; identical to SEQ ID NO: 62985
  subsp. enterica serovar Typhimurium str. DT104

SEQ ID NO: 68748 - protein, 641 aa, Salmonella enterica; identical to SEQ ID NO: 62984
  subsp. enterica serovar Typhimurium str. DT104

SEQ ID NO: 68749 - protein, 553 aa, Salmonella enterica; identical to SEQ ID NO: 62985
  subsp. enterica serovar Typhimurium str. DT104

SEQ ID NO: 68750 - protein, 641 aa, Salmonella enterica; identical to SEQ ID NO: 62984
  subsp. enterica serovar Typhimurium str. DT104

SEQ ID NO: 68751 - protein, 553 aa, Salmonella enterica; identical to SEQ ID NO: 62985
  subsp. enterica serovar Typhimurium str. DT104

SEQ ID NO: 68752 - protein, 584 aa, Streptococcus agalactiae; identical to SEQ ID NO: 63244

SEQ ID NO: 68753 - protein, 513 aa, Streptococcus agalactiae; identical to SEQ ID NO: 63597

SEQ ID NO: 68754 - protein, 641 aa, Salmonella enterica; identical to SEQ ID NO: 62984
  subsp. enterica serovar Typhimurium str. DT104

SEQ ID NO: 68755 - protein, 553 aa, Salmonella enterica; identical to SEQ ID NO: 62985
  subsp. enterica serovar Typhimurium str. DT104

SEQ ID NO: 68756 - protein, 641 aa, Salmonella enterica; identical to SEQ ID NO: 62984
  subsp. enterica serovar Typhimurium str. DT104

SEQ ID NO: 68757 - protein, 553 aa, Salmonella enterica; identical to SEQ ID NO: 62985
  subsp. enterica serovar Typhimurium str. DT104

SEQ ID NO: 68758 - protein, 641 aa, Salmonella enterica; identical to SEQ ID NO: 62984
  subsp. enterica serovar Typhimurium str. DT104

SEQ ID NO: 68759 - protein, 553 aa, Salmonella enterica; identical to SEQ ID NO: 62985
  subsp. enterica serovar Typhimurium str. DT104

SEQ ID NO: 68760 - protein, 641 aa, Salmonella enterica; identical to SEQ ID NO: 62984
  subsp. enterica serovar Typhimurium str. DT104

SEQ ID NO: 68761 - protein, 553 aa, Salmonella enterica; identical to SEQ ID NO: 62985
  subsp. enterica serovar Typhimurium str. DT104

SEQ ID NO: 68762 - protein, 641 aa, Salmonella enterica; identical to SEQ ID NO: 62984
  subsp. enterica serovar Typhimurium str. DT104

SEQ ID NO: 68763 - protein, 553 aa, Salmonella enterica; identical to SEQ ID NO: 62985
  subsp. enterica serovar Typhimurium str. DT104

SEQ ID NO: 68764 - protein, 641 aa, Salmonella enterica; identical to SEQ ID NO: 62984
  subsp. enterica serovar Typhimurium str. DT104

SEQ ID NO: 68765 - protein, 553 aa, Salmonella enterica; identical to SEQ ID NO: 62985
  subsp. enterica serovar Typhimurium str. DT104

SEQ ID NO: 68766 - protein, 641 aa, Salmonella enterica; identical to SEQ ID NO: 62984
  subsp. enterica serovar Typhimurium str. DT104

SEQ ID NO: 68767 - protein, 553 aa, Salmonella enterica; identical to SEQ ID NO: 62985
  subsp. enterica serovar Typhimurium str. DT104

SEQ ID NO: 68768 - protein, 641 aa, Salmonella enterica; identical to SEQ ID NO: 62984
  subsp. enterica serovar Typhimurium str. DT104

SEQ ID NO: 68769 - protein, 553 aa, Salmonella enterica; identical to SEQ ID NO: 62985
  subsp. enterica serovar Typhimurium str. DT104

SEQ ID NO: 68770 - protein, 641 aa, Salmonella enterica; identical to SEQ ID NO: 62984
  subsp. enterica serovar Typhimurium str. DT104

SEQ ID NO: 68771 - protein, 553 aa, Salmonella enterica; identical to SEQ ID NO: 62985
  subsp. enterica serovar Typhimurium str. DT104

SEQ ID NO: 68772 - protein, 641 aa, Salmonella enterica; identical to SEQ ID NO: 62984
  subsp. enterica serovar Typhimurium str. DT104

SEQ ID NO: 68773 - protein, 553 aa, Salmonella enterica; identical to SEQ ID NO: 62985
  subsp. enterica serovar Typhimurium str. DT104

SEQ ID NO: 68774 - protein, 641 aa, Salmonella enterica; identical to SEQ ID NO: 62984
  subsp. enterica serovar Typhimurium str. DT104

SEQ ID NO: 68775 - protein, 553 aa, Salmonella enterica; identical to SEQ ID NO: 62985
  subsp. enterica serovar Typhimurium str. DT104

SEQ ID NO: 68776 - protein, 641 aa, Salmonella enterica; identical to SEQ ID NO: 62984
  subsp. enterica serovar Typhimurium str. DT104

SEQ ID NO: 68777 - protein, 553 aa, Salmonella enterica; identical to SEQ ID NO: 62985
  subsp. enterica serovar Typhimurium str. DT104

SEQ ID NO: 68778 - protein, 641 aa, Salmonella enterica; identical to SEQ ID NO: 62984
  subsp. enterica serovar Typhimurium str. DT104

SEQ ID NO: 68779 - protein, 553 aa, Salmonella enterica; identical to SEQ ID NO: 62985
  subsp. enterica serovar Typhimurium str. DT104

SEQ ID NO: 68780 - protein, 641 aa, Salmonella enterica; identical to SEQ ID NO: 62984
  subsp. enterica serovar Typhimurium str. DT104

SEQ ID NO: 68781 - protein, 553 aa, Salmonella enterica; identical to SEQ ID NO: 62985
  subsp. enterica serovar Typhimurium str. DT104

SEQ ID NO: 68782 - protein, 641 aa, Salmonella enterica; identical to SEQ ID NO: 62984
  subsp. enterica serovar Typhimurium str. DT104

SEQ ID NO: 68783 - protein, 553 aa, Salmonella enterica; identical to SEQ ID NO: 62985
  subsp. enterica serovar Typhimurium str. DT104

SEQ ID NO: 68784 - protein, 641 aa, Salmonella enterica; identical to SEQ ID NO: 62984
  subsp. enterica serovar Typhimurium str. DT104

SEQ ID NO: 68785 - protein, 553 aa, Salmonella enterica; identical to SEQ ID NO: 62985
  subsp. enterica serovar Typhimurium str. DT104

SEQ ID NO: 68786 - protein, 641 aa, Salmonella enterica; identical to SEQ ID NO: 62984
  subsp. enterica serovar Typhimurium str. DT104

SEQ ID NO: 68787 - protein, 553 aa, Salmonella enterica; identical to SEQ ID NO: 62985
  subsp. enterica serovar Typhimurium str. DT104

SEQ ID NO: 68788 - protein, 641 aa, Salmonella enterica; identical to SEQ ID NO: 62984
  subsp. enterica serovar Typhimurium str. DT104

SEQ ID NO: 68789 - protein, 553 aa, Salmonella enterica; identical to SEQ ID NO: 62985
  subsp. enterica serovar Typhimurium str. DT104

SEQ ID NO: 68790 - protein, 641 aa, Salmonella enterica; identical to SEQ ID NO: 62984
  subsp. enterica serovar Typhimurium str. DT104

SEQ ID NO: 68791 - protein, 553 aa, Salmonella enterica; identical to SEQ ID NO: 62985
  subsp. enterica serovar Typhimurium str. DT104

SEQ ID NO: 68792 - protein, 641 aa, Salmonella enterica; identical to SEQ ID NO: 62984
  subsp. enterica serovar Typhimurium str. DT104

SEQ ID NO: 68793 - protein, 553 aa, Salmonella enterica; identical to SEQ ID NO: 62985
  subsp. enterica serovar Typhimurium str. DT104

SEQ ID NO: 68794 - protein, 641 aa, Salmonella enterica; identical to SEQ ID NO: 62984
  subsp. enterica serovar Typhimurium str. DT104

SEQ ID NO: 68795 - protein, 553 aa, Salmonella enterica; identical to SEQ ID NO: 62985
  subsp. enterica serovar Typhimurium str. DT104

SEQ ID NO: 68796 - protein, 641 aa, Salmonella enterica; identical to SEQ ID NO: 62984
  subsp. enterica serovar Typhimurium str. DT104

SEQ ID NO: 68797 - protein, 553 aa, Salmonella enterica; identical to SEQ ID NO: 62985
  subsp. enterica serovar Typhimurium str. DT104

SEQ ID NO: 68798 - protein, 641 aa, Salmonella enterica; identical to SEQ ID NO: 62984
  subsp. enterica serovar Typhimurium str. DT104

SEQ ID NO: 68799 - protein, 553 aa, Salmonella enterica; identical to SEQ ID NO: 62985
  subsp. enterica serovar Typhimurium str. DT104

SEQ ID NO: 68800 - protein, 641 aa, Salmonella enterica; identical to SEQ ID NO: 62984
  subsp. enterica serovar Typhimurium str. DT104

SEQ ID NO: 68801 - protein, 553 aa, Salmonella enterica; identical to SEQ ID NO: 62985
  subsp. enterica serovar Typhimurium str. DT104

SEQ ID NO: 68802 - protein, 641 aa, Salmonella enterica; identical to SEQ ID NO: 62984
  subsp. enterica serovar Typhimurium str. DT104

SEQ ID NO: 68803 - protein, 553 aa, Salmonella enterica; identical to SEQ ID NO: 62985
  subsp. enterica serovar Typhimurium str. DT104

SEQ ID NO: 68804 - protein, 641 aa, Salmonella enterica; identical to SEQ ID NO: 62984
  subsp. enterica serovar Typhimurium str. DT104

SEQ ID NO: 68805 - protein, 553 aa, Salmonella enterica; identical to SEQ ID NO: 62985
  subsp. enterica serovar Typhimurium str. DT104

SEQ ID NO: 68806 - protein, 641 aa, Salmonella enterica; identical to SEQ ID NO: 62984
  subsp. enterica serovar Typhimurium str. DT104

SEQ ID NO: 68807 - protein, 553 aa, Salmonella enterica; identical to SEQ ID NO: 62985
  subsp. enterica serovar Typhimurium str. DT104

SEQ ID NO: 68808 - protein, 641 aa, Salmonella enterica; identical to SEQ ID NO: 62984
  subsp. enterica serovar Typhimurium str. DT104

SEQ ID NO: 68809 - protein, 553 aa, Salmonella enterica; identical to SEQ ID NO: 62985
  subsp. enterica serovar Typhimurium str. DT104

SEQ ID NO: 68810 - protein, 641 aa, Salmonella enterica; identical to SEQ ID NO: 62984
  subsp. enterica serovar Typhimurium str. DT104

SEQ ID NO: 68811 - protein, 553 aa, Salmonella enterica; identical to SEQ ID NO: 62985
  subsp. enterica serovar Typhimurium str. DT104

SEQ ID NO: 68812 - protein, 641 aa, Salmonella enterica; identical to SEQ ID NO: 62984
  subsp. enterica serovar Typhimurium str. DT104

SEQ ID NO: 68813 - protein, 553 aa, Salmonella enterica; identical to SEQ ID NO: 62985
  subsp. enterica serovar Typhimurium str. DT104

SEQ ID NO: 68814 - protein, 641 aa, Salmonella enterica; identical to SEQ ID NO: 62984
  subsp. enterica serovar Typhimurium str. DT104

SEQ ID NO: 68815 - protein, 553 aa, Salmonella enterica; identical to SEQ ID NO: 62985
  subsp. enterica serovar Typhimurium str. DT104

SEQ ID NO: 68816 - protein, 769 aa, Yersinia enterocolitica; identical to SEQ ID NO: 68464

SEQ ID NO: 68817 - protein, 651 aa, Yersinia enterocolitica; identical to SEQ ID NO: 68465

SEQ ID NO: 68818 - protein, 641 aa, Salmonella enterica; identical to SEQ ID NO: 62984
  subsp. enterica serovar Typhimurium str. DT104

SEQ ID NO: 68819 - protein, 553 aa, Salmonella enterica; identical to SEQ ID NO: 62985
  subsp. enterica serovar Typhimurium str. DT104

SEQ ID NO: 68820 - protein, 641 aa, Salmonella enterica; identical to SEQ ID NO: 62984
  subsp. enterica serovar Typhimurium str. DT104

SEQ ID NO: 68821 - protein, 553 aa, Salmonella enterica; identical to SEQ ID NO: 62985
  subsp. enterica serovar Typhimurium str. DT104

SEQ ID NO: 68822 - protein, 641 aa, Salmonella enterica; identical to SEQ ID NO: 62984
  subsp. enterica serovar Typhimurium str. DT104

SEQ ID NO: 68823 - protein, 553 aa, Salmonella enterica; identical to SEQ ID NO: 62985
  subsp. enterica serovar Typhimurium str. DT104

SEQ ID NO: 68824 - protein, 519 aa, Salmonella enterica
  subsp. enterica serovar Typhimurium str. DT104
MGLDGDIDEAFVYVLEVGPDGSPINPETVPRSDRNHIQVHYLPARRDPTDHIAYGTSALLGRLLRAVNWENEREKVKGFTDQISESLAANSSVNAFSSHLKKIWGTLHKGSYFTDPKITFVASEIEALLRHLSVSFSPGHDDNLVDFSRLSDGQKSMLYLSLVLSSQAVGRAVLAGEDDSFDPEKLRPPVFTLIALEEPENSLSPHYLGRIVNALNSMTSNEDAQALVATHAPSMLRRVDPEHIRYLRLTETRQSRIKKIQLPAKTDEAHKFVREAVQAFPEIYFSRLIVLGEGDSEEIVLPRLFQAKGAPVDESAVTIAPLGGRHVNHFWRLLSELQIPFLTLLDLDVGRYQAGWGRIKYVNNQLGLYQPEKVLPTTFSLSDWNDDKVPVRTHHFFENGTKSVFLELETRGVFFSFPMDLDFSMLLAFPNAYGVQQEVSDESTIKAVLGKSHHGSYQYSGDELNLFSTYHKLFKLGSKPAAHIDALAQLSNEELLANMPGSFGRLADAVIAKLAELPE

SEQ ID NO: 68825 - protein, 553 aa, Salmonella enterica; identical to SEQ ID NO: 62985
  subsp. enterica serovar Typhimurium str. DT104

SEQ ID NO: 68826 - protein, 641 aa, Salmonella enterica; identical to SEQ ID NO: 62984
  subsp. enterica serovar Typhimurium str. DT104

SEQ ID NO: 68827 - protein, 553 aa, Salmonella enterica; identical to SEQ ID NO: 62985
  subsp. enterica serovar Typhimurium str. DT104

SEQ ID NO: 68828 - protein, 641 aa, Salmonella enterica; identical to SEQ ID NO: 62984
  subsp. enterica serovar Typhimurium str. DT104

SEQ ID NO: 68829 - protein, 553 aa, Salmonella enterica; identical to SEQ ID NO: 62985
  subsp. enterica serovar Typhimurium str. DT104

SEQ ID NO: 68830 - protein, 641 aa, Salmonella enterica; identical to SEQ ID NO: 62984
  subsp. enterica serovar Typhimurium str. DT104

SEQ ID NO: 68831 - protein, 553 aa, Salmonella enterica; identical to SEQ ID NO: 62985
  subsp. enterica serovar Typhimurium str. DT104

SEQ ID NO: 68832 - protein, 641 aa, Salmonella enterica; identical to SEQ ID NO: 62984
  subsp. enterica serovar Typhimurium str. DT104

SEQ ID NO: 68833 - protein, 553 aa, Salmonella enterica; identical to SEQ ID NO: 62985
  subsp. enterica serovar Typhimurium str. DT104

SEQ ID NO: 68834 - protein, 641 aa, Salmonella enterica; identical to SEQ ID NO: 62984
  subsp. enterica serovar Typhimurium str. DT104

SEQ ID NO: 68835 - protein, 553 aa, Salmonella enterica; identical to SEQ ID NO: 62985
  subsp. enterica serovar Typhimurium str. DT104

SEQ ID NO: 68836 - protein, 641 aa, Salmonella enterica; identical to SEQ ID NO: 62984
  subsp. enterica serovar Typhimurium str. DT104

SEQ ID NO: 68837 - protein, 553 aa, Salmonella enterica; identical to SEQ ID NO: 62985
  subsp. enterica serovar Typhimurium str. DT104

SEQ ID NO: 68838 - protein, 641 aa, Salmonella enterica; identical to SEQ ID NO: 62984
  subsp. enterica serovar Typhimurium str. DT104

SEQ ID NO: 68839 - protein, 553 aa, Salmonella enterica; identical to SEQ ID NO: 62985
  subsp. enterica serovar Typhimurium str. DT104

SEQ ID NO: 68840 - protein, 641 aa, Salmonella enterica; identical to SEQ ID NO: 62984
  subsp. enterica serovar Typhimurium str. DT104

SEQ ID NO: 68841 - protein, 553 aa, Salmonella enterica; identical to SEQ ID NO: 62985
  subsp. enterica serovar Typhimurium str. DT104

SEQ ID NO: 68842 - protein, 641 aa, Salmonella enterica; identical to SEQ ID NO: 62984
  subsp. enterica serovar Typhimurium str. DT104

SEQ ID NO: 68843 - protein, 553 aa, Salmonella enterica; identical to SEQ ID NO: 62985
  subsp. enterica serovar Typhimurium str. DT104

SEQ ID NO: 68844 - protein, 641 aa, Salmonella enterica; identical to SEQ ID NO: 62984
  subsp. enterica serovar Typhimurium str. DT104

SEQ ID NO: 68845 - protein, 553 aa, Salmonella enterica; identical to SEQ ID NO: 62985
  subsp. enterica serovar Typhimurium str. DT104

SEQ ID NO: 68846 - protein, 641 aa, Salmonella enterica; identical to SEQ ID NO: 62984
  subsp. enterica serovar Typhimurium str. DT104

SEQ ID NO: 68847 - protein, 553 aa, Salmonella enterica; identical to SEQ ID NO: 62985
  subsp. enterica serovar Typhimurium str. DT104

SEQ ID NO: 68848 - protein, 641 aa, Salmonella enterica; identical to SEQ ID NO: 62984
  subsp. enterica serovar Typhimurium str. DT104

SEQ ID NO: 68849 - protein, 553 aa, Salmonella enterica; identical to SEQ ID NO: 62985
  subsp. enterica serovar Typhimurium str. DT104

SEQ ID NO: 68850 - protein, 641 aa, Salmonella enterica; identical to SEQ ID NO: 62984
  subsp. enterica serovar Typhimurium str. DT104

SEQ ID NO: 68851 - protein, 553 aa, Salmonella enterica; identical to SEQ ID NO: 62985
  subsp. enterica serovar Typhimurium str. DT104

SEQ ID NO: 68852 - protein, 641 aa, Salmonella enterica; identical to SEQ ID NO: 62984
  subsp. enterica serovar Typhimurium str. DT104

SEQ ID NO: 68853 - protein, 553 aa, Salmonella enterica; identical to SEQ ID NO: 62985
  subsp. enterica serovar Typhimurium str. DT104

SEQ ID NO: 68854 - protein, 641 aa, Salmonella enterica; identical to SEQ ID NO: 62984
  subsp. enterica serovar Typhimurium str. DT104

SEQ ID NO: 68855 - protein, 553 aa, Salmonella enterica; identical to SEQ ID NO: 62985
  subsp. enterica serovar Typhimurium str. DT104

SEQ ID NO: 68856 - protein, 641 aa, Salmonella enterica; identical to SEQ ID NO: 62984
  subsp. enterica serovar Typhimurium str. DT104

SEQ ID NO: 68857 - protein, 553 aa, Salmonella enterica; identical to SEQ ID NO: 62985
  subsp. enterica serovar Typhimurium str. DT104

SEQ ID NO: 68858 - protein, 641 aa, Salmonella enterica; identical to SEQ ID NO: 62984
  subsp. enterica serovar Typhimurium str. DT104

SEQ ID NO: 68859 - protein, 553 aa, Salmonella enterica; identical to SEQ ID NO: 62985
  subsp. enterica serovar Typhimurium str. DT104

SEQ ID NO: 68860 - protein, 641 aa, Salmonella enterica; identical to SEQ ID NO: 62984
  subsp. enterica serovar Typhimurium str. DT104

SEQ ID NO: 68861 - protein, 553 aa, Salmonella enterica; identical to SEQ ID NO: 62985
  subsp. enterica serovar Typhimurium str. DT104

SEQ ID NO: 68862 - protein, 641 aa, Salmonella enterica; identical to SEQ ID NO: 62984
  subsp. enterica serovar Typhimurium str. DT104

SEQ ID NO: 68863 - protein, 553 aa, Salmonella enterica; identical to SEQ ID NO: 62985
  subsp. enterica serovar Typhimurium str. DT104

SEQ ID NO: 68864 - protein, 641 aa, Salmonella enterica; identical to SEQ ID NO: 62984
  subsp. enterica serovar Typhimurium str. DT104

SEQ ID NO: 68865 - protein, 553 aa, Salmonella enterica; identical to SEQ ID NO: 62985
  subsp. enterica serovar Typhimurium str. DT104

SEQ ID NO: 68866 - protein, 641 aa, Salmonella enterica; identical to SEQ ID NO: 62984
  subsp. enterica serovar Typhimurium str. DT104

SEQ ID NO: 68867 - protein, 553 aa, Salmonella enterica; identical to SEQ ID NO: 62985
  subsp. enterica serovar Typhimurium str. DT104

SEQ ID NO: 68868 - protein, 641 aa, Salmonella enterica; identical to SEQ ID NO: 62984
  subsp. enterica serovar Typhimurium str. DT104

SEQ ID NO: 68869 - protein, 553 aa, Salmonella enterica; identical to SEQ ID NO: 62985
  subsp. enterica serovar Typhimurium str. DT104

SEQ ID NO: 68870 - protein, 641 aa, Salmonella enterica; identical to SEQ ID NO: 62984
  subsp. enterica serovar Typhimurium str. DT104

SEQ ID NO: 68871 - protein, 553 aa, Salmonella enterica; identical to SEQ ID NO: 62985
  subsp. enterica serovar Typhimurium str. DT104

SEQ ID NO: 68872 - protein, 641 aa, Salmonella enterica; identical to SEQ ID NO: 62984
  subsp. enterica serovar Typhimurium str. DT104

SEQ ID NO: 68873 - protein, 553 aa, Salmonella enterica; identical to SEQ ID NO: 62985
  subsp. enterica serovar Typhimurium str. DT104

SEQ ID NO: 68874 - protein, 641 aa, Salmonella enterica; identical to SEQ ID NO: 62984
  subsp. enterica serovar Typhimurium str. DT104

SEQ ID NO: 68875 - protein, 553 aa, Salmonella enterica; identical to SEQ ID NO: 62985
  subsp. enterica serovar Typhimurium str. DT104

SEQ ID NO: 68876 - protein, 641 aa, Salmonella enterica; identical to SEQ ID NO: 62984
  subsp. enterica serovar Typhimurium str. DT104

SEQ ID NO: 68877 - protein, 553 aa, Salmonella enterica; identical to SEQ ID NO: 62985
  subsp. enterica serovar Typhimurium str. DT104

SEQ ID NO: 68878 - protein, 641 aa, Salmonella enterica; identical to SEQ ID NO: 62984
  subsp. enterica serovar Typhimurium str. DT104

SEQ ID NO: 68879 - protein, 553 aa, Salmonella enterica; identical to SEQ ID NO: 62985
  subsp. enterica serovar Typhimurium str. DT104

SEQ ID NO: 68880 - protein, 641 aa, Salmonella enterica; identical to SEQ ID NO: 62984
  subsp. enterica serovar Typhimurium str. DT104

SEQ ID NO: 68881 - protein, 553 aa, Salmonella enterica; identical to SEQ ID NO: 62985
  subsp. enterica serovar Typhimurium str. DT104

SEQ ID NO: 68882 - protein, 641 aa, Salmonella enterica; identical to SEQ ID NO: 62984
  subsp. enterica serovar Typhimurium str. DT104

SEQ ID NO: 68883 - protein, 553 aa, Salmonella enterica; identical to SEQ ID NO: 62985
  subsp. enterica serovar Typhimurium str. DT104

SEQ ID NO: 68884 - protein, 641 aa, Salmonella enterica; identical to SEQ ID NO: 62984
  subsp. enterica serovar Typhimurium str. DT104

SEQ ID NO: 68885 - protein, 553 aa, Salmonella enterica; identical to SEQ ID NO: 62985
  subsp. enterica serovar Typhimurium str. DT104

SEQ ID NO: 68886 - protein, 641 aa, Salmonella enterica; identical to SEQ ID NO: 62984
  subsp. enterica serovar Typhimurium str. DT104

SEQ ID NO: 68887 - protein, 553 aa, Salmonella enterica; identical to SEQ ID NO: 62985
  subsp. enterica serovar Typhimurium str. DT104

SEQ ID NO: 68888 - protein, 641 aa, Salmonella enterica; identical to SEQ ID NO: 62984
  subsp. enterica serovar Typhimurium str. DT104

SEQ ID NO: 68889 - protein, 553 aa, Salmonella enterica; identical to SEQ ID NO: 62985
  subsp. enterica serovar Typhimurium str. DT104

SEQ ID NO: 68890 - protein, 641 aa, Salmonella enterica; identical to SEQ ID NO: 62984
  subsp. enterica serovar Typhimurium str. DT104

SEQ ID NO: 68891 - protein, 553 aa, Salmonella enterica; identical to SEQ ID NO: 62985
  subsp. enterica serovar Typhimurium str. DT104

SEQ ID NO: 68892 - protein, 641 aa, Salmonella enterica; identical to SEQ ID NO: 62984
  subsp. enterica serovar Typhimurium str. DT104

SEQ ID NO: 68893 - protein, 553 aa, Salmonella enterica; identical to SEQ ID NO: 62985
  subsp. enterica serovar Typhimurium str. DT104

SEQ ID NO: 68894 - protein, 641 aa, Salmonella enterica; identical to SEQ ID NO: 62984
  subsp. enterica serovar Typhimurium str. DT104

SEQ ID NO: 68895 - protein, 553 aa, Salmonella enterica; identical to SEQ ID NO: 62985
  subsp. enterica serovar Typhimurium str. DT104

SEQ ID NO: 68896 - protein, 641 aa, Salmonella enterica; identical to SEQ ID NO: 62984
  subsp. enterica serovar Typhimurium str. DT104

SEQ ID NO: 68897 - protein, 553 aa, Salmonella enterica; identical to SEQ ID NO: 62985
  subsp. enterica serovar Typhimurium str. DT104

SEQ ID NO: 68898 - protein, 641 aa, Salmonella enterica; identical to SEQ ID NO: 62984
  subsp. enterica serovar Typhimurium str. DT104

SEQ ID NO: 68899 - protein, 553 aa, Salmonella enterica; identical to SEQ ID NO: 62985
  subsp. enterica serovar Typhimurium str. DT104

SEQ ID NO: 68900 - protein, 641 aa, Salmonella enterica; identical to SEQ ID NO: 62984
  subsp. enterica serovar Typhimurium str. DT104

SEQ ID NO: 68901 - protein, 553 aa, Salmonella enterica; identical to SEQ ID NO: 62985
  subsp. enterica serovar Typhimurium str. DT104

SEQ ID NO: 68902 - protein, 641 aa, Salmonella enterica; identical to SEQ ID NO: 62984
  subsp. enterica serovar Typhimurium str. DT104

SEQ ID NO: 68903 - protein, 553 aa, Salmonella enterica; identical to SEQ ID NO: 62985
  subsp. enterica serovar Typhimurium str. DT104

SEQ ID NO: 68904 - protein, 641 aa, Salmonella enterica; identical to SEQ ID NO: 62984
  subsp. enterica serovar Typhimurium str. DT104

SEQ ID NO: 68905 - protein, 553 aa, Salmonella enterica; identical to SEQ ID NO: 62985
  subsp. enterica serovar Typhimurium str. DT104

SEQ ID NO: 68906 - protein, 641 aa, Salmonella enterica; identical to SEQ ID NO: 62984
  subsp. enterica serovar Typhimurium str. DT104

SEQ ID NO: 68907 - protein, 553 aa, Salmonella enterica; identical to SEQ ID NO: 62985
  subsp. enterica serovar Typhimurium str. DT104

SEQ ID NO: 68908 - protein, 755 aa, Xanthomonas arboricola pv. juglandis
MLITMVEIGNYRKLLAARISFAPDKTVLVGANNSGKTSAMTALRRFLVDTRGFTINDLSLAHWQALNAKGEAWETAIAADTELPAPGILEFLPQLDVWLQVKKGEMHYVQKLLPTLDWQAAPLGVRFRFEPEDAVKFQQEYIAARRKAADITIAAAKAAEGKEDPPQLELWPLNLIDFLERRLRTFFKVKAYLLDPAKVEEPTDGVARMQALSDDAEPIEGNPLDGLIQIDEISAQRGFGTTSDRMQREDAGADARSAGRLSTQLRSYYDRHLDWRDAPELTDIKAMEALEKARKAFDDRLSEAFDKALIELQKLGYPGISDPKLKIATKLKLQDGLSHESAILYEIPAAAGEHMHRLPEDSNGLGYQNLVSMVFNLMSYRDAWMRVGKAGTGHDVRPTPPLHLMLVEEPEAYLHAQVQQVFIRHAYDVLRNDPTLGKSLDFRTQLVVSTHSSHIAHACDFAALRYFRRLPPSEGRKTPTACVVNLSSVFGKPDQTAKFVSRYLKATHCDLFFADAAIFIEGSAERILVPHFVEQADLFEYLRTRYITWLEVGGSHAHRFKGLVDTLGLTTLIITDLDAKDPTSNQARTPALGKGLEARNETLRSWAPKQTDVDVLMRLDEKEKAIVYSNGYAVRSAYQTGEKLMLGAVDVEIHANTFEDALLYRNYDFFKARKATGLASKFQVIADTAQDSNQLTTAVAEAIKDGDKAEFALELLFSDDIEQLHLPAYIVHGLLWLNEQLKRKEADLAPKASAA

SEQ ID NO: 68909 - protein, 615 aa, Xanthomonas arboricola pv. juglandis
MISEAAAVPNDELDRHVDEEIKNCLDPRAPRSFFLFAGAGSGKTRSLVGALDHLRDTAGARLRIRGQKVAVITYTKAARDEIIRRTQFDPIIAVSTIHSFAWTLIEGFNHDIREWLRVSLQADIEDLQAKEAKGRAGTKTSAGRIADIASKTRRLARLDTTKTFIYSPDGDNRGRGSLNHAEVLHLAGDFLKSKPVLRHILRDGYPYILVDESQDTNRHIVEALFTFQAAHKDEVVVGLFGDLMQRIYGDGHPGLGENLPSDWATPTKRLNFRCPRRVIELINKIRESTDQQTQIPRSAAIEGHVRMYVLPSEGIDKVAAEKAICTHMAGLTADQEWLDEDAVKVLILEHRMAALRMGFDDLLAALYPVTQFRTSLLDGSLPVVNLFSNLILPLWDAKDDKFGTTRIMRAASPLLSPSALKHAQDQFEQLGRAQAAVDALIELLDSNPSVTFGEVLHNVAKTGIFAIPDMLNVALAAATAEANDAEDKQERSDRDKAIAEFLTTPFLQVRAYAKYVSGKARFDTHQGVKGLEFPRVMVVMDDHEARGFLFKYEKLFGGGADDSQTASTRRLFYVTCSRAQRSLALVAYASNPARVGDQLLITGWFKPEEVLIGLP

SEQ ID NO: 68910 - protein, 565 aa, Vibrio sp. J2-12
MYIKKVTINSYRSFRFFEAQLQKLTVVIGENDTGKTNFFTALSLPLSGNQIDFNQKRLSVSDINKDAVIDFLTSVVNGDTEENQLNKIPKVSVTVEFADPKDAYETALLAKWIVADGDEETYKIRYDFKPKDDKDLLEVVKKSLAGKTLDDINWFTLPVELYDYQVVSVNNEKPIAYSDLKHVSVHSINAERDDFSESSSMKSNSIFTKLLMNTLNDDDKGQINTAYSEFFSAIEKTETFDKVIGTNDDFENYDSIIKQLECTPNLPNLKNILSNITLKYGNEFLYQKGLGQRNLIYILILFAYYKSCGDTFNLCCIEEPEAHLSVNNLRLVRDFIEKSSSNSSSLVQTIISTHNPSIINKLKISNVLAFTGEKAISLADTPTKLVDYLRKRPNFDILKLLFANKVILVEGPTEEMLISTYLSKQPTLNDIDIIPIGQRGYATFLDIWLALNKDNQNKKIGVVRDYDNSDAAKKRHDAYDTAHANVTVRTTKHYTLEIDLVEAEDNLALLNGLFEMDGDLDAVSSHMINGKTARMLDVCDAMVDEEKPRDIKLPAHISEIIEALS

SEQ ID NO: 68911 - protein, 456 aa, Vibrio sp. J2-12
MIEVQIAGAGAGKTYGLAKTLIDHIKACTSHKKTFALTYTNSATAKIEQEIIKQHGFIPSNLCIQTVHSFLLNEIIYPFSSFTLGDVYNDTSIMISNPKYKNGLFARLRKMNVIHTDNVYNIAKQIVDETASKHSNKAKKVKVRRLLTILGSCFDKIFIDEVQDLDKDALRFFEVLGSNNIDVYMIGDPKQAIKFPQALDTFVNNVTPKEYANILPINNQTRRVPTEVLAVSNSFCYEDQQQESLSEVVGELMYIESTDGRYDELLTNYIDTKQLVCIDKKNGRYTTSSKHKHAFPREIEEMIRDSKHKKDKTLFVKAAFSDFMDDVINEDNKRAISKLITRHSLTLNKQHFAQLHELCNSCTKNDVQFKIQSIDSIKGLDADTCVIILSSNTLKYVTQNGIGKTNRFNKEWKRVYVALTRAKKRLVLALDHELLAKEDMAAVRDSIGELGFVNHN

SEQ ID NO: 68912 - protein, 567 aa, Vibrio sp. J2-15
MEISTLHLKGYRNFEDAVINFNSSTLVIGGNDIGKSNMLHALRILLDKTLSEADLEPSELDFHIGSEHVFKDVEITIFFNDVKEDAVLSILKGNVSDCGETVIRYTAHKQDLNYKIFIGQSIEDLQEIPSRFYLKYLNLKYIQSQRDLERVIGREKKQLLRIAQKMLTEAEVLDDETLASEISQDLSELNEKISKLKYVSSATNDINKELKKLAHHHADYSVQLDTGSIEVNDFIDKLQLGAMTNGSNVMLGGDGRNNQILLALWKAKSIVEQDIDHEVIFYVVEEPEAHLHPHQQRKLAKYLVSELPGQTILSSHSPQIASKFSPDSIVRLLPKGKSTRAASNGCSQCIVNGWEAMSYRMSILPAEAFFSNGVFLVEGPSEMLFYHELAKYLDLDLDFLNLSILSVDGISFAVYISILDALEIPWVMRTDNDISKIKGKDEWQYAGINRCLRAAGFATLPHSKQKLLPIDAYNNGTWKNVSDHINCKGIYLSKVDLETDLVNELSEPILKALSRDSEESAIKYLQGKKALRMRALLSAIESELSSISLGDLAQPLYKLAEKAKVNS

SEQ ID NO: 68913 - protein, 539 aa, Vibrio sp. J2-15
MSTFKPTPQQQSAIEYTQSMIITACPGSGKTTVMKEKVRNTTLYLPPHKGVIAITFTKKASAELKKKCTANAHDTKQSYFGTIDSFCLKEIILPFISRVWGKPEIELKTVKKLHPAQAQYFQKKYTSPTYEDISSDSGFKKLYEEGLLWMTSFAALALYILKHSKAALRYISARYSHVFIDEYQDSSLSQHQLFLSLFDQGLTATAVGDAWQSIYEFRGGDSKLLTELTENEHFKHFVIDINHRCHASIVNYATRLMDPNATLLSHAHDDLRVHRLHLAGNLTNIGKVLSDFVKQLKEKHAIENESDIAILAKKEKSLFLCTQGIEIDYRLYNDSPLDESSSSDCADFYSDLLAFRYGAIGTIQDLIDIHFDLVSAKHISISKLRILIGKLRSEQTVEELVFKFRELASFIGILNTTDTDRALRLKFNEPSFIKQFTPIAKNEVQVMTLHKSKGLEFKYVFHLDLEQWSFPYMEKGDNWDDLRYPSLMQDTNLHYVGITRAEDHCYLIRAEYRQNVSGKDSKSRESYFWSLPHLAGLYT

SEQ ID NO: 68914 - protein, 607 aa, Salmonella enterica subsp. enterica serovar Derby; identical to SEQ ID NO: 62590

SEQ ID NO: 68915 - protein, 630 aa, Salmonella enterica subsp. enterica serovar Derby; identical to SEQ ID NO: 64485

SEQ ID NO: 68916 - protein, 799 aa, Yersinia pseudotuberculosis; identical to SEQ ID NO: 67260

SEQ ID NO: 68917 - protein, 622 aa, Yersinia pseudotuberculosis; identical to SEQ ID NO: 67261

SEQ ID NO: 68918 - protein, 711 aa, Yersinia intermedia
MYISFLKINNFRKFGENDNVIGFVKSHSESPQNNLVASSTTLVIGKNNSGKTTVTKALELLHSDSEKITGHDFNYNYSKNILKENLNDKPHITPKLSFEIEIILDDITHDLIGDFQPFIDAKKALNEGVRKANIIIEYEVKVLADYKSKIEELKVFYLSNKCNPEGIFRKYLDILSKTQFRRRVKNYQNVNVDTLTPKNIIDLRVISAAKNIHDKKLLTKSFNKIIKYMYESDEVEYKGILNLVDGNNESLTQNIKLKHQSGVERILAKIISDKDIGIELRSELTFDKLMSDLITYEHKDGEFLVPESQFGLGYASLVSIIGEIIDYTNQSLKEATQSKIRLLCIEEPEVFMHPQMQINFIRHIQEALNEILSSHVENLNSLKSQILITTHSSHILNSVIHSSNTFDDINYIYLRNGNAANVLLKDRDIANTVKKTLQFEFIKKHIKHQTPDLFFSDAIIFVEGITEERVLNSYIEDDSVLNRMNISVFRIDGAHAKVYAKLINKIQIPSLIITDIDFKIDTNKTDTNIIEDIEDIEDIEDIEDSGKIVGQISNLSEDLITTNATLRHFFKDRRITSLKDYYVKDNLMVVFQKDGVCIPKSSPEITYYATSFEEALILKNYDNILLLDILLRVIKKETIKILGEPSDVCNIAHNSRKIQKLLAKKKSDFSNKLIFSLVTSDQPKPALPDYILKGLEWLALKLKRDGVTYEI

SEQ ID NO: 68919 - protein, 682 aa, Yersinia intermedia
MKFELNQEQAKVEINIEIELFKLIKNAQSFYFISGAGSGKTHALITGVNKFINDNYSQLILNNQKTLCITYTNNAADEIKHRLGDNDLAITSTIHSYIWDFVKYHMDLLLDEHIIFLDEEIKKIHNEIYELETKNSTLLKIRSLKETQLSEIIECILEDKNEFYESLISASKFWEYLKSIAGDESFNHLKGNYQNLSSALKKLVRSLEFKQCICKIKEKEAKFTSIRYFNTKNIEVLYKNIIGHNTLLMYASRLIKKYPLLSKCIIDAHPLIFIDEYQDTDENIINLFLEVHDIAKKENKKICLGFFGDPMQTIYKDNMHKESHNLKKLVKNINRRSHQNIVSCINKIRGSNQDVQQNPIKIYSEQCYPSLTVEKEENYTNDYLSSIIKKYKNKWNVNENSKLACLVLKNEMLSQLSGFDPLFAIMLDIYQTEHAKGFEMIGSEFLFREIRYAGSLPSILHDLLMPLYLLNRKSDFSISDFFNRESIQKYNLSNVLSSIELIESLSFKCLRGFTCELSKIYGKQNSEIQALINYNFHIITDGLDGAKEKIIDTCRLRDKTKLPLLLDELFELDMEQFFLWLDFIYQNYSDSLVSYLTCHASKGLEFDNVIIFLSDSFNRKEGYFSNLLNSEINSSLDPQLESARRLLYVSSSRAIKNLKVYLFTNKEIDKSKIDHLFTQEIS

SEQ ID NO: 68920 - protein, 677 aa, Yersinia pseudotuberculosis
MQLKKIFISGFKSISNESPQIIHLDHELTTFIGHNGTGKSTAMEALNKLFSVDHSLRGISINDFHNADGGNNEKSKSLIIEAWFSFPKPNEGKISIPPLIEHLTIDKSDGVILFRVRLESKLSFEANPMGDIDEDVWVVNTSDDVVEESSKQKLSAAVRNSIQVSYVPANRDPLLQLKYSSKAVLGRLLKAIEWVGGSQEVIEEQAAQLNALTKSNPAMNEIAVAINASWGNIYKGRYLSQASLNFPLANIDEILKLIQLQFNPDETGNTVNVDRLSDGQKSLVYFSLIKAMFDIDKKTRELISSGETSNFNPEKMRLPIFSMISLEEPENHLSPHYLGRIIKLVKDYSRNELCQVIISSHSSSILSRIEPEQIRHFRLDKDSKSTVVNALTLPEKEDELSKFIKEAVKAYPEIYFSKLVIFGEGDSEEIIIPKVLELHSTEIDSHSISVVPLGGRHVNHFWRLLKSLQIPFITLLDFDIDRNGGGFGRLKYAIEQLAEFSESGSTYIHKDIAGLIPSWDDARDPIEFTIKYNDGATINIVDELEKCNVYFSSPLDIDYAMIEAFPDIFCEKDEVYGERGPQNTKKKEGEEEQDELIKAVLKKGNSGIRYGFSADYLKYFLWYRYRFLSNKSKPASHIRMFSKIEEKYTPEEMRAKLPSELIRVAEKTVTLLEGVIE

SEQ ID NO: 68921 - protein, 554 aa, Yersinia pseudotuberculosis
MTIQWQPSEGITPTQELMDIILCDQSISVLAGAGAGKTELIAQKSNYLLQTGKCMWPKRILCLSYKKEAQENIKERVNKRCGQKGERFDSYTFDAFCKSIVDRFKDVLPEHKRPLNSYDLVFNAKASNGKNKLSFDLIRSLAVEILKNRVDIVDLFSFTYPHVFIDEFQDTRSDQYELIKILFKDRGTQLLAVGDINQSIMLWAGARKTVFEDYEREFNTTRKLLVQNFRASDEIQEVLRCFIHFVQNDANFSPITKNVENCTIHCYDDEISEADGIADKIENFIASGIKEKEICVLAKQQSEQYTEKLRDKLTKKGIRNLDMSELQDVLKEPLGRIFAALFKVYTSRSSSSYTELCELYLTLHRVARGDEKEDSLIKELSDKIAANREILGNSPNPDLLISYIKDIMSFFGLKKMMGRWNQYKSADYWSQVWLSLERHLRYTIGATNSLNEAALMFQAENSVQVMNVHKCKGLEYKVVIFLGLEDQAFWNYNKAKFENDCVFYVALSRAKEKILVTTAKHREHRINNGYDNRKSNYQMVMPVYSFLIDHCKFK

SEQ ID NO: 68922 - protein, 565 aa, Vibrio cholerae; identical to SEQ ID NO: 62564

SEQ ID NO: 68923 - protein, 458 aa, Vibrio cholerae; identical to SEQ ID NO: 62565

SEQ ID NO: 68924 - protein, 565 aa, Vibrio cholerae; identical to SEQ ID NO: 62564

SEQ ID NO: 68925 - protein, 458 aa, Vibrio cholerae; identical to SEQ ID NO: 62565

SEQ ID NO: 68926 - protein, 634 aa, Vibrio cholerae
MKLQYIRLSNFQSFGARPTKLTLDDITYLIGPNGSGKTAVLQALCRLFAFDPSLRRIQRSDFHVPHDEQESPEERELWIEADFSFPELEDEEDNSTVAPHFSHMRLDEPDGVPRVRYRLTATMGFDGDIDESFVYVTEVEQDGSPLNPQTVPRSERNQIQVHYLPARRDPSDHITYGTNALLGRLLRAVNWDDEREEIKELTDQISDNLAGNPSVDAFSSHLKETWGALHKGSYFTDPRITFVASEIEALLRHLSVSFSPGHDENFVDFSRLSDGQKSMLYLSLVLSSQAIGRSVLAGEEDSFDPAKLRPPVFTLIALEEPENSLSPHFLGRIVTALNTMTCNEDAQALIATHAPSMLRRVDPEHIRYLRLTESRKSRITRIKLPDETDEAHKFVRQAVQAFPEIYFSRLVILGEGDSEEIVLPRLLQAKGVPVDESAVTIAPLGGRHVNHFWRLLSALKIPYLTLLDLDVARYQAGWGRFKYVNDQLMKYCPENKLPKDHGIPNWDSDKDKVRDYFNYIEAFEKRGIFFSFPMDLDFSMLLAFPDAYGVENEVPDDSTIKAVLGKSHHDSSQYSDDELNLFSSYHKLFKLGSKPAAHIEALAQLSDDDLDLDMPKSYERLVDKVKAMLEELPE

SEQ ID NO: 68927 - protein, 553 aa, Vibrio cholerae
MISSDAWLPADGLTLEPNALRAAKEQVSCLALTAGPGAGKTEMLAQRADFLLRTGNCRYPKRILAISFKVDASKNLKERIQRRCGQELASRFDSYTFHAFAKRIIDRFRVVLTGNDALDADYTIGERRITRRQITFRELVPLAIQIVNISSVAKNAIRQTYSDVFLDEFQDCTDQQYELVKVVFQGTSIRLTAVGDTKQKIMGWAGALDGIFQTFAVDFNAVPLNMYRNFRSKPCLLRMQNEIIRVLDPSSVMPEEQLEGEEGEVFAWEFDNAQVEAEYLANLIDNWIRLEEIPLSEIAVLVSKQLDLYAVNLMSELDNRGIPYRNEQQMQDITVEPVARLIVDYLSCLYGQREPKAWVRLMEQLIPFADDEIQSVVRQDFQQFIKEQRKEAATIGGVDEHFSGWWGFVRRFLKKVGKEILVALSPDYESHTRLKEVVRETKAHIEELLELAPDLLQALTRFSDDQAVRILTIHKSKGLEFDSVIMMAVENEIFFGDADANRCAFFVGVSRAKKRFVLTYAKERDKPDNYSGIWRTNRSAQLEYFGYASPFVK

SEQ ID NO: 68928 - protein, 654 aa, Vibrio cholerae; identical to SEQ ID NO: 62722

SEQ ID NO: 68929 - protein, 630 aa, Vibrio cholerae; identical to SEQ ID NO: 62723

SEQ ID NO: 68930 - protein, 565 aa, Vibrio cholerae; identical to SEQ ID NO: 62564

SEQ ID NO: 68931 - protein, 458 aa, Vibrio cholerae; identical to SEQ ID NO: 62565

SEQ ID NO: 68932 - protein, 565 aa, Vibrio cholerae; identical to SEQ ID NO: 62564

SEQ ID NO: 68933 - protein, 458 aa, Vibrio cholerae; identical to SEQ ID NO: 62565

SEQ ID NO: 68934 - protein, 565 aa, Vibrio cholerae; identical to SEQ ID NO: 62564

SEQ ID NO: 68935 - protein, 458 aa, Vibrio cholerae; identical to SEQ ID NO: 62565

SEQ ID NO: 68936 - protein, 204 aa, Vibrio cholerae
MKLSNVLAFTGEKAISLSDTPTKLVDYLRKRPNFDILKLLFANKVILVEGPTEEMLISTYLSKQPALNDIDIIPIGQRGYATFLDIWLALNKDNQNKKIGVVRDYDNSDAAKAKHDTYDTAHANVTVRTTTNYTLEIDLVEAEDNLALLNDLFEMEGDLDAVSKHMINGKTARMLDVCDAMVDEENPLDIKLPAHIAEVIEAVS

SEQ ID NO: 68937 - protein, 458 aa, Vibrio cholerae; identical to SEQ ID NO: 62565

SEQ ID NO: 68938 - protein, 565 aa, Vibrio cholerae; identical to SEQ ID NO: 62564

SEQ ID NO: 68939 - protein, 458 aa, Vibrio cholerae; identical to SEQ ID NO: 62565

SEQ ID NO: 68940 - protein, 565 aa, Vibrio cholerae; identical to SEQ ID NO: 62564

SEQ ID NO: 68941 - protein, 458 aa, Vibrio cholerae; identical to SEQ ID NO: 62565

SEQ ID NO: 68942 - protein, 565 aa, Vibrio cholerae; identical to SEQ ID NO: 62564

SEQ ID NO: 68943 - protein, 458 aa, Vibrio cholerae; identical to SEQ ID NO: 62565

SEQ ID NO: 68944 - protein, 565 aa, Vibrio cholerae; identical to SEQ ID NO: 62564

SEQ ID NO: 68945 - protein, 458 aa, Vibrio cholerae; identical to SEQ ID NO: 62565

SEQ ID NO: 68946 - protein, 565 aa, Vibrio cholerae; identical to SEQ ID NO: 62564

SEQ ID NO: 68947 - protein, 458 aa, Vibrio cholerae; identical to SEQ ID NO: 62565

SEQ ID NO: 68948 - protein, 565 aa, Vibrio cholerae; identical to SEQ ID NO: 62564

SEQ ID NO: 68949 - protein, 458 aa, Vibrio cholerae; identical to SEQ ID NO: 62565

SEQ ID NO: 68950 - protein, 565 aa, Vibrio cholerae; identical to SEQ ID NO: 62564

SEQ ID NO: 68951 - protein, 458 aa, Vibrio cholerae; identical to SEQ ID NO: 62565

SEQ ID NO: 68952 - protein, 565 aa, Vibrio cholerae; identical to SEQ ID NO: 62564

SEQ ID NO: 68953 - protein, 458 aa, Vibrio cholerae; identical to SEQ ID NO: 62565

SEQ ID NO: 68954 - protein, 634 aa, Vibrio cholerae; identical to SEQ ID NO: 68926

SEQ ID NO: 68955 - protein, 553 aa, Vibrio cholerae; identical to SEQ ID NO: 68927

SEQ ID NO: 68956 - protein, 565 aa, Vibrio cholerae; identical to SEQ ID NO: 62564

SEQ ID NO: 68957 - protein, 458 aa, Vibrio cholerae; identical to SEQ ID NO: 62565

SEQ ID NO: 68958 - protein, 712 aa, Klebsiella variicola
MYISKLTLVNYKNFKNTSLRFHKGVNTIIGENGSGKSNILRAIRLLLDDNMVRSAYRLEEGDFSRSLDQWQGHWIIISMEFDEITTDESVQALFLHGTAPLDDGPIHKATYNLIFRPKKDIRLKLAALELFDFKELSEIRDAITIDDYETLFTGRSNADFGNPAVYRSIVGDFDICDFSSETEFPEIGAKVPGFLSVTKEVSLTFIQALRDVVSEFHNNRTNPLLTLLKSKSGDINPLTMEPISEMVRGLNASIEGLEDVQSVRNHIRETIKDAAGETYSPASLSIKSDLPEEADKLFQSLRLFVGESEEGYEGAIHELSLGGANLIYLTLKLLEFKYQREKLAMANFLLIEEPEAHIHTHIQKTLFDRIAYSDAQIIYTTHSTHISEVSNVSNVNILGRHGAFCEAYQPARGLDPTQINSIQRYLDAVRSNLLFAKSVILVEGDVEEILIPILIKLVLGVSVDELGISVINIRSTGFKNVAVLFHDLRIKKRCAIITDLDKAFFNITVQATDNAIVAKLKAKAAGSQKAGLERQADLTEFTAENPWIETFYAKHTFEVDFVAAGNQEAIVQTIPKVYKDQGTREEAKLQLKSGDLQQMGSRTLTMARQEGKGWFALLLAEYLTPQVQIPEYIIQAIHFAHGKFPRSLIVRILQYRAEYRYGADVANLPAKQLFLQEINRFAQGGIGLAEFRITIGRLLPGDPIIVFLGKLQ

SEQ ID NO: 68959 - protein, 594 aa, Klebsiella variicola
MRFVWDPRDLNPEQAAAVTEPSSIFLIACPGSGKTRTLTYKIAYELSRRTDKRLVVAITYTHRAADEIQERIEDLGVDTSGLWIGTIHAFCLEWILKPYGIYSPELARGYRVIDPYDRERLLERLCAQYKGITHWDCDYYVTETGYQLGCVDTRKHLIIQNVLKKYFKELSSSRQIDFELILWYAYCLMRDRPPIAVLLSRVFSHILVDEYQDTKQIQYSILTSILRAGRGETKILIVGDPNQAIYGSLGGYAMPLDEFRAQAGIPIKEFALSLNYRSSERIISYFSNYSVHASKITGAGKDAKFPSRITYNQKVTRSNVHDEIVRLIRKSLDNGYSPENICVLAPQWVLLASTTRKLVAMLPDQQFDGPGLIPFSNNFDNFWFKVSKVLLTDSSPALLIRRLRWANEVIRDLDSFGVDTKTLTPRILLRESNALTVNELDGLRYLDQAFTELLKRLNISPEIHPALLTHREAFFSSSAARIERLQKEGATYINQISVFKKVFRERSGITVSTIHGVKGAEFDVVIAFGLLEGMVPHFNEVNGHVAASKLLYVLSSRARKNLHLISESERQRGRYSSYSATELLAACIFNYDEE

SEQ ID NO: 68960 - protein, 634 aa, Achromobacter piechaudii
MKLQTIRLSNFQSFGAVPTEIRLEQITYLIGPNGSGKTAALQALCRMFAFDPSLRRIVRSDFHVPSNEAAPPAERQLWIEIDFLFPELGDDDDNSTVAPHFGHMRLDEIDGTPRVRFRITATMGLDGDIEESMAYVLDINADGSPLSTAQVPRSERNHIHVHYLPARRDPADHIAYGANALLGRMLRAVNWDAERTVIKGLTDQISDSLAANPSINAFSASLKSAWSVLHKGSFFADPKLTFVASEIEALLRHMSVSFTPGHDEQLVDFSRLSDGQKSMLYLSLVLSSQAIGRAVLAEDDDSFDADKLRPPVFTVVAVEEPENSLSPHYLGRIVNALSTMTRDGDAQALIATHAPSMLRRVAPEHIRYLRLTQERTTRVTHILLPDAADEAHKFVREAVQAFPEVYFSRLVVLGEGDSEEIVLPRLLQAKGAPVDESAVTIAPLGGRHVNHFWRLLSTLQIPYLTLLDLDVARYQAGWGRIKYVNDQFEKYRPEQKLPKDHGIPKWDSTKHMVREYGHYLKLLEKRDVYFSYPMDLDFAMLLAYPDVYGAIEEDPEDDTIKAVLDKSHHDASQYSEDEQQLFNTYHQRFKLGSKPAAHIDALAQLTDEELLADMPASLSRLADAVITKLTELPE

SEQ ID NO: 68961 - protein, 558 aa, Achromobacter piechaudii
MIAVDAWKPSDGLTLEPNALLAAKECKHSLALTAGPGAGKTEMLAQRADFLLRTGTCRYPKRILAISFKVDASSNLKERVKRRCGSELAIRFDSYTFHAFAKRIIDRFRPVLTGEYALDAAYKIADRKPRPSRTLIEFSDLVPFAIEILQQSAVARNAIRQTYSDVFLDEFQDCTNLQYELLKLAFQGTSIRLTAVGDTKQKIMGWAGAMDGIFPTFVADFAAAPLNMYRNFRSKPRLLRLQNDIIRKLDPSSIMPDEQLAGDEGEVFAWRFEDSRQEADYLAGLIEGWIKTEQLSPAEIAVLIRNQLDLYADHLMAALEIRGIPFRNEQQMQDITVEPAARLIVDYLSCLYGQRKPKAWIRLMNQLIPFADEEIQSNARKDLDRLVKRQRKEIAIAELVDEPFSGWWELVRAFLKQVSIETLVSLAPDYESHDRLKEVIRDTKARIEELLKLEPYLPKALERFSDDQAVRILTIHKSKGLEFDSVIIMAVENETFFGDQDENRCAYFVGISRAKKRLVLTHADQRERPAGHSKRWDVQRTAQNEYLGFVTPFLKKTQ

SEQ ID NO: 68962 - protein, 567 aa, Escherichia coli; identical to SEQ ID NO: 68132

SEQ ID NO: 68963 - protein, 540 aa, Escherichia coli; identical to SEQ ID NO: 68133

SEQ ID NO: 68964 - protein, 738 aa, Escherichia coli; identical to SEQ ID NO: 66614

SEQ ID NO: 68965 - protein, 595 aa, Escherichia coli; identical to SEQ ID NO: 66615

SEQ ID NO: 68966 - protein, 691 aa, Acetobacterium bakii
MKIKTIHISNYRKFDNVKLNMEDNITVIAGANNSGKTSLVELFNSIFNNTRSKLCCDDFSIIECQKWSNSIYPIVYSAFTTGKPKEDVITDICKEVLSVTKSEEVALMPPIEVKIQVDYNGNEDDIRHFADYIMEFEPNNTSFYFIYRYALNVELFRKTLDNEYEKFLTRFIKLTRDENKEIDAIRIIKEMLVLLYANSCEETANFSDKAYKNIVAMDMSSFKSLFNYHNIMAGRNLDDESSDRTKILSKNMIDIASQEDDWKDLIKNLPDQIIQPIQDAKIQEKVRIASLDTLSETMEAISITNGGHAGNIVIDMNVTEEAVHSLLKSITCAKYQADDHYLSESSQGLGYSNLIYIHLQLEKFRKTIDPLIVNFFVIEEPEAHMHPQMQNVFSQYLINYYNREKGIQGVLTTHSHEVVRTASISQLRVLRQVSPFKCNTYDLREFQNSIASNKELLDFYDWFYTINFPDIIFADKIIMYEGDTERMLIKYILRSKEFELLRSQYVSFVQVGGAYAYNYKPIIEFLGIKSVLITDLDYDKDSSNIADVLISGTTNTTINKFSEIILDNPAPTVQVLYDWKEKSPLIVVGCICLAFQGKRDYYSRTLEEAMLARHYGVTALDVKLKKEWIEKRNKDKLKFVIPREGDECSIRTIVLHTSNRKTDFMYSVILNNLVDSMLPAYIKEALLWLTA

SEQ ID NO: 68967 - protein, 73 aa, Acetobacterium bakii
MADSLKNCFLVNAPAGSGKTTQIKAMVKKCILENPRDNILCITYTNRAADELSRDVDAKNVFIGTIHSFLNSF

SEQ ID NO: 68968 - protein, 675 aa, Clostridium homopropionicum DSM 5847
MYLKSLKIINFRKFGSENNTVEFVDAQSYQEQKNSKEINIAPTTTLIVGKNNCGKTTIIQALDKLINDNSLKSNDFNFSYIKKLLNSYQASTEKFDLPFIEFIVGIGIDKNNTDLITNLIPFMTLEDINKSKLDIFIRYEVEDAEIFINNIKQLLQKKYRDENLIFNKFLEIIDISNFKLNYYNKNGESIKQFKLKDLMELKSIKANNIEGENCLSKAFSKIIEYRYNILLGGDKEKLESKIIDINSDLTKKFNSHHTKYINDSLGQVVSNDKLKVLLSADLTFQRLMNSLVKYKYVEENLYIPENQFGLGYTNLMMIIADLIDYMEKYPENSFNSKVNLISIEEPETFMHPQMQELFIKNINNAIATLLESKHKNINSQLIITTHSSHILNSKIHSGNTFNNINYITIEKNYANVVNLNDEKITPKSDTKENDLKFLKKHIKYKVSELFFSDAIILVEGVTEYTLLPYYIDKNDKLNKYYISVFNIDGAHGLVYRELIKLLKVPTLIITDCDIKRFDDEKEKFAQISSLKDRITTNQTIIKNNNDNSKLDVLPEYIEYQNMYIIYQGKINRYYATSFEEAFILTNYNNILLNNVLKKIKPNIYKEIIVGNNFSNNKKNSYKWQCKLSNDKSNFANELLYALIIEENKAEIPLLPKYIVTGLEILAKKLKGDESK

SEQ ID NO: 68969 - protein, 687 aa, Clostridium homopropionicum DSM 5847
MNLTKISSQNETKEKKIIKVICNCVDKKKSIIFSSGAGAGKTYALVECLKYVISTYNKELKYHNQKIICITYTNIATNEVKQRLGNASTVLVSTIHERIWDFIKNYKKELVQIHRENLSKKIEEMEQKIKTAKEYEQYRKLNDEQKKALQKIMNESKDIYYKYYNFNAKDFKKGLNDILTDFPGILNNVSNFKIIINTIFKLSNYHICKHNIDVSKPRYTSVEYNSTYNSDQLHKMRISHDTLLDYGLKIIEKYDLLKQIIIDKYPFIFIDEYQDTNESVVKIMNCLHQHSIKIGHELFIGYFGDVAQNIYNEGVGKKITQIQSDLKPINKEFNRRSTKEVIDIANKIRNDNIVQKSIFEDCVGGSVKFYTGNSDDVSNFIEKYLFEWEITHRNPLHCFVLTNKTVSKYSGFENLYNALSDTDTYSGSNYGQLNTELLSNDISKLGEIPSLLFRIIKLNDNIENNKTQLKDILPSELCINMNLENLENLVLLLKKITGNTLGEYVQNISQIYSKDIEGKYKKIIDRVFDIDNISFETFKSFLTEKLFSNLNDSDVENANTVIQSLLNININEYKLWYKYILNECDDKIIYHTYHGTKGLEFNNVIIIMENAFGKSRSYFDFFFKNYTELKTLNDADKDKFEQIRNLLYVSVSRAITNLRILYTDDVTNFKNGIEKIFGQIYTYQNNN

SEQ ID NO: 68970 - protein, 755 aa, Xanthomonas campestris; identical to SEQ ID NO: 68908

SEQ ID NO: 68971 - protein, 615 aa, Xanthomonas campestris; identical to SEQ ID NO: 68909

SEQ ID NO: 68972 - protein, 764 aa, Xanthomonas campestris
MRIQHVEISNFRKLLSVRIDFANETTLLVGANNSGKSSAMLALRRFLVSKGSSFRLQDLTLCHFAKLDEIGKEWETPPANFEIPTAKDWADWLPSLDIWVSADQGEFHFIRDLIPSFAWRGGLVGMRFLLEPDDMNMLYTDYRKERARVAELEDALGKEDPLGSPLTLWPQSLHDYLNRRLGDKFKVRWYRLDPQQLKKPHKSTRMAQMQQLSPTSLPLESNPLSGLIRVHEINAQRGFGDHSDDNQGDNTRPSGARKLSEQLRSYYSRHLDPGDSPDISDLEALRAIEAAQSAFDTRLSSSFESAIKEVEGLGYPGRNDPRIKVASRLAATDGMNHEAAVLFELDSIQGAPGAPPLHLPETANGLGYQNLISMIFRLMGFRDEWLRKTRAASAGVIDRVEPIHLVLIEEPEAHLHVQVQQVFVRHAYQVLCRDALLERYPNLKTQLLVSTHSSHVTHEVEYQNLRYFRRLPAGMYGIGVPVSTVSNLSNVFGDGTKTKKFVTRYLRAQHADIFFADAVILVEGSAERMMLPHFLRNKFTFLDRCYITTLDIGGSHAHRLRPLIDALGILTLVITDLDAGLNKAAKPVQRNADQITNNPTLRSWMKLMHLGSTVDELLELPANQKEHQIDDLYSVRIAYQTPISTHLPATGKAIQALPNTFEDSFVLSNAGHFAEKTNGTGLMKAFVKVLNEAQTSEAVGEGFFNELREGKKAEFVLLVLGDKNFPNLEIPEYISEGLNWLESKLRSKQKELLVIPPEGMEVTP

SEQ ID NO: 68973 - protein, 615 aa, Xanthomonas campestris
MSEAAIADADTIMQACLNLADPKSFFLYAGAGSGKTHSLVEAIRELKSRERERLTFEGRRIAVITYTNAACDEILRRLEFDPLVEVSTIHAFAWRLIQGFDNEIREWLRIKLAQDINKIEGELARSRGDNKTSRANRRKLQSKIRRLETLDGITKFIYSPAGDNRERQALNHDEVIKLSAAFVPERPLLDVLVDRYPVVLIDESQDTHAPVMEAFLKVQQLAQTRFCLGLLGDTMQQIYGHGVTRLDKAIPGDWLKPEKVVNRRCPRRVVDLINVIRSTADTHQQTPKPDAIEGVVRMYCISQSQEKAPNLEEGIAHSMAAITDDGEWATGPEGRKTLILEHKMAGRRMGFEKLFTPLHAVEHLQTGLLDGTLPALRVFSEGVLPILTAKDDHFLLLEAVRSRSPLLSKDAMQSTGDQSAHMQRVEDATHALLSLFERNDPTLSEVATLLLQTQLLDVPENLVGAMVLGAPGEAPDPEDTNAMTNYAYQLFLERPFSELAAFASYADGLSPYGTHQGVKGLEFPRVMVVINDEEAGGFLFSYDKLLGVKEPTKTDRDNERDGKDNALARTRRLLYVTCSRAEKSLAIVVYTPHPALAKQNVVTAGWLQESEVEIL

SEQ ID NO: 68974 - protein, 755 aa, Xanthomonas campestris; identical to SEQ ID NO: 68908

SEQ ID NO: 68975 - protein, 615 aa, Xanthomonas campestris; identical to SEQ ID NO: 68909

SEQ ID NO: 68976 - protein, 764 aa, Xanthomonas campestris; identical to SEQ ID NO: 68972

SEQ ID NO: 68977 - protein, 615 aa, Xanthomonas campestris; identical to SEQ ID NO: 68973

SEQ ID NO: 68978 - protein, 764 aa, Xanthomonas campestris
MRIQHVEISNFRKLLSVRIDFANETTLLVGANNSGKSSAMLALRRFLVSKGSSFRLQDLTLCHFAKLDEIGKEWETPPANFEIPTAKDWADWLPSLDIWVSADQGEFHFIRDLIPSFAWRGGLVGMRFLLEPDDMNMLYTDYRKERARVAELEDALGKEDPLGSPLTLWPQSLHDYLNRRLGDKFKVRWYRLDPQQLKKPHKSTRMAQMQQLSPTSLPLESNPLSGLIRVHEINAQRGFGDHSDDNQGDNTRPSGARKLSEQLRSYYSRHLDPGDSPDISDLEALRAIEAAQSAFDTRLSSSFESAIKEVEGLGYPGRNDPRIKVASRLAATDGMNHEAAVLFELDSIQGAPGAPPLHLPETANGLGYQNLISMIFRLMGFRDEWLRKTRAASAGVIDRVEPIHLVLIEEPEAHLHVQVQQVFVRHAYQVLCRDALLERYPNLKTQLLVSTHSSHVTHEVEYQNLRYFRRLPAGMYGIGVPVSTVSNLSNVFGDGTKTKKFVTRYLRAQHADIFFADAVILVEGSAERMMLPHFLRNKFTFLDRCYITTLDIGGSHAHRLRPLIDALGILTLVITDLDAGLNKAAKPVQRNADQITNNPTLRSWMKLMHLGSTVDELLELPANQKEHQIDDLYSVRIAYQTPISTHLPATGKAIQALPNTFEDSFVLSNAGHFAEKTNDTGLMKAFVKVLNEAQTSEAVGEGFFNELREGKKAEFVLLVLGDKNFPNLEIPEYISEGLNWLESKLRSKQKELLVIPPEGMEVTP

SEQ ID NO: 68979 - protein, 615 aa, Xanthomonas campestris; identical to SEQ ID NO: 68973

SEQ ID NO: 68980 - protein, 755 aa, Xanthomonas campestris; identical to SEQ ID NO: 68908

SEQ ID NO: 68981 - protein, 615 aa, Xanthomonas campestris; identical to SEQ ID NO: 68909

SEQ ID NO: 68982 - protein, 755 aa, Xanthomonas campestris; identical to SEQ ID NO: 68908

SEQ ID NO: 68983 - protein, 615 aa, Xanthomonas campestris; identical to SEQ ID NO: 68909

SEQ ID NO: 68984 - protein, 577 aa, Xanthomonas campestris
KPWAYHPQQLKKPHKSTRMAQMQQLSPTSLPLESNPLSGLIRVHEINAQRGFGDHSDDNQGDNTRPSGARKLSEQLRSYYSRHLDPGDSPDISDLEALRAIEAAQSAFDTRLSSSFESAIKEVEGLGYPGRNDPRIKVASRLAATDGMNHEAAVLFELDSIQGAPGAPPLHLPETANGLGYQNLISMIFRLMGFRDEWLRKTRAASAGVIDRVEPIHLVLIEEPEAHLHVQVQQVFVRHAYQVLCRDALLERYPNLKTQLLVSTHSSHVTHEVEYQNLRYFRRLPAGMYGIGVPVSTVSNLSNVFGDGTKTKKFVTRYLRAQHADIFFADAVILVEGSAERMMLPHFLRNKFTFLDRCYITTLDIGGSHAHRLRPLIDALGILTLVITDLDAGLNKAAKPVQRNADQITNNPTLRSWMKLMHLGSTVDELLELPANQKEHQIDDLYSVRIAYQTPISTHLPATGKAIQALPNTFEDSFVLSNAGHFAEKTNGTGLMKAFVKVLNEAQTSEAVGEGFFNELREGKKAEFVLLVLGDKNFPNLEIPEYISEGLNWLESKLRSKQKELLVIPPEGMEVTP

SEQ ID NO: 68985 - protein, 615 aa, Xanthomonas campestris; identical to SEQ ID NO: 68973

SEQ ID NO: 68986 - protein, 764 aa, Xanthomonas campestris; identical to SEQ ID NO: 68978

SEQ ID NO: 68987 - protein, 615 aa, Xanthomonas campestris; identical to SEQ ID NO: 68973

SEQ ID NO: 68988 - protein, 755 aa, Xanthomonas campestris; identical to SEQ ID NO: 68908

SEQ ID NO: 68989 - protein, 615 aa, Xanthomonas campestris; identical to SEQ ID NO: 68909

SEQ ID NO: 68990 - protein, 755 aa, Xanthomonas campestris; identical to SEQ ID NO: 68908

SEQ ID NO: 68991 - protein, 615 aa, Xanthomonas campestris; identical to SEQ ID NO: 68909

SEQ ID NO: 68992 - protein, 764 aa, Xanthomonas campestris; identical to SEQ ID NO: 68972

SEQ ID NO: 68993 - protein, 615 aa, Xanthomonas campestris; identical to SEQ ID NO: 68973

SEQ ID NO: 68994 - protein, 755 aa, Xanthomonas campestris; identical to SEQ ID NO: 68908

SEQ ID NO: 68995 - protein, 615 aa, Xanthomonas campestris; identical to SEQ ID NO: 68909

SEQ ID NO: 68996 - protein, 576 aa, Xanthomonas campestris
PWAYHPQQLKKPHKSTRMAQMQQLSPTSLPLESNPLSGLIRVHEINAQRGFGDHSDDNQGDNTRPSGARKLSEQLRSYYSRHLDPGDSPDISDLEALRAIEAAQSAFDTRLSSSFESAIKEVEGLGYPGRNDPRIKVASRLAATDGMNHEAAVLFELDSIQGAPGAPPLHLPETANGLGYQNLISMIFRLMGFRDEWLRKTRAASAGVIDRVEPIHLVLIEEPEAHLHVQVQQVFVRHAYQVLCRDALLERYPNLKTQLLVSTHSSHVTHEVEYQNLRYFRRLPAGMYGIGVPVSTVSNLSNVFGDGTKTKKFVTRYLRAQHADIFFADAVILVEGSAERMMLPHFLRNKFTFLDRCYITTLDIGGSHAHRLRPLIDALGILTLVITDLDAGLNKAAKPVQRNADQITNNPTLRSWMKLMHLGSTVDELLELPANQKEHQIDDLYSVRIAYQTPISTHLPATGKAIQALPNTFEDSFVLSNAGHFAEKTNGTGLMKAFVKVLNEAQTSEAVGEGFFNELREGKKAEFVLLVLGDKNFPNLEIPEYISEGLNWLESKLRSKQKELLVIPPEGMEVTP

SEQ ID NO: 68997 - protein, 615 aa, Xanthomonas campestris; identical to SEQ ID NO: 68973

SEQ ID NO: 68998 - protein, 566 aa, Pantoea sp. CFSAN033090
MLIETLYISGFRNYHEAEINFRESTLIIGANDIGKTNLLFALRLLLDKSLSELDLEPRINDFHIDQDGVQSKEIEIVVRFGEVREDAVISKLSGYVSEDDELYIKYHACQSTMDFTISLSHDGLSYDEVPNRFYLKYLSLKYINSQRDLEKYIRLEKKHLLRLAQDVRSEEQSQSDGEVFTVLNHLLAEVNEKVREISYVASATSELNTELRKLSYNHERLTVQLDTGAIGVDQFIEKLELSASTNGKKLMLGGDGFNNQILLALWKAKSLREHDVTSEVVIYCIEEPEAHLFPHQQRKLASYLIENLPGQSIVTSHSPQIAVNFRPDSVIRLCASKGSTKAASNGCSACISTAWDEMGYRMSIIPAEAFFASAVLLVEGPSEVIFYTELAKALGLDLDLLNISILSVDGVQFEVYKKILQALHIGWVARTDNDVAKVPHRQEWSYTGANRALTLCGLSKGGHVSHEITSRERHNEWGRVTPLINANGVFLSITDLEGDLSYDFTAHLLDFSGAADADAAADFLRDKKAIKMRALLKHKRQFLAELADKDIARPLLAVQKLVRGEK

SEQ ID NO: 68999 - protein, 539 aa, Pantoea sp. CFSAN033090
MRLTAEQQDAVEFTENLVITACPGSGKTTILTHKISQVLTDCRAHQGVVSLSYTNKSSDELKARCINLSKDIKASFFGTTDKFLLSEIVIPFIKHIWSCSSTGPEVIKASNLDAEDREILTPYYMPDNLPENNTEHGMAALERLYERGVIILEMVPLMALYIMSESLACQRYLKVRYKGVFVDEYQDTGFFAHQVFRLLAGLNIKLTVVGDVDQSIYLYAHRSADSLKDFIRHPDFTHKQITLNHRCHPSIINYANRLKDPECMLLDSDSLVVYHKSVTGDQANIAAWIDAQVAGLKKHFSIENNKDIAILVRSNLCAEMIADNLRTASRTYLDDNLSKAGDKVSGLVKALLHYRYDKKTTAQLVLDDYLSAVAKRSDVVLARKLIRQVRVTSDANLPEAIRLAVFSCTGCELSETHITGINDALTVPRIKNNYLHVRDDEVQIMTLHKSKGLEFDVVMHLDLYDWVLPAREYVKGSYDVVFQNEQQCLNLHYVGVTRARKGVILMHSTKRYNAKRELKTGNPSQFLTRPGLKGLFKEL

SEQ ID NO: 69000 - protein, 755 aa, Xanthomonas campestris; identical to SEQ ID NO: 68908

SEQ ID NO: 69001 - protein, 615 aa, Xanthomonas campestris; identical to SEQ ID NO: 68909

SEQ ID NO: 69002 - protein, 595 aa, Xanthomonas campestris
MRISRIRLINFANFSDIDIETGESIVIVGENKVGKSNFIRGLQLILDPGLSERDRQLGLEHFWDGLGEDKVGETVEVSVDLTDFTDDPRLMAHLNDCVIDPGPPMVARLTYRFQPKTGLGHAPESLKDYEYVIFCGDDPDMRIGGALRRMLPIDVQVALRDAEKDLASWRNSPLRPLIEDLAASLNDDTREEIQNQVDKAQRELAGHEEVVATAERISERLIAIAGEQHAVPMSLGLAPTRVDALLRSLRLLIDNGVRGVGDASLGTANLIFLALKSLELDRLVSDGERDHTFFVVEEPEAHLHPHVQRLIYRYFLGTGAEDGDEQPPLTTILTTHSPHIASVAPIRSIVLLRHDAAEGKTVAVSTANAPFTQRDEEDLQRYIDVTRGEIFFSRGVILVEGDAERFIVPAFAEVLNIPLDMLGITVCSVGGTNFTPYVKLLGPEGLNIPHVILTDRDPTNGNHPLVRRRLINVLDVIEGGVDHEELDADEVIELAEQYGYFVNENTLEPELFAGGLAEDMQEVIREELPRLRRETLNALQQWVDDPAQIDEDLLLRLIERIGKGRFAQALAPSVSEDVCPAYIRSALEHIRDAIA

SEQ ID NO: 69003 - protein, 215 aa, Xanthomonas campestris
MLNRNSVAWRSEEELAAWAEAYEAGLRDEGLIDYDDMVVFGQRLIADNNWVLPLVQAKFPVLVVDEYQDLGVALHRIVKRLAFDGGVRLFAVGDADQSIYGFTGADGALLIELAARSDIEPVQLQLNYRSGAGIVTASEMALGEARGYQASDPARQTTIEFLLRPGGMADQAAHAVAQIIPAALASKPGRTLGDIAILYKDYRAGDIVAEGHLEQ

SEQ ID NO: 69004 - protein, 755 aa, Xanthomonas campestris; identical to SEQ ID NO: 68908

SEQ ID NO: 69005 - protein, 615 aa, Xanthomonas campestris; identical to SEQ ID NO: 68909

SEQ ID NO: 69006 - protein, 755 aa, Xanthomonas campestris; identical to SEQ ID NO: 68908

SEQ ID NO: 69007 - protein, 615 aa, Xanthomonas campestris; identical to SEQ ID NO: 68909

SEQ ID NO: 69008 - protein, 764 aa, Xanthomonas campestris; identical to SEQ ID NO: 68978

SEQ ID NO: 69009 - protein, 615 aa, Xanthomonas campestris; identical to SEQ ID NO: 68973

SEQ ID NO: 69010 - protein, 764 aa, Xanthomonas campestris; identical to SEQ ID NO: 68972

SEQ ID NO: 69011 - protein, 615 aa, Xanthomonas campestris; identical to SEQ ID NO: 68973

SEQ ID NO: 69012 - protein, 755 aa, Xanthomonas campestris; identical to SEQ ID NO: 68908

SEQ ID NO: 69013 - protein, 615 aa, Xanthomonas campestris; identical to SEQ ID NO: 68909

SEQ ID NO: 69014 - protein, 755 aa, Xanthomonas campestris; identical to SEQ ID NO: 68908

SEQ ID NO: 69015 - protein, 615 aa, Xanthomonas campestris; identical to SEQ ID NO: 68909

SEQ ID NO: 69016 - protein, 764 aa, Xanthomonas campestris; identical to SEQ ID NO: 68972

SEQ ID NO: 69017 - protein, 615 aa, Xanthomonas campestris; identical to SEQ ID NO: 68973

SEQ ID NO: 69018 - protein, 755 aa, Xanthomonas campestris; identical to SEQ ID NO: 68908

SEQ ID NO: 69019 - protein, 615 aa, Xanthomonas campestris; identical to SEQ ID NO: 68909

SEQ ID NO: 69020 - protein, 741 aa, Vibrio alginolyticus
MKISFVDIQNFRKLKRCRVEFAKEQTLLVGANNSGKTSATDALICFLDKGKKITSTDFTLCNWVALNEFAESWMKQGATLAELPEWQPYCPSLDVWIDADVKEVQRVSHLIPTLKWDGEPLGVRLIYQPQDLDRLRENYVRERDAVVKVNKDKQLSLWPRDFKDYLKEKLHVEFEIKAYLLDPSKKDETQTLSNDSICFESDPFQGIFRVDTIEAQRGFSDPHSDLGKSTSSLSSQLNEYYKRHLNPSDMPEAEDLDALEAVEKAQIEFDSRLDKAFEKTLGEIKELGYPGFTDPDIKLSSRLNPIDTLEHDAAVIFDVRKQNFGDNTFSLPEQYNGLGYKNLIHIIFQLITFRDRWLKVGKIGKKRSEEDAAIEPIHLVLVEEPEAHLHAQVQQVFVRKAYKVLREYGTVDANLTTQMVISTHSSYVAYEAGFESLRYFKRKPASKGQPTPQAEVVNLATVFPSEKKNETDVSSTNKFVSRYLKTTHCDLFFANGVILVEGAAERMLLPHFISNHHQDLRRSYISILEIGGAHAQRLRPLIELLGLPTLVITDTDACDSLGKKARPKRGASLEFGSETLKSWFEFGNLTLDDLLDLPPEQKVQSNVRVSFQYGIQTKFTPKARTTKEVIPYTFEDAVALTNLELFRKLTKSTGMVKKMHLATKMTTLNACCNAMYKALDGEKAKMALDLLYDVEPNELLVPEYISEGLDWLEGELETMSLEYTWAPEDQASEIMEEMIGE

SEQ ID NO: 69021 - protein, 620 aa, Vibrio alginolyticus
MVNKPNSLIGVDHEIYGYLNLDNPKSFLLFAGAGSGKTRSLVNVLQEIREKNLGRLIQNGQRVGVITYTNAACNEIQRRLSYDPLFHVSTIHSFVWEMIKPFTEDIKGWLRTKLSADIEELDLKISNARDINGKTAQQNIRKREAKATRLDDLRLVRKFSYSPTSNRIERGTVSHEEVIQITATLLNESPLLQNILTNRYPILLIDESQDTRKELMEAFIQTQSLNRSKFSLGLFGDLMQRIYGGGKHDLESSLPDDWKTPSKTINYRCPQRVVELINSIREEDDKKKQEPKAGAPLGVVRLFIVDSDTATKRDVEVSIRAKMSAISEDSLWLEPNQIKALTLEHAMAAIRGNFDKFYLPLATVDGLRDSLLNGTNASLRFLCSSLLPLIEAIRVRDEFAIANIIKKYSGVISSTNADFCLDPISTLKNTDQSVEEIRAIVWELDPPLAQVLLLIKAYKLLYIPDELNALLVESSSLKNDDEEENLSQRSIAWNQALLAPISHLANYALYINEELGYGTHQGVKGLEFDRVMAIMDDNSANGFLFRYEKLFGAQELSQTDIRNQSEGKDSVLSRTRRLFYVICSRAEKSLAVVAYTKDPKAVKRKSLESGWFTQDEIEMM

SEQ ID NO: 69022 - protein, 623 aa, Burkholderia multivorans R-20526
MPNYAPESGVAITDVRVSNFRSLANIEVELNDLTVLIGANNAGKTSFLDAMFAAIGSGRKLLGQDDIRLMHGEAMPPKDRRVVVDIRIRPVDENGKVVDKFPEGSFWTALWGAGIVLDDHDFDEFMAFRTVLAWRVEKADYVVERLFLKEWKPFEEWIDTPTQDKPITAAQLEPVALHYIDAKRDLEDDMRRQGSFWRRMTEDLGLSGDEVAELEAALTGINQQIVDKSSMLQRLKTNLSDLQAVVSADSAGIDIAPVARKLRDLSKGVDVSFSTAGAQSFPLARHGMGTRSLASLLVFRAFTAWRGDVAAKNNDKLHSVLALEEPESHLHPQAQRSLFAHIKKIKGQRVVSTHSPYFAGQAQLEDLRLFIKKGGDTGARKLDLSKLEKADDIRKLQETVIESRGDILFARAVVLFEGQTEEQALPIWAEAYWGASIHELGFSFVRANGTDYFPFIWLAKSLEIPWYVMGDGEQKPVSDLEAALKKAGQPNIASSPNVVVVSSGKNFETQLLEDGYLAEIETALNEAHGRESFLDEFIDKHHGLELAKGKGVRDYKSDGGRIRAAADAMKASKTRLAKPLARTISGLTDPERRFPKHVERLFAVIGENHGIHKLAVEAEVEEQ

SEQ ID NO: 69023 - protein, 611 aa, Burkholderia multivorans R-20526
MRLSTLQAQVVEHVDGALLVVAGPGSGKTRVLTERVRSLLTSVPGHFRVLALTFTNKAADEMRDRLSDLGENRQRAFIGTLHSFCLEMLVERGKLVGVEGEPHIFEQHKDRKEILLEAIRQDPVLDEEVNQIVDRKERNRRVDNWLQMISRVKAHPITCAVLSDELDKRVLDAYDAGLRACGAYDFDDLLLLGYRLLTNNPKLADFYRRLYRFVCVDEAQDLNEAQYALLCALCGDSYKNVMMVGDPKQSIYGFNTSSPEYMEKFRFEFAAKLIELTENFRSSQAVVNVARSIDPNYLVDAQLPIKGDARVFVGDDEEHEARLIVDELELLFAQGHPDVEGGVEPSKCAILGRTRFALLAIENELRRRNVPFYKRLTANHENESDLVDEFHLSLRILANPRDRLHLAALATKWVTQPPETATDAMVALSQMARSAAEQRAKAVAEAVASIVQNTARLDLMPAFKLLRGYADSLDENSRRAIYEDVAVFQQEWDQYLRSDGTSRTLSGFMSSKALGATQKAHRDGVALLTVHSSKGLEFDAVFIAGMAEGTFPDYRAVGKVREMAEESRNAFVAVTRSKRLLYLTYPRVKLMPWGDYKAQQASRFVSMSGIS

SEQ ID NO: 69024 - protein, 591 aa, Providencia stuartii; identical to SEQ ID NO: 63700

SEQ ID NO: 69025 - protein, 632 aa, Providencia stuartii; identical to SEQ ID NO: 63701

SEQ ID NO: 69026 - protein, 752 aa, Vibrio parahaemolyticus
MLQGDTVYLESLSIENYRKFRNKNNVINFVEPSNIESMEASEEDSKSVIGPSTTLIIGKNNAGKTTIANALRLLCENSQPKSTDFNVDYISELHDKYLSESVEPIPLPELKFQLVAKVDMNKSDLMTNLLEFASVKGSGLSSVKITIKVEVSEATAFEEAIGKFVKHVKDGNLPRNESINLLYDLLEQSSDFLELNEESKLFKIKYYDSRGFEAKRFSLKELINLREIKANRHLKDGILTDVFNKIVGFQFESDEVGKNNLEKEIKSINETLTTSIESKSNNVSSVLRKIEDKSHVDLDLKGNVTYDSLVRNLIKYNFSDNGDYIPESQFGLGYINLLNIIGEIIHYVDSYKKDSYNSTINLLFIEEPEAFMHPQMQEFFINRIDNAVQHALDIANKNSDDKKVLNCQIAITTHSSHIVNSKIHSSNSFDNINYLTVLDKAANVINLNDSVVSGHHGKESDELKFIKKHIKYKVSELFFSDAIIFVEGATEEALLQYYIDKDDVLKNSYVSIFNINGAHGKVYLPLAKALKVPCLIITDLDIKRKDCQKSIKHSKDDDNCDYCGHKKGESDTQSVKEYTQISSLDKLITTNPTIISFKKLQNEEDLEDEETTENESSDSLEDLIYYTDENLHVVFQKDKINNFYATSLEEAFILTNSNNEILNETLRTCKPTIYRKIVGSQGSESLGNLISKSFEIQRKLSKSKSDFSSELLYRCIISEEKPTPVLPQYIQDGFNWMKETLTSSTSMKNGDE

SEQ ID NO: 69027 - protein, 709 aa, Vibrio parahaemolyticus
MSNRIEEEKQLLQSIFDVVEIGKSFRFSAGAGSGKTYALVECLKYLLKTQVAKLSKNKQQIICITYTNVAVNEIKERLGNSELVIVSTIHEMLWDIIQRYQPELVSIHLDKLKNELEKVEDELENDPDNKLGVFNTLLPDEKYSYVSLVKESKNTYYRNRNSRAAEFKAAYTEYHEDYGKAAVNKWQANYGKFKEVAKRVYKKDRYETAIDKIESQEKGYTQVSYDSIFNADRLDKMKFSHDTLIEYSERMVSDYPILRRIIIDKYPYIFVDEYQDAHPLVINIMKNLHDYSEEKNRKWLVGYFGDTAQTIYDDGIGSEIDTLHPKVEVIYKKYNRRSQKQIIDVANIIRNDQIEQEPIFDDKLNGDVRFHYVNNINEDTCRILIAENFVNEFQSSLGKDSEIDCLVLTNRLMAEMNGFGEVYESFREAENIYFDDLNTKLLSHELEKLEPIIRVIYKLLSSYLSIEDSSTTFYDLFGEKGRSISFYDAHSFVKILKEINPTSLSELLAAISDYHLANPHSSCLDIFVRRFLGAKQDEISDYGSIDSLVRGGLRDLMIIRDHDDDILNDLQIDKVNKVLNISIEVWSKWVRYIKKEQSGKIRYHTYHGTKGEEYQNVAIIMEHSFGSGNHGRNKFKKFFEFRGSDEKARIEALKDEDVRDKIINTQNLVYVACSRAETNLWLIYLDDISDIKNGIESIFSQIELWDKVD

SEQ ID NO: 69028 - protein, 576 aa, Pseudomonas syringae pv. actinidiae
MHLTSLSIRNFRNFLSINIPLVGNIVLLGENRVGKSNLLFAIRLVLDPTLPDSMRQLKLSDFWDGCDLTTNPQIEVHLDFADFDSDDMLVALLTDFRIAANPTVARLSYVYRKRSDISGVPQSSEDCEFVVYGGGDESRSVPNRVRRRIALDMLDALRDAEGQLASWRHSPLRPLLEDAFASVSRADLEGVAADLEAATAKMEGFPSVKTLEESLRSGIRDLAGSAHDLDARLRFAPTDPLRLVRSIAMFIDNGKRGIAEASLGSANVALIALKLAEFAWRREKNERNYSLLCIEEPEAHLHPQLQRGVFDKLFKNPDAAQALIVTSHSPTLAAIAPLRSIVILRRMPDGLSKAYSLASLPVTAEELDDIERYLTSTRSELLFSRGVIFVEGDAEEALLPSFADALGYNLDQLGITVCNVAGVNFNPYVKLAGSLGLPYAVVTDWDPLDGTKPPLGKARTVGIWDAYCEVNPAAKPLPPEGRTWCETAQFAEFSGVWAPCGIFLNDQTFEVAVANTPSLQGALLDILDEQGFGSIRSGRIKAWRSGTPVNPAQLLAMVSDIGKGRLSAKLTSKLPG

SEQ ID NO: 69029 - protein, 597 aa, Pseudomonas syringae pv. actinidiae
MWCPVSNRLALTQALAELKPNGAQYDAALERGHCVVLAGPGSGKTKTLTTAMARALMDDVVDPRGVACITYNNECATELEDRLARFGVGNSDRSFIGTVHSFALTQVIAPYARCISKLLPDDFRVATSGECRTAVEAAYKSVFGDTGNAHDRWRFAEEKRRRDVDRTCPAWKGKNLELVTFIEAYEAELRHKALIDFDDMPLIAFRMIKEHNWIRDALRARFPVLFVDEYQDLGHALHELVLLLCFESGIRLFAVGDADQSIYGFNGANPGLLQDLTARDDVKTIHLRFNYRSGAKIIRASLGALGEERDYCGMDGAAEGELNFWPVEGDHDQQARYISEVALPSLLARGFQLDQIGILYRAAWLGDKVSDALKKTSIAVLRTDGNALVRRNSRLARFVEACSRWVTGGWRDASPPYHQLLGQALAIVYGGRVSGAEEQAMTLQLMTFLRRGINCNETTHDWLTRFGRELLTPWQGIARNTHQEWEVWSELVARTDPARGLDMPLTIFSGRIDGSGRVTLSTLHSAKGREFDVVILFGINAEDLPNWRDTKSERAMREARRLFYVGVTRPRKELCMVFEKGNHSPWVAELYRRSRQE

SEQ ID NO: 69030 - protein, 342 aa, Pseudomonas syringae pv. actinidiae
SYCRITGNQFSYTRRDGRTDTKTQLLVSTHSSHITHEVEYDHLRYFRRLPAGMDGVQVPVSTVSNLSTVFGEGSYTQKFVTRYLRAQHAELFFADAVILVEGAAERMLLPQFLRTHFKFLDQCYISILDIGGSHAHRLRPLVDALGIVTLVITDLDAGKAKAAKPVRRGADLSTNNPTLKHWLRMKAASAKVDDLLEMADELKCQELDELFAIRIAYQTPILVALDQTGPLPVEVLANTFEDSLVLTNAAYFASRSGRGLVGQFARALQSATTSEELGESFFEALRDGNKAEFALEVLGATTFPMLTVPDYIREGLVWLEWKLRKKQSELVIVTASPGEEIV

SEQ ID NO: 69031 - protein, 615 aa, Pseudomonas syringae pv. actinidiae
MSVLPDADQVIQRCLDLDNPTSFFLYAGAGSGKTYSLVEAVLNFKERASERLRVEGRQIAVITYTNAAAEEVMRRLEHDPLVWVSTIHSFAWEMIRGFNDDIRAWIKVKLANDIADLEGKLAKARGENKTYRANKADRDRKLKRLENIDHVVDFTYSPTGENRGHQALNHSDVIGLAADFIQRRPLLDVLVDKHPVLLIDESQDTMARLMEAFLVVQAEASDRFCLGLLGDTMQSIYGHGMQNLACAVPEDWAKPEKVLNRRCPVRVVELINAIRAQADTHQQSPRHDAPLGTVRMYCVRSQPMSTFQIESEVARRMADVTGDSVWNSGMEGRKTLILEHKMASRRMGFDGVFVPLYQVDHLRTGLLDGTLPVLRVFLEGVMPILDAAQIDSFKLMEAVRLRSPLLARERLAAAPDQALTIAQAGRGTEGLLELFADADPLISDVVRVLAHTHLLDLSDRLRVAFEMGATDEDFPDTGDREALEVHAYRLLIGAPFSQLTAYAKYCSELSPYGTHQGVKGLEFPRVMVIIDDKEAAGFLWNYEKALGVVPPSTGDIQKEAAGEDNALTRTRRLLYVTCSRAQESLAIVFYTADAEGALASIVKAGWLHEHEILII

SEQ ID NO: 69032 - protein, 710 aa, Vibrio parahaemolyticus
MYINKLKIVNYKNFKHSTFKFKKDDVNTIIGENAAGKTNVFQAMRLVLDESLPSNSKHLDKEDFHRGLGHPFGHWIVISVSFEELSESEEEQVLANYILNDSGQPELDDKGIYTFIYRPKFHIRQDLYELTMEGKTLRKRQEMFESYIKQKQISRETYEAVAFVRTKLDFTNQDTYISHVGDFDKLVFPDPSQESSSELGCYKPPYFSLVKEVACTYVKALRNVVADLKYYKTNPLYRLLTLKSEQIEDRTDVVKDILNVNEKISSIPEIEALSSDISSSLLSTVGSTYSPKINVSSQLPEDFTELIQSLGLVVEDSSHYQGTGRIEDLSLGGANLIYLALKLYEYEAIRDTEEHITHFLLIEEPEAHIHNHIQKTLFDNFNFKNTQVFVSTHSTQISSASKISAMNILSRKNNHTEVFIPAKGLEEDEIKCIERYLDAIRSDVLFAKSTILVEGDAELILIPAMVKKALGVSLEEVGISLAKMDGTVFSHISNLFSPERIQSNCSILTDLDEAFVKEIDDSLSFANADYIKSQLNAEKSGETRKKRLDEYTKNNPFVSAFYAQNTFETELVKFENNRKLIENVINKTYTQQATAKKVVENLNSPNIPLRNFTILKFAEKIGKGWLATKICNHMNINVQIPDYIIKAIKFAMAESNQVEIFTKMMDYNVSHHHMDKVYMADFVRLSTYEEKRDSYLRTFENDSLCRLIGA

SEQ ID NO: 69033 - protein, 581 aa, Vibrio parahaemolyticus
MPYRNLTMEQMEAVRFDDNLLLSACPGSGKTKTLVSKLCYLLENKESLRIGKRKIVAITYTNVAADTIKERLLSYGIDSSALWIGTIHSFCLHWVIKPNINLIPRLCKGYVIIDEHEKQAKIDELKEKYHINKFERVETKLGLDYKPVYSRGVALFDLVREYHLYLGQNRLIDFDLIINLSYRLLKENSFLGRRLSKLFSHLLVDEYQDTSDIQYEILSSVVSRQQTTVTFVGDKEQAIYTGLGAVVKDKTDLKETFKLDSIAEKSLTGCFRSSQRIVDYYSNYQDGNIDIQSMSKLKDFASVVHLDNTIHKNDLAEYVANIIKTHLAQGIEQREIVVLCPSWFAVMELSRRLEEFSDDFSIDGFLVSPIPKNQDNIWLNLIRLALLEPSVENYIKRQRIAKTLSEFLYDIRETDELIQPKKILRAVNSLSIKAVGAIEKWIEGIIKDFYLKLNLEYNNNSLGASSMRSLLDATAQRMKSYSMNYEASDLHRFFCDPSGVKITSCHSTKGDEYDVVICTGLLKGKVPHWQDIRNRSMQHQNYVARRLLYVVASRAKKHLYMISENGYVSNSGYHYVKTEQL

SEQ ID NO: 69034 - protein, 581 aa, Achromobacter sp. DMS1
MYLAQLRISNFRKLQKVDLSFQPGLNVLVGSNNVGKTAVVDALRALLAGHDEPYPRLDSEDMHRPKGSAPAGDIEFQYVFRDLDPDDEADFLAALKPDALGKLEAHITIRYSEADKTGRLRAKRWCGDHEDMGLTADMMENLRGVYLPPLRDASQGLKPSRTSQLARLFQLLADDAGRDGINDALKKLDEELKKHEPVVNTHTAIKNRHGTMLGPQLAQILDLGLSGSDFQRLASRLSLVVDTFEIEQNGLGFNNLIFMAVVLSELAKNPEASYRGLIIEEPEAHLHPQLQAVLLDYLGTIKAVEGEKPVQLFVTSHSPNFASIADLDSLACLVDTGSSVETFFPRTIAFGKGKREKLERYLDVTRAELFFARRVIFVEGAAELMLVSVLAEKCGHRLREHGVSLISVEGLNFDSFLPLFGEKALKIPVAVITDADPVGEPDGDGEPQAAYPAPGTAVKVSDNTAKMKEGEDAFVKVFHGLKTFEYDLALHADNRVAMLAALKELHPKIGETVAVAVEAAEGDAAKARALFSGMFERPQNNVQKGRFGQALAQVIADGAACVVPDYIREAITHACQVKEPE

SEQ ID NO: 69035 - protein, 579 aa, Achromobacter sp. DMS1
MAQPSEEQLQVIGAPIAPMSVVACAGSGKTFTAVRRLAQMRRQLGDNRGRVALLSFSNVAVDTFRREYQNLVQKVPSSVAHGRVEIDTLDTFITGNVLRPHAYRTMSAQQAAFLVMGGEAFLGGFRFQTNTYPREITQMQVGIDNNGVHFCYADNDRTLRLDTAQATRLVHRLGQVGAYTHNLGRYWCYRTLAEQPGILRALVRRYPHILIDEAQDIGTAHQAIIEQLVGAGCQVSLIGDPNQGIYEFAGANGAFLTRYGQREGVNSLHLTRNFRSVPAILDLANRLSTRADTADRLVPDTTHGAFFVSYRNAERENLIAAFQAAVLAADLKLERSAVLCRARDMANKLGGNEGAPGQGTVKALAQAAILRDRHQDYLGAFKLVASGIVGLLANPPQGLVARITQPARYPGDRMLRRLVWAFTRNPDSGLPAATLTGDTQWHPLLLERTRTLLAQIAQDHGLASTSNLGNKLAKRGLSNAPLITAADLAANDDAPRIRVDTVHQAKGESLDAVLYLANREHANALLAGVDTEVGRIGYVAVTRARNLLWLGVPANALEELRPVLLERGFQEAGAAIAPA

SEQ ID NO: 69036 - protein, 765 aa, Pseudomonas syringae pv. aceris; identical to SEQ ID NO: 62768

SEQ ID NO: 69037 - protein, 623 aa, Pseudomonas syringae pv. aceris; identical to SEQ ID NO: 62769

SEQ ID NO: 69038 - protein, 643 aa, Pseudomonas syringae pv. aceris
MVATDALNETHDTSRVGETVCLHTPMAKVRRYRPFCNGITIKDVEMQLTRVAIRNFRNFKDLDVPLSGNIVVVGENRVGKSNLLYALRLLLDPSLADSARQLGQGDFWDGLGEPLEDEKITILIEIQGFEEDVDLLAMLTDYRLDDDADTVRLTYELRPLPNLGRFPASDEDYEFICFGGETERKRFGHDLRRRITMDTLPALRDAEGDLAMWRRSPLRPLIERAFSEVSRDELGEVQEAIRTATNDLTQFDPVRTLEENLGAMYASMSGPNQYIEPRLGFSTIDITRLYRNVKLLIDGGLRTISEASLGSANVVFLSLKTLELKQLMNENRRDHTLLGIEEPEAHLHPHLQRSVYRHLFEEFGGAGDERLSILLTTHSPHIASVAPLRSIMLLRETRHEGTVGRSTAELNLTDEDEEDLTRYLDVTRAEMLFARGIILVEGDAEKFLLPVFAKSLGYDLDHLGITICSVSGTNFQPYVKFLTALEIPFSVITDWDPRAAARPLGFNRALELVRTILRIRNRRNPRRIIAELEALNFKDFEARCDGYGVFTNVDTLEVDLFEDGDFVAPILATLRDEDLSDERSAWVDGWEDDPDTLDIVNYIKVIEAIGKGRFAQRLASRVAGVEPPLYIQSAIDFVVRRVR

SEQ ID NO: 69039 - protein, 595 aa, Pseudomonas syringae pv. aceris
MSDKTSYLLAAQTLRNNAGQWAAYESLGHCVVLAGPGSGKTKTLTIKMARLLAEDVAEPRGVACITFNTECARELESRLSDLGVEPGRRIFIGTVHSFSLTQIILPYARVARLGLPDDFHVATKSERDRALRAALDDMAKYPEPLREWEAKMNGYRQSILDRGRPEWLEINPELARLAELYEGRLRRMNLIDYEDMPLLALRALRENEWLRKALLAKFPVLVVDEYQDLGKALHKMVLGLCFTTGMRLFAVGDPDQSIYGFNGARPDRLRRLSERRGVETVRLRLNYRCATRIVAASGALLDEERDYDAVAGAPSGEVFFHPLRGRYEAQASVLINELLPQALARHPHLRLGDVAILYPAAWLGDTMVPAIQQAGVPFIRTDTNALYSRSSRLMHWLEQCAIWCCGGWQSGSPLFSQLTNTGKHLFSNAIRSDTQAAEFHRGLITKLWASREVALPLLGWLTDFRDRLLAPLGAECPDLADELTILADFIDRISPEGDSHGMCLGSLAGQSKGKDSLNLSSLHSAKGREFPVVFMFGADVGRMPRDGSTDPEVAEARRVFYVGLTRAEVEIHMIYTQGRASPFVSEVQRRIENGD

SEQ ID NO: 69040 - protein, 615 aa, Streptomyces virginiae
MQVRRLQLQNFRGIKQGTVFLDGHCLLVGSNSAGKSTICEALDVVLGPERMARRPVIDEYDFYGAQYQEHDGELPEVRIEVLLTNLSEVAQRRFGSHLRLLSRRTNDFLDLSPTGLQEAHEAEWCLPVVFCGRYDPLEDDFVGGTFFAHPENLPDEPTGDDMVALGAGLKPFTRADKRHCGFLYLRPNRTGNRALTFQRGSLLDTIVRLEAELAGPLWESTLRNLDQVTIAAADSGFDKIRTEIHERINRFVTLGDTPAPVDFRASEITREHLREVLRLFIATQPSIHSVPFNRLSTGSLNLLVFALLTYIAELKGDKSVIFAIEEPEIALPPHAQRRLVDFVLKNMGQVIVTSHSPYVIEKFEPSRTVVITRDGQGTLTSRGVTLPSDFKPSKYRVYRRQFAEAVLARAVLVVEGATEAALFPAVSDVLEADPTVPDYVHIDLAGVTVFDAQSDVSVPLFGPVFQALNKPVYGIHDQPTNALAPALLAKTSAFTHYTELEYKSVEKLLVAEVPVAVQRQFLFTVAQRDDYPSGCARPAVGASDDEVRSLASNVLAARKADGYGALLIAECKSRSDLPAVLADFLLAIDSDLRSVVSTETVGDADGSLPGVSNED

SEQ ID NO: 69041 - protein, 571 aa, Streptomyces virginiae
MRIDEERQAILDSAGHLVIVGGPGCGKTSIALLKARKVLDTLEGEQRVLFLSFSRAAVRQITDRMAGVFDRTGRERLEVKTFHASFMEIVRSHGRLLAGQPSRFIAPDRERKLKADFDGDWDTERRRLAAEEGRYVFDLLAGATADLLERSASLRALYSSIYPLIIVDEFQDTNTDQWRVVKALSATSTVICLADPDQQIFGHLEGVEEGRLDEAIEQLKPRQFDLSKDNHRSPAGGLLDFANAVLRNVPHPKADGVFTWTYTPGWGVPGPVVVHRGVVAMRRHLTERLGRTPTIAILASVNSVLWPVSEALSTERQMEGGTIPAVDHALQWDPELSAAAGYTVASIMEWPGLTRTEAIVGTGRSIADFYREKLANGTAGARSKINTVENGLTALIEGRPIRSNCVKALVAAYDAGISFTGQPVIDWKAARACLTGSAELGEVLKHARLLRLLNATDALAWALTDSWDGTASYGGAVAAVRAVLGAEALTASQQPVEPVSLMSMHRSKGKEFDGVVIFEGAYAGRLLDSAWDAERILAQRRLLRVAITRARSLVLFVRPQESEALCGTSTP

SEQ ID NO: 69042 - protein, 641 aa, Salmonella enterica subsp. enterica serovar Typhimurium var. 5-; identical to SEQ ID NO: 62984

SEQ ID NO: 69043 - protein, 553 aa, Salmonella enterica subsp. enterica serovar Typhimurium var. 5-; identical to SEQ ID NO: 62985

SEQ ID NO: 69044 - protein, 641 aa, Salmonella enterica subsp. enterica serovar Typhimurium var. 5-; identical to SEQ ID NO: 62984

SEQ ID NO: 69045 - protein, 553 aa, Salmonella enterica subsp. enterica serovar Typhimurium var. 5-; identical to SEQ ID NO: 62985

SEQ ID NO: 69046 - protein, 641 aa, Salmonella enterica subsp. enterica serovar Typhimurium var. 5-; identical to SEQ ID NO: 62984

SEQ ID NO: 69047 - protein, 553 aa, Salmonella enterica subsp. enterica serovar Typhimurium var. 5-; identical to SEQ ID NO: 62985

SEQ ID NO: 69048 - protein, 641 aa, Salmonella enterica subsp. enterica serovar Typhimurium var. 5-; identical to SEQ ID NO: 62984

SEQ ID NO: 69049 - protein, 553 aa, Salmonella enterica subsp. enterica serovar Typhimurium var. 5-; identical to SEQ ID NO: 62985

SEQ ID NO: 69050 - protein, 69 aa, Streptococcus suis
MKIKKINVQNYRLLKDFSLELKSELSLIVGKNNCGKTSVLSVLEKIINKSSSLTWEDINLYHRKVIFET

SEQ ID NO: 69051 - protein, 637 aa, Streptococcus suis
MVTRTVEQEVEKVFEAIKQGQNFILEGGAGSGKTYSLISIIEKILIEEPKKSIVCITYTNNAVAEIKSRIINDNLWVSTIHEFIWHIIGNFQKEIKECLVELINDDSQKLFVSPKDVIEEESISLDYFDDVRVDYAEWYSMSITEQNKVQISHDHILIVAEKMFSKYKKLCDVLADTANYIFVDEYQDTSPLIVKILLEHLQKSTKKNVVGFFGDSMQAIYDSGVGDLNSYNLAKIQKTQNRRNPKKVIDLANKVLVQTPSNDDTAPNMDDGSVIAGTVKFVYGNDINQLDVLRNSKLYKALEFDIAKKTKELRLTHKLNAEMAGFSKLFELYNTDLFVKLITGIKKKINENKIADKGKTFEELVEEAKIAVGKGGPLIIDVVNSIPELLAFYDEIKTCSFEEVSNKSKVNKESLLAYKFNGLSSRYEAGTDRDRILKRLDLIYELLELYKTGKHNEFLRITKFNITSSEDKISLSKVMTKISVDDITIGKVIELAEESGLISKDDLFTNFIESRGHYLWSRLKIMPFQEYVNSIAYLREYVSVITQHKVKGSEYDNVLVLLDNGKWNQYNFDSLFGKGSVNENVQKRTKKLFYVAITRAMKNLIVYMPSNDSQIIQKAQDYFEPIDIIDVLSLVDE

SEQ ID NO: 69052 - protein, 615 aa, Paenibacillus peoriae
MFLLEVRITNFRKFGQGTNGEPGLVLVLNKGLNVLIGENDAGKSTVIDAIKFVLLTQSREYSRLEKDDFHADSNELKIECIFKGFSVNQAKDFLEWITIDSDKQYSLRVFLTAKKDVKGKILIDDVHAGSDSEGQILHSKARDLLRTIYLKPLRDAENELAAKRNSRLSQILYSHPEFSTGEDHRLVEIIKEANQKIKRYFDYDELTSEEKKILKSINFYLSKFSDNKNLLSSNIEIAAVNLKMILEKIDLLLVTTKSGLGSLNQLYIAAELLLLQIEKTEGINLALIEEIEAHLHPQAQIRVIDYLQELSESSTSPMQILLTTHSVTLASVIKLNNLILFAEGKSFSLSEGNTKLHNGDYRFLERFLDSTKANFFFAKGVMIVEGDAENLLLPTLADKLGKSFAKNGVSIVNVGSTALLRYSKIFIRELDPIMQLPVAIVTDCDEPVSKIDKESGGIVMLPARKPQKIKSEKKVKYSDQNVKAYISHEWTLEFDLACSCLKKELFASILMARDYANQDKELTEGRAAKTYKEIGDYLKEAETQISGWSTYEPFMLASNIVRDVILKKNISKAVVAQCFSEILNERSFTLEELEDIRSDSYLKYLVDAIDYVTGA

SEQ ID NO: 69053 - protein, 656 aa, Paenibacillus peoriae
MQMLTVTDEDIEYAAKVLNIPNGFDTPRVNVIKCMESRDVVACPGSGKTTVLLAKLLILARHIPLKNNRGICILTHTNVAIDEIKERLGDKANELLTYPNFVGTIHSFISKFLANPAFVNYYSGRISRVFEPVDYKLRLIKKYKSLYPPFSGSKLDGFLYGRLNKKIKESKDNSKIAKAKDDLLRSLELDYTDNTIKKVTFNKKTTVLKNPNSDAYKEYITLIDQLQNEGIYSYNELQGLAHRYVNDFPRELQSIFSERFSFVFVDEMQDTSLLQLQVLEKIFDNEKMIFQCFGDPQQTIYESDDKGCSWEPKDPLFIKNSNRLSKSIAKVADVVALKPYGMQGRESQKGNLLSPVIISYKDNDVSHVLESFAKLIIKYKLNELDNAIFKAVGMVKDKNEELSITSYFPVFEKLEIRSNVNKDFSDLKSYLVMLDRAVIEKEGIKAYYDRFILAILKYLRINDIRTDEGRLFSKVSFLKYLRENDVRLYKTTHRYFARIVLAIAKGKCVLASFKYILAIIVNRLFRFKVNIYKDEFMNGTPLVATIAVNEEEVNMYRYDDLRIELDSVHGVKGQTHNATLYLETFYFSRTNESIIKFLIGEQSSTIEEHVEKHIRVAYVAMTRPTDLLCIVLNEEIYLENKVKLNDLGWIHYQEII

SEQ ID NO: 69054 - protein, 733 aa, Clostridium botulinum; identical to SEQ ID NO: 65918

SEQ ID NO: 69055 - protein, 617 aa, Clostridium botulinum; identical to SEQ ID NO: 65919

SEQ ID NO: 69056 - protein, 682 aa, Leptotrichia sp. oral taxon 212
MKLKKIEVKNYRILKDFKLDFKDETTLIIGKNNTGKTSVLAIMDKLLNQGKKNFKWDDFNIEFQNKIYEKITTKDFQVLKENREINEYGIRLTLFIEYTKEDFYGNIQDFMMDLDEDNNYIIVEFNYNCKEDNLRELSIEFNKKNKGDKNNFTKFMRKNSEKYFNLEMYALKYNKSTNSYLENEILEISNLNQIKRVISFNGIKASREVSNKENENSLSKLSEKYFDISKTKNDKEFDDLIQAIENTDEKLNNLYNGKSKNQVGIFSGITGKIKEFSGNSNEINIYINSQIQEKELFKSSSRLFFDYNRIKLPENHNGLGYLNLIGMIFEIENIVNDFINNVSDINILYIEEPEAHTHPQLQYIFIRNIKKLIGSYRESGIKLQTLITTHSSHIVSECNFNDIRYFVKNNEGVESKNIEILKENYKDDEQAYKFLKQYLTLNNAELFFSEKVIFVEGTTERILLPYMMKKIDLEDKTKKFLPLLSQNISIIEIGNYAQIFKKFIEFLNIKVLIITDIDAAKEMITKDNKRETEKCNPVEATKSTNFSIKNYLGETLKSKNKNNEFKKIATLSKKEKIVKCGSSEIMIAYQVKEEGYQASSFEDAFISINYDFIKENKNGFSEGLKNQKKLNEEEIDFYELTQKCINKKSSFAIEILLCSDENYSDWKIPKYIKEGLEWLKEN

SEQ ID NO: 69057 - protein, 214 aa, Leptotrichia sp. oral taxon 212
MIYESINLYNENKYVELFKKLKIKISSYEDKIKIRKEMNELIELMKSQNDKIYEIIDKANNILNIKNDERYIEFIENRGWYLWNRIKDISFSEYVKSIEYQKEYFPYSTQHSVKGSEFNNVLVILDNGKWSKYNFNLLLENIFDENNILDKTKKDIFNRTKKLFYVCCTRAKENLIVFIQINNQKINKEKIISNAKELFGEENVISGDELINNI

SEQ ID NO: 69058 - protein, 650 aa, Rheinheimera sp. KL1
MHIERIKLQNFRSFGPEVQSIAVDPDLTTLVGANGAGKTVLMQALQRMFGISNEQRTIRRQDFHIPSSEEDSPSKRTLTLEAIVAFPELDDEDGDHSVIPDFFHHMSVTDEGGKLKCRLRLDAEWEDDGSIDGYITSQFRAVTTWGEPEDADFHNVRPADRSRIQLIYVPATRCAASQVSAFLKGRLWKAINWSEQVRSSFTQKATELNESFEGENAISIVTEKLTGRWQELHSAGTDSTPKFRPVDLRFEEFVRKVEVLLHPDESGRDRSIDELSDGQSSLFHIAMTSATLDVETEILAQPESEDFLGADLPLPSLTILALEEPENNLAPYYLSRIISQISSLVLGLRAQAVLSSHSPSILARIQPTQVRHFRLATESNTTVVRQLTLPDEENEAAKYIQQAVRAYPELYFAKVVVLGEGASEEVILPAISEAMGIPIDKSFVAMVPLGGRHVNHMWRLLTDLQIPFITLLDLDWGRHGGGWGRIKNAVSKLIEYGVDPSEIFGQYLNPLGYQHNLAAFDTGSAADLTSISSWVNALRHYGVYFSSPLDIDYSMLKAFPDQYCVALDESSTGPSNRGEPGNAVMGDEGSPEFYADDLQNLRWYRYLFLGRGKPSTHIRVLGSIPSVQLAQNAPEELRSLVQSIHAALQR

SEQ ID NO: 69059 - protein, 634 aa, Rheinheimera sp. KL1
MKFIQSDHWQPQGIDDLEPNAWQALRRRESISVIAGPGAGKTEFLAQKAAYLLETGLCPPNKKILAISFKTDAAKILADRVEKRCPEELGSRFVSMTFDAFSKNIVDRFRMALPPQWRPTKPYDVTFATRQQITCFLGRERQKNSHISGLLNAIARINPITFESTFVGSRRLGLASNDIGERTLYDNWLSEQVSCGDEEPSQLTFMTINRLAEYIIRTNDHVRRALRATYPYVFVDEFQDTTYGQYDFLLSAFGYSETTVTVVGDYKQRIMGWAGARGDAFHQFEADFSAQRYPLLLNHRSSPELVRIQHVIAQAIDHEVREVQTSNHSQVSGDAAWICFSRNVDHEASYLAQWIASDMRSRSLNPRDYSVLVRQRPEDYEEQLSSYLTQYGLRLRNESVKIGKTTLQDLLAEELTILFTNLLRLGLGHRNAQVWNQLSADVQLLRNTTPEDDKALRQVERLLALFISELKELMRQSLTPDNARLVFERIITFIDLNDLRKTFARYATGDLLEINLTALEEFFTNCADTQSSWENFLEEFEGTNQIPLMTIHKSKGLEFDTTIFMGIDDNAWWSYRPGDSEGLSTFFVALSRAKQRAIFSYCQQRGQRANVADFYALLEAAGVQEYVIPPSVVS

SEQ ID NO: 69060 - protein, 592 aa, Bacillus thuringiensis
MYISKVKISNFRNFKETEVELGKQMVIVGENKVGKSNFMHALRLVLDPTLSESSRLLQLSDFWDGLTRPLNDEEIRIDIELTEFEQDDKLKSVLSDFLVKDSPLTVGLTYRFFPVDENGNKIYIFKVYGTETENIFSYEQRKWLPLEVLSGLRDTESDLSNWRKSPLRPLIERAIETTDKQELENVAEEITRSTDSLKELDEIGSLTERINTQLENIVGDRHSIETSLGFSPADASKLYRAIKMFIDDGNRGINEASLGSSNLLYLVLKLLSLEQYVDENERAHTFLAIEEPEAHLHPHLQRLLYKYLLNHDKIIVEGSQEQHKIHSVSNILTTHSPHIVSVAPLKSIVLLKETHGEDKSTKIVSTAKISLDDKDLKDLERYINVTRGEILFSKGVILVEGDAEEFLLPSLSELHGIDLDKHGITVCSVSGTNFLPYIKLLGSEGLDIPFAILTDYDPRDTLPLIHNRLIKLLDFIDEEYDHSDLETEDLIIYGKESGIFTNSHTLEVDLFDTMPDEITETLTELTTNSKAISRAQGWKLASSIKGDEKRYLSDIESIGKGRFAQRLSTNLTNLSVVPEYVKGALDYVIAKV

SEQ ID NO: 69061 - protein, 608 aa, Bacillus thuringiensis
MSSLKFDKLLYREASKDLSNNEAQLKVYDSTGNCVVLAGPGSGKSKILTLKLARILNEDIEAPQGVACLTYNKECARELKEKLYNLGIIESSTIFIDTVHSFCLNHVIRPYKHLVNANLPKEIKVATSREVRETMLRTFNLTIGQNERYTSSWSTAFNVYRRTFIDRKSPEWKTNDSDIAEWILNYENSLRHQGLIDYDDMVLHGLWMIEENQWIQGLLQAKFPVIAVDEYQDLGASLDRIIRVLCIENDTRLLAVGDPDQSIYGFTGAQPSLLNDLAQQSGVLKIRLKKNYRSKGNIVKASIASLLEERDFVSNRDEEGSIKFYGIRDGIDAQCDYICKEIIPKILTLDPSSTLGDIGVLYIDKNDGDRIAEKVAKEGLQYIRVDGNAPYNKNQLTVWIENCAMWCSGGWLKGSPQFSGIERTFSSFFLKSNMSEAKLESKKLNLFNFLFRSRDVELKLSDWLDEFNKSIVSELLDCFTEEPDIVKEYDKLIESAKDGQLKDFKVSSLSRQVGSESHLNLYTLHSSKGLEFKYVIMFGLEHGRIPWLNAREDKINESRRLFYVGLTRAKDEIHLLCSGWYYDYYDRYQNYGPSKFVLELKKFVDNNL

SEQ ID NO: 69062 - protein, 600 aa, Stenotrophomonas maltophilia; identical to SEQ ID NO: 62594

SEQ ID NO: 69063 - protein, 550 aa, Stenotrophomonas maltophilia; identical to SEQ ID NO: 62595

SEQ ID NO: 69064 - protein, 639 aa, Prevotella sp. 109
MYLSKIYIKNFRGIKELLVKFDKKLNVIIGANGQLKTSLMDAIRLFYTWGEPNRDIEITKEDFHVEITENPDGTKTLINSTRIDIYYLFEELSTQQEGTFYQYLVSQNNGTTVARIHVSFEMNENGRIYSSYITGKEENGLRADWNTFHYFHPYYLGALRDSTRDLLSSRNNLLGRVIKRKIDRAGSENDVKGIVDNANEQLLLRPEVIETQTGINDNLNQINSSSLQNVELHIEQSRIEYIVNIIKPFLPYSAADKKGFVLSQNSLGYNNIIYIASVLSDIKDCHIEDNVSIYALLIEEPEAHLHPQLQVNLYNFLKDADTNENSQTFITTHSPTLTSRIPLENIILLKDNTTFLVGNCFKERHSEKIVRDAASGRLLQEEEVVYYRKMISRYFDVTRSQLLFSSGCLFIEGISECQLVETFSKLINKSLIANQIEIVDTDGTAFYQFLMLFNSSDSTKRLPMKSAFITDEDQFTASKDKEYNLNELVKNNYAKLHLLREGINTGRVNGRINNMTAMSNRQPGIKICSGKKTLEYQICKANVFANKEMTKETWLYELIQQMNPNGMDKVDFYMSGLGDRDMNEDEQQNVALLMWKCLPDKAEFAQTLNSFLLDKKEEGSDIKFTLPTYIQEAINHLIP

SEQ ID NO: 69065 - protein, 605 aa, Prevotella sp. 109
MNYYITHQRQAYIDARGYTILTACPGSGKTTSIVKKLLTVSHFCEKHYGRHTGFVCMSFTNKACDELKHKYQEMHNEKLTFPNEVLTIDSFIMQYVVLPFWYLCDACKKKPIVVNEKEILERIYYRKVLINGIWQQHLIMALRPYCKIFYKKNPSLITREKTSFKWNHDIVTNKNEIAYCKEAFKYRLEKGFITSSDALWIACDILQHHQNIGKALVTRFPYIIVDEAQDNSELHFEFFKLLKRAGLQNLEFVGDICQSIYGFNNARPELLQNMMSEEEWNVLPLSECWRSNQRIIDLYSKLKSTTVPAITSHKVEDKGIPIIVYKYDDGNVREIIRNFYHVCDDNDLSKRIILARGIDKCKELSGVNDVNFKYWKTEKPLPYLIIDAVFAFASDDMNSAFRKVRLVLAELMIGDNPDKRREFMHEIEHNLDWNTKIFGFIKQIPSFSLSFKEWSEQTCTLLKEYWKLKEKPVFVPYQRQKGYKMKEMANVPVEQYHQSNDKNSEYHKSIDTIHAVKGATFDAVLLFLSSDSRGQSISLNDFPDNGIEVMTESQRMIYVACSRASQFLALAIPRSIKDEKIRRALSGIDIDIRNINLQGELTFTD

SEQ ID NO: 69066 - protein, 715 aa, Lysinibacillus sp. FJAT-14745
MHISKMYLRNFRNFCSQNFLFHPGVNTLIGENGSGKTNAFFALRLLLDNNLPISASKLIENDFNRKLSRWQGHWIIISLQFEDLDSSEGANILAHKLEHVDEASSSGSYHFYFRPHKKIRKKLYELSLDEDKDQQKLEEILSAITINDYEGVYHFRGTADFSNEAVYKELVGDFENIIFPNPDDDKKDLLGITSSQIFLVRSEIACTYIKALRDVMAELRKSKQSPLLNLLRGSAKNIQVTDASNITTKVTELNENISNLSEIKELAEKVKKTLDSTIGFTYAPNVSIRSELPEDINKLFQSLTLWVGDGEDTSHQGKLEDLSLGGANLIYITLKLLEYEYKQPTEEKAAHFLLIEEPEAHIHTHIQKTMFDNYKFQNTQVITTTHSTHISSANKIKSVNILCKESNETIVCHPSNGLDDNECTKIERYLDATRSTLLFAKGVILVEGDAELVLIPTLFKSVFGLSLDEIGISLINMNSTVFDHIANLFDDKRIRRHCAIITDHDQSLIPLKENKDDDTDEEKKSRNSAIKGEERKQKLNQYCVDNPWVEAFYAEHTFEVDFVLNGNRREIIRTLSKIYKSQKSIDTSKALLKSKDDITVGCEALRLADKVVGKGWFALTLAEEITYETFIPVYILEAIAFAAGHIGYKHFEKMAKYRVENHCSHEELCDFIDTLEKLDDIERTCIKIKELSKDYLEDNDDLLLLIDTYEEYHVC

SEQ ID NO: 69067 - protein, 597 aa, Lysinibacillus sp. FJAT-14745
MLIGLNSYQLDAVTTDKNALVIACPGSGKTRVLTSKIAYELEKLESKKKFIVALTYTNRAAEEIQRRLDDLGIPQEQLWVGTIHSFCYQWIIKPYSAYEPALINGFSIIDDNKKLKILNDLKKKHSVPYFNDVTVAFNREGEYINSDFSANEVAKEFHDIILENKEIDFDLLLYYSYKLLKSKKKIRSHLANLFSYVFVDEFQDTQDLQYAIIGQVIAEANDKCKLFLVGDPDQAIYGSLGGTSKSLYEIQEEIGNQEVVLKEIPGNYRSSQRIVDFFKNFQSTKVSIQACGRYAEENGLITLNTTTHKDNLSKEIADIITYNLNNGVTPNEICIIAPQWYFLTPLAQKLKSILPDVPFDAPGVSPLPTNRENFWWKLSRLFLSEITPNTSMSRFRWMKQIIDDLNSYTNGSLGNEYTDCRRYLKIINSIKPNETIGILYLKKAFIAFFNILDLDIYDYYVLKEQWDIFFDGIQTRYESSDFIGTPDDIQYFKNIFKPSTGVVINTCHGVKGEEFETVIAFGLLWGYVPHWNSIIKQPYDISESASKKLLYVIGSRAKRNLYLFAEQERKTKSGYNYQINDQLAQANFQYDILATFK

SEQ ID NO: 69068 - protein, 769 aa, Pseudomonas coronafaciens pv. porri
MPEALVTTPIAGNITLRFVEICQFRRLGKVQLDVDKKTTILVGANNSGKTSVLAALRHFLSDGSPFGAFDISLSQWPKLRALGKSWEVLKEDPSTVTGSEEQWMQQLGIIHSAMPTLDLWFDAEAGMFHYVAPFLSKFSWKGGAVGLRLRLEPAASADELKQLAWAYHTARLPVKDMGADSLAWPIDLLDFWLREPHKLGQVRAYKLDADNNPLEGLQTYATQTLPADSSPIERKNLQKLIRADFVAAQRGLGSEEADSRSASGPHRVGMFSNQLLKFARQHLNVATTGHGHRADLIKAVAEAQQALDKKIHEAIAPSVEEVKELGYPGLHDPQEIRFRTRIQTADLLDHGTAVQYSMQKDSLEELLPEYSIGLGYQNLQSLSYQLVSFKAARLKPEKGAPVPVHLVLIEEPEAHLHVQVQRIFPDKAHKLISPNDKDASGLKSQLIISTHSSHLAHAESFDRLRYVRRIAKSAENLMPTTEVVNLGQIFGDDKKTRQFAERYFRVQHTDLLFANAAIFVEGVAERMLVPLFIERDFKMLNSRYLSFLDIGGSHAHRLKPLVEKLRIPTVIITDVDPVEERAGKPTKDGEPTTTLVAVANTGQAGLQCGNPTLRGWHPKLQQLEDFKNPAEVQLVWKEVAECLVRFAWQLPVAEAGDHWPSTFEDSLILKNIPWFKGLMDEKVDGDGNKTKPPKGTLGSVARRVAHHGNISDLLAALHKLMHGSFKKGDFAASIFEMVATDEPIACPKYIADALEWLQTQLDPNPELMS

SEQ ID NO: 69069 - protein, 649 aa, Pseudomonas coronafaciens pv. porri
MTAVPILGDNDRDAGVVEEICGYLTEEPPRSYFLFAGAGSGKTRTLVEVLRRLTGVIEHDKGEQLARRLRMYGRSIRVVTYTKNAVSVINGRLGDNDLVSVSTIHSFCWELINGFNDDIREALIAVKEAQLAKETAEAQAKPKGITPAKQRDLDEIKDDIEAFRATDVFIYHPDRNTYGPGALAHNYVLDATAWLLRNKPTLQTILKDRHPIVLIDESQDTMKGMLNALMGLAEQGVSDLTLGLLGDHRQRIYAHGHADLPSLVPQNWATPELQMNHRSQRRIVTLINKVWEAELEGRTQPTNGVEQYPRTEKAGGVVRLFVGDTSRSPEDKVLGEGWCSDRMHEATGAAAWNQGQYQLLALEHKLVATRGSFLDVYEAMVLLDPDAAAPSGSGDNKGPSAVQVLLNELAQLEACVGINGAVNEFKATEVFRRYGSLDNMPEECAARASRVEEMLKAITAFATACANPKSTVAEVLAPVLGANLFEIDHRLSEAYADKSPHLPAPGRGEEESKQARMRRGWCALFAAPWKQLRLYRTYLAGDSVLATHQVVKGSEFIHVMVVMDDALAGGFLISYDKIFGGVELSKRDKENVELGKETTIDRTLRLLYVTCSRAQESLALVLWSSDPAAALARIKESNWFAKGEFQAIP

SEQ ID NO: 69070 - protein, 711 aa, Pseudomonas coronafaciens pv. porri
MHISRLQLVNYRNFKCANVVFNKGVNTIIGENGSGKTNLFRALRLLLDDTLLRAAYRLDEKDFHRGLGDWRGHWVVISLEFDEVSQDEAIQSLFLHGTGNIADGAIGKATYNLIFRPKAAVRRTLADVAVGDTVGLAEARSKITISDYETIFTGKSTANFLDPETYRQLVGDFDAVIFPQELTNPAIGGVIPGMLSISREVCFTFVQALRDVVADFQNNRTNPLLTLLKCRSGEIDPQSFEPITALVKGLNDAIEGLPDVETIRTDIRDTITDAAGETYSPRSLSIRSDLSDEADRLFQSLKLFVGESEEEYEGAIHELSLGGANLIYLTLKLLEFKYQKQKESFANFLVIEEPEAHIHTHIQKTLFDRLNFDDTQIIYSTHSTHISEVNNVVNINILGRQDGRCEVFQPSAGLDAGQIGNIQRYLDAVRSNLLFAKSVVLVEGDAEEILIPILVKKVFGLSLDELGISLINIRSTGFKNVAVLFHNERIRKRCAIITDLDRAFIDTTTDILDSDDKAAAKKKALGSQIAGLQREAALKELCAGNPWLTAHFADHTFEVDFVSVGNVGTVVSVLGDVYKDGGTIATSKMELESGDIALFGTRVLTMARYAGKGWFAIILGRMITPETSIPDYILDAIFHAHIPVSIQTWARVLDYRVSILAASQLHAPGDIDAMRAHIRRYHRAEIDFAGVRAEMLQAFPADGINTILADF

SEQ ID NO: 69071 - protein, 598 aa, Pseudomonas coronafaciens pv. porri
MFVWDRKDLNDAQVAAIEHPGSVFLVACPGSGKTRTLTYKIARLLSELKSDKKRVVAITYTHRAADEIQERIEQLGVDTSQLWIGTIHSFCLEWILKPYGIYHSELMHGFRVINAHDTERMHEELCSAAQGTKLSSFDCAYYFTPNGYVLTCNKTNKHEAIGEVLQAYWKALRAERQLDFELILFYAYQLIENNPSISVLLGSIFECVLLDEFQDTREIQYTILASILKASKGGTSAFVVGDPNQAIYGSLGGYAITASDFGTQCGIAFKEMELSHNYRSSSRIVSYFGNYKVLPSKIEAVGKDKDCASVVSFDHQTHRDALEEELVRLIRFNVETLGIAQHEVCIVAPWWVHLASMTRRLVAALPAYSFDGPGMVPFARDVDNFWYKLARIILTEASPQLYVRRMRWAGEVIADLSDAGVEVPGLDCKTLLRACNAIIITENDGLAFLRAFFDQLCSTFGIDRHTYAALQEHHDAFFESSQKRIDKLIKEGAEAIAELGMFRKVFADRTGVTVSTIHGVKGAEYDAVIAYGLLEGMVPHFSDPNQAETAKKLMYVVSSRARKNLHLISERGRSRGWSGDYQPTDVLTGCAFQYNQLS

SEQ ID NO: 69072 - protein, 804 aa, Stenotrophomonas maltophilia
MKLQAYRLQNYRRLRDVVIELDDDISIFVGANNSGKTSAVQGLYSMLRGEAKKFELFDFSAALWAEIDAVGRTPGDEDAPKRLPSILLDLWFHVGEDDLATAMSLLPSTEWDGKCVGIRVAFEPRDAHELVRKFNELHEKANNAAVALAAKRKSAGEHAVEAGAEDAAVVVADAGEYKPWPETLTKYLTKELGKEYTFRYYVLDERAFAGYQAKEADYEPLPLGNEPGGAAILKSLVRVDFLRAQRHLDDPDAGSSDRAESLSRRLSKFYHRNLEKRGDDHAALKALDSSEKELNFHLKEVFSDTLKRLAKLGYPGVNNPEIVIRAALDPTTVLGQDAKVHYVIPGVASAQLPDSYNGLGFKNLVYMVVELLDLHEQWKAEEDKRAALHLVFIEEPEAHLHAQIQQVFIRNVLRLLEDANDHADFFHTQLVITTHSPHILYERGFSPIRYFRRVSDQLDHHTEVRNLSLFKTGVADAPTREFLQRYLKLTHCDLFFSDAVILVEGNVERLLLPAMIESAAKRLRSSALTILEVGGAFAHRFRELIAFVGITTLVITDLDSVTVKTDAEKAAAQGAGVEGAVDGDDEDDDLKPFELEDDDEAEPGRKKKSKKRGSTCHAHVEGAVTSNQTLISWIPKKRSVAELWEVTAEQKTLSLAEGSSAEIRVAYQTKVSVTVGAATSQLCGRTLEEAFGLENADWCQAEANRAVGLKLKRAPSSPEELAEKLHDRVVGKNFDKTRFALEVLASGPLNGWKVPAYITEGLVWLEAKVAHELEADAAIATELTTIEPTASGVVAVIAGEGQTA

SEQ ID NO: 69073 - protein, 643 aa, Stenotrophomonas maltophilia
MSRRVDSPDTDADREIHACIAATPSRPFVVRAGAGSGKTTSLIKALDWVMSEHGASMRAKKQKVACITYTQLAAKEILADVNEDPLVHVSTIHSFYWSIAKTFQVDIKVWLQNDIRRRISTLEEDLENYGSRVRKTTRDRNKADQERYARNLEAVANVKTFNYGVGSDYAKGILGHEDILQLTDFLLQNRPLFRRVVALNYPFVFIDESQDAFPGVVKSFKEVEAQMRGKFCLGFFGDPMQSIFMRGAGDIPVEDHWRAITKPENFRCAKQILDVANAVRAQGDGMEQVRGLHERVGGDLRPVEGSARMFVLPNTLNRTKALTRVRAWNAATNNDEGWTTPDNGVKILVIVHRMAANRLGFGGIYSALNDKTSEAMKQGMQDGTGWPVRPFLSFALPIVAAVKAGNEFAVMNLLREFSPRLAPDALVGRRAADVLRELHAAVLRLVAMLDEALTTVGDIALHLRDAGLFEFDERYARVLGFVGDVSEPAQEAEAADATPTEGRSADAAMVKFFKCSAQELQPYERYVSEGSPYATQHGVKGAQFERVIVVMDEEESDYRTYNYERIFASADARAADRARAQDGDDNTWSRTLRLLYVCCTRAQRGLVLTFFVADPATFLENVVASGILPRSAIFTQDALVPSP

SEQ ID NO: 69074 - protein, 769 aa, Stenotrophomonas maltophilia
MPDAGPVIPVSGGITLRFLELCQFRRLGKVQLDVNKKTTILVGANNSGKTSVLTALRHFLAESSSFGSFDISLSQWPTLRALGKVWEALPEDPLTVPGDEEQWKQQLQALLSTMPTLDLWFDAEAGMYHYVAPFLSKFSWKGGAVGIRLRLEPASTVEELKQLAWIYRTARGPVKEMGADSLAWPIDLLDFWLREPSKLGQVRAYKLDAENNPITGFKTYASQALAENASRIDRKHLSKVIRVDFVAAQRGLGSEEAESRSASGPHRVGMFSNQLLKFARQHLNVASTGHGHRADLVKAVAEAQRDLDKKIHEAIADSVEEVKQLGYPGLHDPQEIRFRTRIQTADLLDHGTAVQYSMQKDSLEELLPEHSIGLGYQNLQSLSYQLVSFKAARLKPDKGSPAPVHLVMIEEPEAHLHVQVQRIFPDKAHKLISPTGADASALKSQLLISTHSSHLAHAEDFDRLRYVRRVAKSAASPMPTTEVVNLGQVFGDDKKTRQFAERYFRVQHTDLLFANAAIFVEGVAERMLIPLFMERDFKELNSRYVSFLDIGGSHAHRLKPLVEKLRIPTVIITDVDPCEEQVGKPKKNGEPTKRLVAVANTGQAGLHCGNPTLRGWHPRLQMLDDLKNPTDAQLVWGEAAAGLVRFAWQLPVAEANGSWPSSFEDSLVLTNMPWFKALMEGKADDDGVEIEPPTGALGSVARAAAEAGSVAEMVNALHTVMHGSLRKGEFAASIFEQLSSDEPVVCPKYIADALAWLQAQLEPSKEPMT

SEQ ID NO: 69075 - protein, 657 aa, Stenotrophomonas maltophilia
MSALAVPGNNERDDGVVDEICGYLTEEPPRSYFLFAGAGSGKTRTLVEVLRRMTGVVEHEKGGRLARRLQIYGRSIRVVTYTKNAVAVIKGRLGDNDLVDVSTIHAFCWELISGFNDDIREALVAIKQAQLEKETAEAVAKPRGITAAKQRDLDEIKADIEAFRLTDVFIYNPDRETHGAGALAHKHVLDATAWLLQHKSTLQTILKDRHPIILIDESQDTMKGILDALMSFAEPRGFGLTLGLLGDHRQRIYTDGHSDLPSLVPVSWATPELKMNHRSQRRIVTLINRIWEAEIDGRTQPANGVEQHPRTEKAGGVVRLFVGDTSLSPEEKVASERWCADQMRQASGSDAWSQGHYQLLALEHKLVATRGAFLDAYSAMVLIDPNSAAPTGSGENKGPTAVQVLLNELAQLEACVGPDGAINELMATEVLRCFGRLDNMPEQAAERARRSDEMLRAISAFATACQNPGATVEQVLTPILGANLFEVDHRLLDAFSDKSPAPPAPARGEEESKKDRIRRGWCALFDTPWSQLQKYRTYLAGNSVLATHQVVKGSEFAHVMVVMDDKLAGGNQISYDKIFGGVQLSKSDWDNVGKGKETTIDRTLRLLYVTCSRAKESLALVLWSSAPSVALNRVTASDWFSEGEFLAIPWPITKSHS

SEQ ID NO: 69076 - protein, 703 aa, Enterobacter cloacae subsp. cloacae
MYIKKLAIRNYKNFRSSNFYFVKDSVNTIIGENASGKTNLFNAMRLILDDSLPMNSRILLNEDFYHGLNEPFGHWIVITLYFDDLSESEEEQVIANYTINDGNEKATKEGNYTFIYRPRYHIRQKLFELTSDYGSIQSRKDAFEELKSNHIISKETYEAIAFVRTKIDFNDDETYIKVVGDFSNYVFSNPKEDDAAVIGVKKPPYFALGSEVACTYVKALRNVVADLKYYKTNPLYKLLTLKSKQIDDRKDIVDNVKEINEKISAIPEIERLSNKISTSLLNTVGSTYSPKILVSSQLPEDFTELIQSLGLVVEDSLDYDGSGRIDDLSLGGANLIYLALKLYEYEEIRDSEEHITHFLLIEEPEAHIHNHIQKTLFDNFNFKNTQVFVSTHSTQISSVSKISSMNILARQCGYTDVYHPSLGLTPKEISSIERYLDAIRSDLLFAKSVILVEGDAELILIPAMIKETLGISLDELGISLIKVDGTVFKHVSNLFHEKRLKRKCAILTDLDSAYVSVADDEFDDKFVQSLEAAEDDGLRRKDELDSYIEGNEFVSVYYAENTFETELVRYDDNKDLFIKVMRTNYEKDAYFKKAESDVNSSDHRIRYRRVLKFAKKIGKGWLATEMIEHLSVDNRVPDYILQAIKFVIRDRNVELIYQKMLDYNMSLMGAKEFDCINEENSFTSKMTEYKKHFNDSFVRLLEL

SEQ ID NO: 69077 - protein, 583 aa, Enterobacter cloacae subsp. cloacae
MPYRDLTSEQMDAVEFNDNLLLTACPGSGKTKTLVSKLCYILENKEFLGIGKKKVVALTYTNVAADTILERIMSFGINSDSLWIGTIHSFCLNWIIKPNIDRIPRLCKGFNIIDEHEKEFLLNDLKEQYDLSPYDKIDTILDFNFTPIYCRDIPEYNVVKAYHAYLYENRLIDFDLILNLTCNLLSKYDVLCERLSLLMGYILVDEYQDTSLVQYEILRLIVSKKNTVVTFIGDKEQAIYTGLGAVVKNKNQLQDYFDLKELTEMRLTGCFRSSQLIIDFYKKYKDDVYHINSVSEIKEFPSVILKEKNVDITQLSIYVAGIIKTHLEQGIHPGEIAVLCPSWFDVIKLSNEIVSSNPEIEIDGVMISPIPKNNENLWLNLIKLILIKKNPSNYIVRQKLFRDLLVELKTLAPNIEAESPKKILKEVNKIAFSLNYDCHIEIWLNELITRFCDFIELDMSNDSYPYKEMVSLVNATKKRMDKYNMNYKANDLHSFFNFKSGVKITTCHSTKGDEYEVVICTGLLNGKIPNWNDIIECSAEHQNYVARRLLYVIASRAKKHLYMISETGHKTQKGYPYKITPQL

SEQ ID NO: 69078 - protein, 703 aa, Enterobacter cloacae subsp. cloacae; identical to SEQ ID NO: 69076

SEQ ID NO: 69079 - protein, 583 aa, Enterobacter cloacae subsp. cloacae; identical to SEQ ID NO: 69077

SEQ ID NO: 69080 - protein, 406 aa, Acinetobacter sp. C15
MNGLGFRRLISITLTLIDFRETWLRKNKLDQEPIEPLHLVLIEEPEAHLHAQVQQVFIKKAYETLCLGQPSHCETQLLVSTHSSYLARELDFSNLRYFKRKNSDAIPHAEVVDLSRTFDKNSSQNEKFVTRYIRTTHCDLFFANGVILVEGDAERLLLPHFIKNHFPKLNSSYISILSVGGAHAHRLKNLIEKLALPCLIITDLDSVAMEIQTDEDGNIKMNNNTEKVKYKKCVPLLNANQLTNNDTLKTWFPIKQKIDDLLSLKYENKTNGNIRVSYQTQVSLNFKDENKIVFPYTFEESIYFENRTWINTIFKKNVDKDDPRIKATGVLLKMMKAEDCEDFNDFRQSIFLALESNKVDMAMDLIYGLEPKDLKTPTYIYEGLTWLENKILGIDDLAQGETNEIC

SEQ ID NO: 69081 - protein, 152 aa, Acinetobacter sp. C15
MKSVNSLVLEDLIFDYVSSSPPQSFILYAGAGAGKTHTLHQVLNKIKEDILLSLGRENKKLAVITYTNAACDEIKERVNFDNNFFVSTIHSFAWSLISPFTKEIKEIIKENLKEIINEEEKKLKKSRDLNNKTSIGRQERIRKSLKRLSSLE

SEQ ID NO: 69082 - protein, 679 aa, Clostridium botulinum
MYISKLEINNFRCYEDVDIEFNEGLNIIIGENNCGKTTIMRALEYIFNRSRVSTPDTNDFNKELVNKALEIGEQPPEITIIATLKSSSSDKLEDKAVVASWLTKLETPWEATLTYKFFLPESDIKEYKEEIKSIKKSQKNYIQKRWNIFEKYLKKYVSRIYGGNSESKNKVESEYLNKFHCELLDALRDVESKMFTGKNALLKEVLGYFKDSHIEIEDGDEFSEEDKKKLIEKEKKDRKKEFDEYADKIVKNISKRVGNNDVLDFAEKTGASIGGIPTLGGNLEENDVLSVLKLMIKNKTGIEVPIINNGMGYNNLIYISLLLSKFKMITSDEYGENAKVFPVLLVEEPEAHLHPALQYNFLKFLKDEVSNQKISRQIFITTHSTHITAAVGLDQIICMERDESGNTTARYPGKVFSDSDKEDIKSKKYVERYLDATKSTMLFAKSVLFGEGLAEQILLPVLAEQVDRSFDKNHVAMVRVDGVTFKHFIKLFGAGIKKHNLKYALTKRVACINDSDPQKIIKEKEEGKTRRWKKCWPFEIDLDTEHYDYKAFSGTIKNLLEDVKECKNVNVFYNITEKGKTLEYDIALENYDSDDFFNDKIEIMDFQELNKSSWKKEEKVKAKKAASYLNYAQDTKGEAAFELAEKIRSEEINIKLPNHIQKAFNWVCYMDDEEVKEDE

SEQ ID NO: 69083 - protein, 593 aa, Clostridium botulinum; identical to SEQ ID NO: 62577

SEQ ID NO: 69084 - protein, 777 aa, Burkholderia pseudomallei
MDPASSSAPSALAVPPAETVALPGDSPIRLACVEVCNFRRLAKTRLELDDATTILVGANNSGKTSLLTVLRNFLSDSPGFRAFDISLSQWAKLRQLSELWEALDEDPTTESKDAEKWEEQYRQLLGCMPFIDLWFDAKEGAYNYVAPFITSLKWHGGAVGVRVRLEPVADADELRKLAWRYREARSPVRKLPKDGHAWPMDLLDYWLRYSADLRRIAAYRLDPAKGPLATTPCGDLQELPPASQPVELQLLRKLVRVDFVPAQRGLGAEDDETRSESASTRPGLFSSQLLKFARQHLNVAPSGHGNREDLVAAIARAQAELDDSIYKALRPAMEDVEVLGYPGLHDPQQLHFRTRIQTADLLAHSTAVQYRLDETAVDESLPEHSIGLGYQNLQSLSFMLVSFRAARLNPPQGSPAAVHLVMVEEPEAHLHVQVQRNFSSNAHELIRPKEPVHSNLRSQLLISTHSSHLAHGDSFTRLRYVKRIASTGAGVRPSSEVVNLGDAFGDDIQTRTFAERYFQVQHTDLLFADAAIFVEGTAERMLVPLFIERDFPELAKKYVSFLDIGGSHAHRLRPLVERLGIPTAVITDLDPVVPTTNKGGRVVRAAVHIAGQADLECGNDTLTSWHPKLADFHAYGKPTPAHLEWVSSSGVKVRFAWQLPITAASDQWPSSFEDALVLTNIDWFKALEEEKDSVSGKKKDHRGTLGKVIGLVLDHSDHTELLKELHAMLHGNFSKGDFAATLFERLNAGQALACPTYIADALAWLSGQLDVTAGETA

SEQ ID NO: 69085 - protein, 651 aa, Burkholderia pseudomallei
MSAAPESLGNDRDAHVVEEICGYVTATPPRSFFLFAGAGSGKTRTLVEVLRRITGVVKHDAGDHYAARLRSRGQSVRVITYTNNATTVVNGRLGENYLTAVSTIHAFCWELIKGFDEDIRDALLARNAESLATAKAKALSKAKGESDRDREKYAEIEAKAEEIRKIDAFIYHPDRNTYGQGALSHTDVLHVTAWLIRERPTLQRILEDRHPLILIDESQDTMKSVLDALFELSMSRPGHITLGLLGDHRQRIYPDGHDDLPSHVPEDWARPALQMNHRSQQRIVELINKIWDADIEGRTQPKTGVPQHSRTEKNGGTVRLFVGDTKTSTDEKIRRESDCARAMAAETGCAAWQDGTRGYKTLALEHKLAAKRGNFFDAYSAMDLLDKDAAMPKSNGERTGPAMVRPLLGPMLELAECVQADGSLNEFAAVDVLRRHGTLAKLPEADAERQAALDKLHAAVVKFAGAISMPEATVRDVLAPILEGGVFDADPRLVQAYGDTSPPPPEPKPRSKEAKEDRRRRGWCALFRTPWQQIARYRAYLSGDAELATHQVVKGSEFKHVMVVMDDEEAGGSLFSYDKLFGAEELSSNDRENVDEGNETIIDRTLRLLYVTCSRAEESLALVLWAKSPTAALDAIKRSEWFAANEVSALE

SEQ ID NO: 69086 - protein, 655 aa, Sphingopyxis sp. 113P3
MFIERLSLTNFRCFGPNETSVDLTSDLTTFVGINGAGKTALMQALQRLFGVTGDQRSLRRQDFHVPSTELVAPLQRNFVLEAIIAFPELDADGAGGAAIPEFFHQMAADEAGKLKCRLRLEATWTDDGSLDGVIEQKYWAVRTFGPFNDTDCTELKAGDRARIQMIYVPATRDGASQVTAFLRGRLWRAINWSQGVRDTFADAGTALNGAFAGEPAVDVIAAAVTRRWQEVYTAGTDTTPVFRPLDLRFEHFIRKVEVVFRPDEAGRERALDDLSDGQRSLFHLAMTAATLEVEAGIVADPAGAGFQAGGVPLPALTLIAIEEPENNLAPFYLSRIIRQIQDLTKAPQAQAVVSSHSPSILARVDPTQVRYFRLDPNDQTARIRPISLPVGEEEASKFIREAVRTYPELYFARFVVLGEGASEEVVLPRIAEAMGLDIDRSFVAVVPLGGRHVNHLWRLLTDLDIPYATLLDLDWGRAGGGWGRIKTACTQLLANNVAPQAIFGQHLSPQGPAANLLAFDALPPADFAHITQWVQWLRQFNVFFCTPLDLDYSMLKALPLAYQIVEPGRQGPSPAGEPRTAVLGDDGLPHLYAADQDVLMRWYRYLFLGRGKPSTHVRVLSAQDPAALAAAAPEELGALLTSIVARLTPPPSASA

SEQ ID NO: 69087 - protein, 627 aa, Sphingopyxis sp. 113P3
MRLIRREDWRPSGINDLEPAAWNALRHAGSACVVAGPGAGKTEFLAQRANYLLETGLCRAPHRVLAISFKTDAANNLASRVRQRCPPEFANRFVSVTFDAFTKSLVDRFLNAIPTDWRPTRPYEIAFPKHKAIDGFLTLTRLSAPQEWQAEIAGYSASDFEPKIVGSYRLPIGPIVPQNAAGFAIARWWATQLQAGQPSTLTFVGINRLAELLLRTNPHIRRALAATYPFVFVDEFQDTTYAQYDFLLSTFLGGQTIITGVGDDKQRIMVFAGARQDAFQRLQADFGGARFPLLFNFRSSPDLVAIQHVVARALDPNTAPTVAQTARQVDGDVAQVWTSQTKAAEATHLAQWIANDMATRGRAPRDYALLVKQKSDDYEHELSEAFAAHGLRIRNESHALGKTSLQDLLSDDISQLAIAVFRLGATRRAPTAWQLVSSSVLALRAIGQDDDARAAKVEVELSAFLTALRTDMAATAPSRQSGADFVRRVFEYLDLGAIARTYPEYGVGDLLQIILEAFCIHFFASADGAQNWTACLDAFEGVNQIPLMTVHKSKGLEYDTIIFVGLDDRAWWAHTPGDPEGVAAFFVALSRARQRAIFAFCQQRGERNNVAELYHLLTEAGVPEIPI

SEQ ID NO: 69088 - protein, 667 aa, Streptomyces sp. NRRL F-4711
MQLTHANVINFRALDKADVRIDHQTTLIVGRNNSGKTSFVNLFEKFFGDDDTRFVLEDFSTCRIPDIEQALQIFGEAQRHAAEGDQETREGLLAKAYELVPSIRLGLTIEYAEDDDLAPLTDVILDLDDSCFTVKIEAALEAARPRDLLKDFWTASQRPKFEPIKWLRKNFTDYFAPVFRAVSPIDETVTKEIKRSAAQAIVSVKFVYAQTKVDDTPGDKARTLSKTFETYYKVKSGPEGRHQSIEQIEDALAAASLELDTSYKSLFDPVFEDLRSFGVGTIAPVEKPRIVSLMEGSGILRGSTRLQYPSGDGDFHLPEGHNGLGYSKLIFTILQVISFHQAYERAAPKPALQVLFIEEPEAHLHPQMQEVFIKNVQDFIKRKAPWKVQVVITTHSSHIVASGGFHTVRYFDRSEPDGKVKDLSTFQAKVKATPQGDETLRFLRQYMVLHRCDMFFADKVILIEGTAERLLLPEMVRRCAEGLLHQYVSVIEVGDAYAVRFRELLDFLNVKTLVITDIDSVSPTDQKACPPSTAQAVTSNSTLKNWLPGQSSIAKLLDVGADEKEHGHVRVVYQVPEKQAGVCARSFEDAFIIANAAVLARDLRHLELKRAFVQEVGADPTPEDIEAHAFAIAKRLSKHKTDFAFDVMLLEDWAVPRYIAEGLQWLA

SEQ ID NO: 69089 - protein, 556 aa, Streptomyces sp. NRRL F-4711
MGRPPLHRRRTPVARLNTLKAVVEELDARRSFLVEAGAGAGKTTDLVHALQYLLSHRRSELEANGRRIACITYTNVAKKKILERISADPLVAVGTIHEFLWSVIQAYPRELWQQILDYNENLSKPEDLTEVAAPPVIEYSDRGRKLSEGRISHDDVIALSLRLVATHPKLIRIITSKYPVIFVDEYQDTSPKTIDLLLNHLAGAGKEPCVIGLFGDSMQKIYRSGVGAVRHDKLTPITKIENYRCSRPVVDVLNKMRPELRQQASGRQQEGEVHLFLNTDVPPGPRRLDAAKATLASRDWTLENSKYLLLTHRGIAGTLEYANLLEQYRQLGSHGPDDLMARNEPYIQYLTQIEALCAAYQARDFVELTNLLAQGKRRITQHTDKRTISEAIRELDTVRAAGTIGDVLDLMADSPLLAVPGRVKERERRRTAADLDERHKRQADFSNNIRGVSYREVISVTQFIDELTPFSTQHGVKGDEFENVIVVIDDSVWTMYNIGKMLAGTDKPERTERSRNLFYVCCSRARRGLAVVFINDLPDGAEATARDWFASGTVHP

SEQ ID NO: 69090 - protein, 610 aa, Streptomyces sp. WM6373
MQLQNFRGIKQGTVFLDGHCLLVGSNSAGKSTICEALDVVLGPERMARRPVIDEYDFYGAQYQEHDGELPEVRIEVLLTNLSEVAQRRFGSHLRLLSRRTNDFLDLSPTGLQEAHEAEWCLPVVFCGRYDPLEDDFVGGTFFAHPENLPDEPTGDDMVALGAGLKPFTRADKRHCGFLYLRPNRTGNRALTFQRGSLLDTIVRLEAELAGPLWESTLRNLDQVTIAAADSGFDKIRTEIHERINRFVTLGDTPAPVGFRASEITREHLREVLRLFIATQPSIHSVPFNRLSTGSLNLLVFALLTYIAELKGDKSVIFAIEEPEIALPPHAQRRLVDFVLKNMGQVIVTSHSPYVIEKFEPSRTVVITRDGQGTLTSRGVTLPSDFKPSKYRVYRRQFAEAVLARAVLVVEGATEAALFPAVSDVLEADPTVPDYVHIDLAGVTVFDAQSDVSVPLFGPVFQALNKPVYGIHDQPTNALAPALLAKTSAFTHYTELEYKSVEKLLVAEVPVAVQRQFLFTVAQRDDYPSGCARPAAGASDDEVRSLASNVLAARKADGYGALLIAECKSRSDLPAVLADFLLAIDSDLRSVVSTEAVGDADGSLPGVSNED

SEQ ID NO: 69091 - protein, 571 aa, Streptomyces sp. WM6373; identical to SEQ ID NO: 69041

SEQ ID NO: 69092 - protein, 663 aa, Streptomyces sp. XY66
MGLHISRIEIRNFRNFRHLVIDDFPAHAVIVGENGVGKSNLLEAIRLVLDPSISDARRMLREEDIWEGHPTGLAGGAEVTIVVELRGFDDDADAKSILSSAAVDFDPYVARLTYRFAPRTEVATDDGSHVQPTGRPLTAKDYDVIVFAGDRETNDVRAIRREVALRVLPALRDAEADLHNWRRSPMRDLLERLPVDPVNLEATASAMATAVDQLTKDDNVAKLEGHLTDRLTAMFGPRLAVQPTLGFASSKPDELIRAVRLFFDTARRRSISDTSLGSANVIYLGLLLEALSQQRDDEEFIATLVAVEEPEAHLHVTLQRHLFGYLLRSGPSLVLTTHSPHIAAVAPVRSFIVLRATENGTTGATTSALPVSSEQAADLERYLDVSRAEVLFASAVVLVEGLAELYILPALAEAAGFDLDAYGTVVASVHGTDFKPYRALLGPKGLNTPHVVITDGDAARDKRGRREAGLKRGANLHPEEARSKALLDQIALLPDTDAAGYQTTRDPLASELQDHGVYVGAQTLETDLCSMFGEEIVQAFKELNSYATAIDDVSRGVANELNTTVDPELRKKMLKRIGDLGKGRFAQRLAAHIAQVDLDARIRSEANITDDLVPLDEHALRRLGTASYLFLAMERISLAARGTSLLAGHTAPQVNGQGSDAGQ

SEQ ID NO: 69093 - protein, 622 aa, Streptomyces sp. XY66
MQVSDTLLAELDSLHPRQRTAVLHDGNVVLRAGPGSGKTRTLVARIAYVLQTQISAFRGVACITYTNAAAEEIRRRVLRSGVRAEGRITCSTVHAFCLNEILRAFAHLTGQSAPQAGQVLNKTATEALLQRCFDQAGIGEVLAQHRMPQSTRIRRALACNENLDSFDPREVQAARLYEEQLILRGEIDFEAMVTRAVHIVREHAHVRDLLRSRFPHLVVDEYQDLGGVLHELVLALRDLAGITVFAVGDTDQSVYGFTGADAKYLTELAGRADFRDLELEVNYRSGQDIITAAEAALGLSRGRLAREGAPPGDVNLEQVEGGLADHARVTCDLVEQAQNNGISPERIAILYPARGRLLDEVRSELTRRELDFRHEGDDKLPAGSLSRFVQRCASRAVTNYQIHTASGADRADMLRRTQAPSLASLARAFTTLRTEAQLAPSPSRLFVPRALQLCLDPEELYPAEAPALAWLEQLRAGLALDEIAAGHPDQDNTSSLDGLAGLCRSKDLLLQDLARGEEVIGKVLLATYHAAKGREFDTVILPGLLQGLIPRDVPSGKQWRKPTEAELAEQRRTFYVALTRAESTVTMIVGPGYETRNGYWMSFGPSAFVIEMARRLFPDEQT

SEQ ID NO: 69094 - protein, 626 aa, Streptomyces sp. NRRL WC-3618
MYVSEVLVERFRSCERVRIPLRPQVTVLVGENNAGKSSVIDAMRLLTDPLDGRRVRYFEESDVLKAAAALGGPSLQLDLAGIGPAHSGAYLEALLPKGAPDSRTARWQVSWTPPQSGGRRGSTVWAQGAGLPVTGEPPARGGVRHVYLPALRDAERELASAGGDRVRMILRGLLGDDEQVDAFVERIGTELKKVAADPDVARVGEKINEPLRDLTVGAHPQMSELALAEPTFASIARSLRVLLGDASAQPFPLSASGLGYANTLFIATVMAELDAAAEADLTVLLVEEPEAHLHPQLQTLLLRYLQQRARASRRRPPGDPAQPAGHLQVVVTTHSPVLSAAASVEDLVVMARCPGELSDGWQARPLPIPRLQLSQDRVRHLDRYLDATKSALLFTSRALLVEGISELLLLPALAQRVLAAGEGVGDQAAREAFEALERFFGTTRVIVDGVGFEVYLRVLLAPVDGMCLGRRVALITDTDVAPGQPEPSRLQSLRELPRRWGSPGTLHLAAAPRTLEPALWSADNIPALRAAFIRCAPRSEDRWDHVLETDDPALAFGELFVTKTSRTLPGADGDLAKGTKISKGRFAQELADVLADPAVAFTVPTYLADAIRFITSPGSTTAVSTP

SEQ ID NO: 69095 - protein, 579 aa, Streptomyces sp. NRRL WC-3618
MTSPSVRAGALTQQQAAVAVTAPAFVPACPGAGKTHVITSRHLQSPRRLLRQGRALISFTRVARDQMARRCRQAGRADLVQAPHFIGTLDSFLWEFLVKPRRAAEPVPRLLESWASIKAPVEGVDREISLHRFPMTLDPSPIPAREAVAWDKLDYDTRQLIEASACSQQTWQEKIFATRKAWCEQGYFTGHEARVLALWNLRNPEAATALLGPLRSRFAEVVVDEAQDCSAADLAILQLLHDAGVPLVLVGDPDQAIYAWRGAEPQALHAFAARLSPTAHPLTGNWRSSPVICRLAATLRTGQRPPDTSVVRDDDDIPVLLLPIQFATSGSRHLHAPTGTGIVDAFRTLAEEYTVPAENCLVTAYKYATLPGITREKPNTNTITSLAWARTVAHTPDASGDDLTRACTIAVRVLFGYWYPGETGGPDRIMATHRLSAGQVNRTAFAFLHSLPPPHREWAPQVWQAMKAWPALPGAAPQGSKGRPAGKPTISRPQAATGLRTNTVHQLKGDQADGVLLLLPDAGSVQRWATADPATDEVLRIWYVAVTRARRLAAVALPEQETDALARLLTERQVPVRVA

SEQ ID NO: 69096 - protein, 647 aa, Pseudomonas sp. 655
MKVTKITAKNFRMLKDATLDLRRDLSLLIGRNNSGKTSFLVLFERFYEPSVKFTFDDFPMEYRGRILAIQHGGQVDDLAIQMTLEIAFDDGDDLKQISDFILDLDENNNSVKILFECIIDAERLLRDLELVTSCKERYIKKNLHRYLVSNLYAYLRDEDISENREALVPKDLSLIRALINFEIIHARRDVASSEGGKKVLSKLTTQYFNKSNGEQEHFDPINELLIGMDEGLEKKYEEFFNPFLAGAKKFLAIDNIKVVSNLESKEVLDNCSQVVYGSDGSFLPETYNGLGHMNILYLLLAIEIRKESFNKSKCQINLLFIEEPEAHTHPQIQYVFSTKIKSILSEIDNLQTIITTHSSHIVSQCNFEDIRYFKSSSAGVEIKNFYSELEKKYATDIDSFNFIKQYLTLSACELFFASKVVFIEGLTERVLWDYFVSRFDSRNEVVDGEVPLSSQNITLLEVGANAKSFKHFLEFIGIKTLIITDIDTTVFRAGVEGKKGGYVACGVIEGTHTSNATLRGYLGSPGFDDADKFNTWFSNLKSHKLQAGDVDPYIAYQSSENNYHGRSFEDAFVNINLELIKENIGCIQGLKNIEDINEAVNSYVLVERILDKKSAFASSLLFLALTKKNVEWKTPLYIEEGIKWLAK

SEQ ID NO: 69097 - protein, 661 aa, Pseudomonas sp. 655
MVGEMSPVSEVIHCVDNHVDFVLQGGAGSGKTEALKTVLSHITKKYPDRLAACITHTNLASEEISRRVGGAHHISTIHSFLNGLIKNYTLDIHSVVFQIFRMRFVQEFVINDGDAEHKRYKKAYEKFSDALFSIKGEKIIKCPGKRQFDKDSENHIAEINAQIEEFNGFIKQRIASVPHHRVVYNESPFDRFDNLTFGHDSLLRISCILLKEKPKLLRVLFDRFDYIFIDEYQDTNPDIVDVLIAGVKDRANKVLGLFGDSMQGIYEDGIGDVEKYIVRKDLRKINKPDNFRCSAQVIKFINKFRMDDLTQELALKTIDGVEESANERQGVVKLYYAVCNDRPTAWSETAKKEEYFSKLNKLIDFASRDGEFKTLMLTNKAISKKAGFGGLFDIFNERYSLSINDRIDEALSALQYKDVYSLIKFFEVKRYDDLIQIVKKGGYSIFNLKSKRDLSSKMHDLCSTKRTAEEAVKFAIDNKLIRESESRRRFLQRKEKFMGEVLADEEYQQFKGLYIDGTKSFTGVVGKMPELDEYGYAQLLKKIKIELFYYGFVEVGVSIAETSSYFRYVDEETPFITMHKTKGSGIKDTLVVIEDFFWANSYSFNGLFSKEKFDGFDPDTKKILYVACSRTIRNLSCVRLLSQEEKDNIGFFFDDATEVAL

SEQ ID NO: 69098 - protein, 680 aa, Vibrio parahaemolyticus
MLLKKLVVSGYKSISTSHPQTIEFEPDLTIFIGHNGTGKSAALEALNKLFSIDHSLRGILPSDFHLPDNVDAATPRSLMIETWFTLTNSEGNPSVPSLINGLTASSSTGEIIFRVRLEANLSYDFNPLGDVDESIWVIDGDMEEPEEEDKHRLSATQRNAIQVNYVPANRDPLVQLKYSSKAILGRLLKAIKWSDGEQDSFEAQAQQLNQLAADNPALEQITQAINHNWQDIYKGRHLNQAKLNFPVGDVDEILKLIQLQFMPDATGNKVDTSRLSDGQKSLVYFALTKALFDIDKATRQAIVGSQSSNFDVDKMKLPIFSLIVLEEPENHLSPHYLGRILKLVKDYASTEFCQSLVSTHSASLVGRIKPEQIRHFRLDSENICTKVQGLLLPEDSDEQAKYVSEAIKAYPEIYFAKLVILGEGDSEQVVLPKLLEHYGKDIDGHSISVIPLGGRHVNHFWRLLNSLKIPFVTLLDFDIDRNGGGFGRMKYVIEQLRLMDNNSTDFIYGDILDSIPAWNSPQSPTNFFVRDPDNVVKVIVDEIEKYNVFFSSPLDIDYSMICAFPEIFCEKDEAYGERGPTEGKEDEEDENTTKREAALIKAVLKKGNTGKRFNFGSNWERNFLWYRYRFLSNKSKPASHVRMFTKLEERYTSQEILEKLPSELTRLMERIVELSEQVVE

SEQ ID NO: 69099 - protein, 558 aa, Vibrio parahaemolyticus
MTEWKPSDGIEATDELMEIITCDCSVAVLANAGAGKTELLAQKASYLFFTDNCVWPKRILSLTFKTEAQLNIKERINKRCGYKASRFDSFTFHAFSKSIVDRFKNVLPENERPINNYDIVFRRQDADGSTKILMGDLLALAMRILREREDIRNMFSYSYAYVFVDEFQDTTNEQYELLQLLFQNSETKILTVGDINQSIMLWAGARQTVFSDFLNDFSAQKKLLVKNYRASSEIQDVLAVVLQFVQSPESKIQEISQIPNNCSLHAFSDEYQEAAFIAEHIKESLDSGIKASDISILTKQQASKNTEVLRAELTRFGINNLDMTDLQDALKEPLGQLFSLFLKAIVNPEPKVMTELFKVNLTLNKIEAGDDKEEALTTSLMNFILLTQQQITATATADDLLSLVQSFIHELGMNKIKGRWKQYKSPDYFDHVWRALEIHLRNMCNQTSSLVDAANLFSAENAVHIMNIHKCKGLEYHTVYFMGLEDQEFWKYTSQTFEDNCAIYVALSRAKNCICVTISKHREHRQNWRHDNRSSTFGTIKPVINLLKDNCKFSATNH

SEQ ID NO: 69100 - protein, 710 aa, Vibrio parahaemolyticus; identical to SEQ ID NO: 69032

SEQ ID NO: 69101 - protein, 581 aa, Vibrio parahaemolyticus
MPYRNLTMEQMEAVRFDDNLLLSACPGSGKTKTLVSKLCYLLENKESLRIGKRKIVAITYTNVAADTIKERLLSYGIDSSALWIGTIHSFCLHWVIKPNINLIPRLCKGYVIIDEHEKQAKIDELKEKYHINKFERVETKLGLDYKPVYSRGVALFDLVREYHLYLGQNRLIDFDLIINLSYRLLKENSFLGRRLSKLSSHLLVDEYQDTSDIQYEILSSVVSRQQTTVTFVGDKEQAIYTGLGAVVKDKTDLKETFKLDSIAEKSLTGCFRSSQRIVDYYSNYQDGNIDIQSMSKLKDFASVVHLDNTIHKNDLAEYVANIIKTHLAQGIEQREIVVLCPSWFAVMELSRRLEEFSDDFSIDGFLVSPIPKNQDNIWLNLIRLALLEPSVENYIKRQRIAKTLSEFLYDIRETDELIQPKKILRAVNSLSIKAVGAIEKWIEGIIKDFYLKLNLEYNNNSLGASSMRSLLDATAQRMKSYSMNYEASDLHRFFCDPSGVKITSCHSTKGDEYDVVICTGLLKGKVPHWQDIRNRSMQHQNYVARRLLYVVASRAKKHLYMISENGYVSNSGYHYVKTEQL

SEQ ID NO: 69102 - protein, 768 aa, Vibrio parahaemolyticus; identical to SEQ ID NO: 65902

SEQ ID NO: 69103 - protein, 651 aa, Vibrio parahaemolyticus; identical to SEQ ID NO: 65903

SEQ ID NO: 69104 - protein, 720 aa, Vibrio parahaemolyticus
MKISSFALKNYRRLVDVNLVLDDKTTVLVGANNSGKTSCIGALHTFLKSPDNLKVRDISKRNWKEIQKLGKQIEQEFPTSEKMQELSDVLTSLLPILDIEITAEVNEAYKVRDILPDLEWRGGALFVRITYEATDISKLCREFVDMRGVVSKYTGQVSLWPKDLCDFLEKGSNLSKFIKQKHYILSKGVEPTSKEVLQPLKSGALKKLIRVDVESEQRGSGDEDNTDQKGPYSEKQRLNKLLRGYYDRILNPEDFPEPEDLEVLGHQQNLEEGFTSRLNDQFNAPFEELKNMGYPGIGGNPTVEIAAKISGTDALQKSSSVRYRFDTNEEEFLPESYLGLGYQNLIYLTFRLLEFRDKWMRVGKSASSEDKVEDQIEPIHLVLLEEPEVNLHAQVQRVFVSKAYDTLRNHPDLRDKATKKDKSEYQTQLVISTHSSHIINDIDFKDLRYFRRNDANKSIKMDHTSIANMSELFAKAKDELLFVRKHLKLTHCDIFFADGVIFVEGQAESLLVPEFISKSFPKLSSRYISMLEVNGAHTHKYRNLVEKLGVATLVLTDLDSVNSEGKSCFPQQQSVQKTNNDTLKKWHPKKEALDDLVTLPQAEHATTSGDAPLYVAYQKPTQIFGEKILSRTFEDALILANFADDYFQKIKKLKDAKTDFENGKEPLSKSLFDYVQGLKKGDFAFNCLFHLAENEANSFNPPEYMSDGLTWLQDQLSPKA

SEQ ID NO: 69105 - protein, 641 aa, Vibrio parahaemolyticus
MSEQCYLAGTKPIGHDNKVDEGIRECLSIGSGKSFITFAGAGSGKTYSLKKALEFLKVQYSDDFILKGKQIAVVTFTNNAADEIKDRIEQSPIFAVSTIHSFCWSAIAGFNEDIRKWYLEKIPTDLEDLEEKELKGRPGKASDARKRDIIRLTEKLEWLAEPRSFIYDPNGVNSTQNALSHADVLKIFSHFLTTKPMMAEVIINKFPFIFIDESQDTDKDVVGSFFELQEAKSDKVVIGLFGDTMQRIFGGGEPELGKTRPSGWTTFDKKMNHRSARRIVGLGNQIRSEDDKRKQFARNGAAEGYVRYFLLQNGLSDKDEIEAKIRETMAELTGDADWTDTQSKETAILLLEHAMAGPRLGFNELREKLTKSKKIKDRIYEGENTELNFFSGIVLPMAEASRNERRAELMSILRENKSPLLEASVFDANMDDPLALARAAEHAFRDVVSNDKVNFREVLEVLAVHNLLRIPAKLQSFVATSEESEAKSEPAQTGTILEVEAGAEERDESEISAWAEALETDFFQIRNYKDYIDENSVFRTHQGVKGNEFDRVMVIMDDNEAGGFLFSYEQFFGAKELSQASKKKRDEGEETGLDRTRRLFYVTSTRAKNSLAHVIYTSNVTKVRASLIEKKFARDSEIIEL

SEQ ID NO: 69106 - protein, 594 aa, Xanthomonas translucens pv. poae
MRISRVRLFNFANFSDVDVETGDSIVIVGENKVGKSNFIRALQLILDPGLSERDRQLGLEHFWDGLDADKLGETIEVSVDLTDFTDDPRLMAHLNDCVIHPGPPMVARLTYRFQPKAGLTGVPESLRDYEFVIFGGNDPEMRIGGSLRRMLPLDVQVALRDAEKDLASWRHSPLRPLIEDLAASLDEDAREEIQQQVDAAQQELASHDEVIEAAKRISERLVALAGEQHAVPLDLGLAPTRVDALLRSLRLLIDNGARGIGDASLGTANLIFLALKSLELDRLVSDGERDHTFFVVEEPEAHLHPHVQRLVYRYFLGTGAQGDEGAPPLTTILTTHSPHIASVAPIRSIVLLRHDASEGKTVAVSTAKAPFTERDEEDLQRYIDVTRGEIFFSRGVILVEGDAERFLIPAFAEALGIPLDMLGITVCSVGGTNFTPYVKLLGPHGLDIPHVILTDRDPVDGKPPRVRRRLANVLDVVEPNDDHSGWDVDDLLARAGELGYFVNENTLEPELFYGGLAEAMQRVIRRELPLNQASRDALQAWVDDADDLDEEALLTLIERIGKGRFAQALATFTSEDSCPDYIRAALEYIRDAVV

SEQ ID NO: 69107 - protein, 604 aa, Xanthomonas translucens pv. poae
MPSSSVSSAYLAQAADLAGNPGQLAAYESQGHCVVLAGPGSGKTKTLVLKLARILAEDVRAPRGAACITYSQECARELTRRLEGLGLREAPNLFIGTVHGFCLRHLLMPYGRLAELPIPFPLSVATQRVSDRLLRQSGDALFGTKHPFKAIDLGRHRRSVLDRRSVAWRSEEELAAWAIAYESALRNEGLIDYDDMVVFGQRLIAEHDWVLPLVQAKFPVLAVDEYQDLGVALHRIVERLAFDGGVRLFAVGDADQSIYGFTGADGGLLTELAARVDVERVQLQLNYRSGSLIVDASELALGEARGYRANDPARQASVSFVLRPGGLADQAAHAIAQIIPAALDAKPGRTLGDIAILYTDYRTGDVVADAATAAGFDYVRVDNAAPYRKVGLTSWVEDCAAWCAGGWRVGRPQLRGLIDRYFAFRRAHLDEGEARREAQALTALLWSLRQDAQPAREFVAALRIGILDGLLAAETALADQKEQLDRMSAALAAGGALASLDIVSLGGRDGSPAHLNLLTLHSAKGCEYDVVIMVGLDLGNLPWNKATVEKQRESRRLFYVGLTRARDEVHMLYSGFVDTSYGIKRYGRSPFLNELEERMRSAGL

SEQ ID NO: 69108 - protein, 673 aa, Xanthomonas translucens pv. phlei
MVPMLDLWLSAENGELHFVKDLIPSFSWRGGPVGVRFRFEPKDIVALYNDFRAERERVHALEAEAAKDADKAALTLWPKDLTDFLTRRLGTHFEMRWYRLDPAKLVEPDKVTREAVLQPLGPSTVPMQANPLAGLVRIHEINAQRGFGELDGSESEDSTSAGRSGRRLSEQLRAYYKRHLDPEQSPGPTDIEALRAMDAARVAFDFRLAASFKPAFQEVESLGYPGANDPTIHVATQLSAADGINHESAVLFELDSVGGAAGAPPLRLPETSNGLGYQNLISMIFRLMSFRDAWLRKSKAALASDDLVVEPIHVVMIEEPEAHLHAQVQQVFVRHAYHVLTNDPLLKKFPGLSTQLVVSSHSSHIAHELPYASLRYFRRLPAGMHGKQVPVSTVSNLEAIFGDDTNTKRFVTRYLRSQHADVFFADALILVEGAAERILLPHFIRNRFLQLHQAYVTLLEVGGSHAHRLRPLLDSLGIPCLVITDIDALGGKASVQVKRNVGQVTGNPTLRSWLKSNNKRSGIDGLLDLSETDKVIVSDDLYSIRMAYQTPASVAVPAGAAPQEVLSGTFEDALVFANLAHFSAAKGKGMMGAVVREVAKAASGDALAAGLFKVIGDGDKAGFALSVLYDTNFEALIPPSYIEEGLSWLQQRIVKKKHEMLLVSVPAEEGAHE

SEQ ID NO: 69109 - protein, 621 aa, Xanthomonas translucens pv. phlei
MNEVPDSLVDNGVDVVIDQCLHLDTPQSFFMYAGAGSGKTRSLVDALGKIRLRERERLVYKGQRIAVITYTNAACDEILRRIEFDALVDVSTIHSFAWRLIKGFDDEIRTWLKVSIAKSMAKLADAMGRAREENKTFLKNKVDFERKEKRLEALDSALSFNYSPSGTERLRGSLTHQEVIGMAGDFLQKDPLREVLVDLYPVVLIDESQDTHEEVMKALLSIQAHASDRFALGLLGDTMQRIYTHGMPRLEEAVPRDWARPAKVMNHRSAERIVRLVNTIRSEVDGQRQRARQDKPGGFVRIFITGLGAAKSLELEEGVACRMAEITGAAEWGLGPEHRKTLVLEHRMASRRLGFDDVFGPLYETETLRTSLLDGVLGPVNFLVDDVLPIVEAGLSGDEFALVDSIRTRSPLFDGKALAGRADQLDAVRAAGDGARRLTEQLRDRDPLLREVISGLQESGLLAVPNGLLQALNMQEPDDGAAPEDDRQAQEMRAWCRVLQAPFSQIRAMALYARGLSAFDTHQGVKGLEFPRVLVVISDDEANGFTFSYDKVLGAKATDKDAEKEAGGGDSQRAQTRRLLYVTCSRAEHSLALMVYAQNPAAVRDEVIRKGWFGADEVVLI

SEQ ID NO: 69110 - protein, 653 aa, Escherichia coli; identical to SEQ ID NO: 63058

SEQ ID NO: 69111 - protein, 621 aa, Escherichia coli; identical to SEQ ID NO: 63059

SEQ ID NO: 69112 - protein, 653 aa, Escherichia coli; identical to SEQ ID NO: 63058

SEQ ID NO: 69113 - protein, 621 aa, Escherichia coli; identical to SEQ ID NO: 63059

SEQ ID NO: 69114 - protein, 653 aa, Escherichia coli; identical to SEQ ID NO: 63058

SEQ ID NO: 69115 - protein, 621 aa, Escherichia coli; identical to SEQ ID NO: 63059

SEQ ID NO: 69116 - protein, 653 aa, Escherichia coli; identical to SEQ ID NO: 63058

SEQ ID NO: 69117 - protein, 621 aa, Escherichia coli; identical to SEQ ID NO: 63059

SEQ ID NO: 69118 - protein, 380 aa, Escherichia coli; identical to SEQ ID NO: 63394

SEQ ID NO: 69119 - protein, 621 aa, Escherichia coli
MTRVSRDDWVPQGVGGLEGRAWEALRETDRSILVTAGAGAGKTEFLAQKATYLLQTGICPAPKRILAISFKKDAAQNLAERVAKRCPRDQARRFDSMTFDAFTKGLLDRFRPALPEPFNAPGTYQIVNPFRRDYDDFIERHGYHGVSAQQLERRLLLTDLPIDLSNGSEVHRALADYWHEQFFGGDEISLSFPMINRLVKLLLQENSYIRRALQATYPIVFLDEYQDTTYAQYDMLLTAFDGSDAVFTAVGDDKQRIMGWAGAMNDAFDQFENDFAARRITLLSNWRSHVDLVRIQHEIARRIDDNVEEVQAQGTREIEGEVSAIWQFRSADDENNYLAEWVSREVQSERVAPHDVAILIRMRADQVEGEIAPSFAARGLRIRNAARSVGEIQIQDLLGEELTGIFVPLLRLGATERSPENWEQTQQNYLFLEAADPDNDLTQERLLVKLEAFVRKLRTELAHRQPSPDSAEEIAEMLLEFVGTPRLRQSFPAYQRARDFERVWSGFVTLLKECAEHSSSWTEALDEFEGIGQVALMTVHKSKGLEFHTMIFYGLDNQTWWSLTPQRGEELNTFFVAFTRAKQRAFFSQCVERGHAIGWIQQLLAPAGVETIDGTTILGTT

SEQ ID NO: 69120 - protein, 653 aa, Escherichia coli
MKIEKIKLQNFRCIGHEVVELNFEEELTILVGGNGSGKTAVLQAVSRLFGTTSAQRSVQRRDFHIPIDRQELQSGDSLFVEAVLAFPELEEQDASPLDAVPEFFNQMAASGEGEPLKARIRLQATWTDDGTPEGAIEEDIRWIRALDDNFEWDDCSRVQAVERSSIQFIYLPANRDATTQVTALLKGRLWQAAKWSTAFRDASYVNAGQIQSSFEEEEPSKFLLERLSKRWQQVHEADTDSKPRLRLIENRFEELVRKAEFTFTPDEEGQERRLSELSDGQRSLFHIALTAATLETEREAFSLPADDSSFEQDKLRRIHLTILAIEEPENSLSPFFLSRIIKQAREIGALPSAQVLLSSHSPSILSRIEPEEVRYFRMDRSARCSSIRELTLPEDDVEASVYVRLAVKAYPELYFARFVILGEGDSERVVIPKIAEEMGVSLDPSFVPVVPLGGRFVAHFWRLLNDLEIPHATLLDLDLGRRHGGANAMRSCLQNLAAIGSNLGSTNGANAAQLTDQQLYNEGLQGQWLQAFRREGVFFSYPIDLDFAMLLAFPTAYQVANPGGNGPQSSAAAIQAKKVSTLKTGGNPALYTAHYDDAFKWYPYLFLSRSKPETHLAAFSRIAGGGVTASAPVELRALIEYVTDKLNLSGENE

SEQ ID NO: 69121 - protein, 621 aa, Escherichia coli; identical to SEQ ID NO: 63059

SEQ ID NO: 69122 - protein, 653 aa, Escherichia coli; identical to SEQ ID NO: 69120

SEQ ID NO: 69123 - protein, 621 aa, Escherichia coli; identical to SEQ ID NO: 63059

SEQ ID NO: 69124 - protein, 653 aa, Escherichia coli; identical to SEQ ID NO: 63058

SEQ ID NO: 69125 - protein, 621 aa, Escherichia coli; identical to SEQ ID NO: 63059

SEQ ID NO: 69126 - protein, 653 aa, Escherichia coli; identical to SEQ ID NO: 63058

SEQ ID NO: 69127 - protein, 621 aa, Escherichia coli; identical to SEQ ID NO: 63059

SEQ ID NO: 69128 - protein, 653 aa, Escherichia coli; identical to SEQ ID NO: 63058

SEQ ID NO: 69129 - protein, 621 aa, Escherichia coli; identical to SEQ ID NO: 63059

SEQ ID NO: 69130 - protein, 653 aa, Escherichia coli; identical to SEQ ID NO: 63058

SEQ ID NO: 69131 - protein, 621 aa, Escherichia coli; identical to SEQ ID NO: 63059

SEQ ID NO: 69132 - protein, 653 aa, Escherichia coli; identical to SEQ ID NO: 63058

SEQ ID NO: 69133 - protein, 621 aa, Escherichia coli; identical to SEQ ID NO: 63059

SEQ ID NO: 69134 - protein, 729 aa, Staphylococcus aureus; identical to SEQ ID NO: 62500

SEQ ID NO: 69135 - protein, 597 aa, Staphylococcus aureus; identical to SEQ ID NO: 62501

SEQ ID NO: 69136 - protein, 729 aa, Staphylococcus aureus; identical to SEQ ID NO: 62500

SEQ ID NO: 69137 - protein, 597 aa, Staphylococcus aureus; identical to SEQ ID NO: 62501

SEQ ID NO: 69138 - protein, 729 aa, Staphylococcus aureus
MFISTLQIRNFRNYESEIFRFDNETNTIIGENDSGKTNALTALRILLDDSYYYSSKTLKESDFFHGIQNGWQGHWIIISATFEGISEEEFDNEICASISLNSESQTILEELISNADKGVGSISLFIRPNKAIRKQLFDISTELDSHQFNEFRNSIRLSDYEFYYTSKSNLNFCINENYDKLVGRLNDNIASNPEEDDEALLGSRIDMSDIFKHISVVYVDALRDVLREMKNNRNPVKRIMETIESKISSDNVESLKTIIQQLNETITSVPEIRKIGENINRQLNSIIGSVYSPNLLLSSTMSDDMGSLAKFLSMKPEQNIDLDLLGLGHLNMIYLALKIVEFEACRSRELLNIMLIEEPEAHIHHHIQKTLFEGLNLQKNYTQILMTTHSVHLAEVSEISRMNVLKSFNGKSIVMNPANNLNSFAKEKLKKNNLNLINAVERYLDVKRNGLLFSKGVILVEGDAEEILIPQIVKKLFGINLDELGIGLINVGSTSFEYIASLFDDDRIQRKCAIVTDLDEQAIPSEHRLYKSTAQEKGQARKEKLSSLFNENNWVNCFYANTTFEIEFLDVNKENILTYVSPIIDDAFKDKKTITAYKEEIQSEQYLERNLAMLKLANHVGKGWFAIELGEKIDFLIKIPKCILNAIAFACQEIVDLSIYKKILLHTIDLYEETTELSALSASLKTSDTADLNIAIISLLEYFGKDEDVVYLINQIENYTKILYAEVSK

SEQ ID NO: 69139 - protein, 597 aa, Staphylococcus aureus; identical to SEQ ID NO: 62501

SEQ ID NO: 69140 - protein, 729 aa, Staphylococcus aureus; identical to SEQ ID NO: 62500

SEQ ID NO: 69141 - protein, 597 aa, Staphylococcus aureus; identical to SEQ ID NO: 62501

SEQ ID NO: 69142 - protein, 636 aa, Candidatus Magnetomorum sp. HK-1
MKLSNIRVSNFISFGEEPTNFSFEYITFLIGSNGTGKTAVLQALCRLFSFNPSLRRIKKSDFHVPQDETEPPEERELWIEADFIFNELADGEDSATIPPHFAHMRLDDDEDVPRVRFRLEASMGLDGDIDENLNYVLDLNENGDSLNTAKVARSERNSIQVHYLPARRDPSVHIAFSANALLGRLLRAASWDDERETIKTHTEQISECLSENTSIDVLSKTIQRSWQKFHKGDYFNDPKVTFASNEIEALLRHLSVSFTPGHDDTLVDFLRLSDGQKSMLYLSLVLSSQAIGRAALEGDDSFDIDKLRPPIFTLIAIEEPENSLSPYYLGRIVSALKEVTGKEDAQAIIATHAPSILRRIEPKQIRYLRLSDSRTSQVEHIQLPPIADEAHKFVIQAVKAFPEIYFSRLVVLGEGDSEEIVLPRLLEARGWPVDEASITVAPLGGRHVNHFWRLLEGLNIPYVTLLDLDVGRYQGGWGRVKYANDQLIKHCPEKQLKDGYEVIPKWNDPKQKITKFKNYLEKLKERGVFFSYPLDLDFSMITNFPEAYEIEDDDLTTPKASGLKSVLGKKGESSEYKDHELELFNSYHDLFKLGSKPAAHINALSNLTNEQLAQEMPLSLDNMIDAVIEKLEELPE

SEQ ID NO: 69143 - protein, 553 aa, Candidatus Magnetomorum sp. HK-1
MIPTDSWQPADGLVLEPNASRSATECSKSLALTAGPGAGKTEMLAQRADFLLRTGKCRYPKRILAISFKVDASRNLKERVKRRCGAELASRFDSYTFHAFAKRIIDRFRPVLTGHDRLEPGYTIGEPRVTGKQIGFGDMVSLAIQILLDSEIARNALRQTYSDVFLDEFQDCTNVQYDLVKKGFQNTGIRLTAVGDTKQKIMSWAGALEGIFLTFAQDFAADQLNLYRNFRSKPELLRMQNEIIRTLDPDSVMPDDQISGEGGEIYICSFSDDQEEAESLVEQISSWIQDDNVPFSEIAILVSKQIDLYAAPLMKELERNSIPYRNEHTMQDIIVEPAARLVVDYLLCLYGKREPEAWRRLMELLIPFSDDEEGQDVLYSDWQSFIHSERKESLKDTSDLSFPKRWEFVNRFLKKVGKPILTALSHDYEAKARLKEVFKETGKRVNELLAHEPELTKALARFSDDQAVRILTVHKSKGLEFSNVIFLAVEDQTFWGKADEERSAYFVGVSRAKDKLLLTHVDRRPRHSGHSGIWNISRTPHEEFLGYAEAVLT

SEQ ID NO: 69144 - protein, 641 aa, Vibrio cholerae; identical to SEQ ID NO: 62984

SEQ ID NO: 69145 - protein, 553 aa, Vibrio cholerae; identical to SEQ ID NO: 62985

SEQ ID NO: 69146 - protein, 623 aa, Pseudomonas aeruginosa; identical to SEQ ID NO: 64682

SEQ ID NO: 69147 - protein, 551 aa, Pseudomonas aeruginosa; identical to SEQ ID NO: 64683

SEQ ID NO: 69148 - protein, 641 aa, Xanthomonas campestris pv. campestris
MQLAVVRISNFWSFGPEPVEVKLDSMTYLLGPNGAGKTAVLTALARMFGTTGGMRAVLPSDFHVAMGEVPAEGKAASLWIETDFTFPEVEEGEGTAAVPIFFSHMQLQSAGEVPGVRIRLTAEMDESGEIEQRLEYVLAADEDGAPTQLRGMPKLDRQAIQVHYLPARRNPADHIAYSAASLLGRALRAADWTAERTKANDLSGQLGEAVTENAGVAAFGKALTVGWGKLHKGKFFAAPSIAFGTGGLAEVLKQVSVRFSPGHETPSVDFERLSDGQQSLLYISLVLAAHAVDVAAFADEESPFDRARLRPAAFTLLAVEEPENSLSPQYLGRVIQSLRDLKKESGGQAIVATHSPAILRRATPDLIRHLRLDADRTTQVSQIVLPDEAQESGKFVRQAVMAYPEVYFAKLVVLGEGDSEDIVLHRMLSAMGIEADAASVCVAPLGGRHINHFWRLLSSLSVPYVTLLDLDYGRFGGGWGRIRTAHRYLRSYPNGHAIRTIAELKVMPGWKASCLTPEFKAEREFLMQAGVFFESPIDLDYAMIMKFPETYGIDQYVPTDEEEKKSIAKAVLGKNGSFELFEPIDKGYFRDYHRIFKLGSKPAAHLQAMSKITDEQLLNGAPKSLKDLCKRVIAMLAEDVE

SEQ ID NO: 69149 - protein, 547 aa, Xanthomonas campestris pv. campestris
MITPAQWSPVAIEMLEPGAKAAITAVHGNSIVIANPGSGKTELLAQRADFLFRTGTSRYPKKILAISFKTDAAHTLRRRVRDRSGFDHAHRLNSMTFDAFARRIIAIYRPLLKPKDRLDHGFKVGVTRVNAIQVAFKELVPLAQQLIEQHPMIKRSINMAYSHVFLDEFQDCTSAQYKLIHTLFKDTSTSITAVGDAKQKIMGWAGALDGVMGKFADEFAAVPLKLVQNWRSAPAIRRVQNRMIIQMEPVSAVAENDIVGDEGRVYLAHFADEQVEAARIAEKIEEWIAEGIAPHEIAILHIRQSAMFNQAIDGELDRRSIPRRNEQALQDLVSEPVTEFVVNLLRVLGRKPAPSAYASVLYALTAQDDDEQGDWIRLLSVARDRVAGGLSADHAELAFEQLQEVMALIPIATLLLLSSEYDSGRVAEILGQVYEVLGNFIHQHHDLDQALARFLDEGSVRVMTIHKCKGMEFECVVLPCTERETWWGDQNDNRSAYFVGVSRAKQNLVVTYVDRRGAPIGANAQWDVIRHPQEEFLGYVRAEAIPL

SEQ ID NO: 69150 - protein, 634 aa, Pseudomonas syringae pv. syringae
MYLRQLDVTGFKCFGEPFTIEFRDGLNVLVGENGAGKTGVVSAVRQLFNDSESGKRIISERDFYRGFEPGAVAAESTQIQATFSGLDDQDAIAFESWCGNHDEAKLTFEARNQESRGRFRHHTYAGHEHAKPFESETLDYIHCIYLPPLRDAENKLREGRQSRLARLMKALCRKELAEARKAQTLHPLEEHVGNFNRELSQSDEFAIKQANQRIGDNLKAALGLNLSQGTMIQFSEVSFSRIVEGLRLLYFPNLSEADTTQFRSLEENSLGYNNLLYIASILAELILEEEEDRGEETYLRLLLIEEPEAHLHPQLQLRLLRHLKTVAEERGIQVIITTHSTVISAAVSLDHLIHISNDARPVAIPLSACGLPEHSRRFVDRWLDVTKSNLLFSKGALLVEGIAEAMVLPELARIVLRPYGEGKNCLDDYGVSVINLGGIYFNHFMQLFCDVTGGQPGENVPIRCAGLTDNDPPKSIRSVAGDDGKEIPVPFLPHDDDLLVGDNPALALIGPISQSQFGRLFVGKYKTLEYDIAMEGNNLRLMSTAAATLWPVQGGEVVRELTRRAGLDYSTMSSGERAPYANDMLDRIETKEIGKGFYAQAFADALANVRDDFIVPEYIRLAVLWACGIEEQAE

SEQ ID NO: 69151 - protein, 583 aa, Pseudomonas syringae pv. syringae; identical to SEQ ID NO: 63509

SEQ ID NO: 69152 - protein, 711 aa, Pseudomonas savastanoi pv. glycinea; identical to SEQ ID NO: 62734

SEQ ID NO: 69153 - protein, 603 aa, Pseudomonas savastanoi pv. glycinea
MFVWDRKDLNDAQVAAIEHPGSVFLVACPGSGKTRTLTYKIARLLSELKSDKKRVVAITYTHRAADEIHERIEQLGVDTSQLWIGTIHSFCLEWILKPYGIYHSELKHGFRVINVHDTERMHEELCSAVQGTKLSSFDCAYYFTPNGYVLTCNKTNKHEAIGGVLQAYWKELRAERQVDFELILFYAYQLIENYPSISMLLGSIFECVLLDEFQDTREIQYAILASILKASKDGTSAFVVGDPNQAIYGSLGGYAITAADFGTQCGIAFKEMELSDNYRSSSRIVSYFGNYNVLPSKIESVGKDKDYASVVSFDHQTHRDALEEELVRLIKFNVETLGIAQHEVCIVAPWWVHLASMTRRLVAALPAYSFDGPGMVPFARDVDNFWYKLARIILTEASPQLYVRRMRWAGEVIADLRDAGVEVPSLDRKTLLRACNAITITITITETDGLAFLRTFFDQLCSTFGIDRHTYAALQEHHDAFFECSQKRIDKLIKEGAEAIAELGMFRKVFADRTGVTVSTIHGVKGAEYDAVIAYGLLEGIVPHFSDPNQAETANKLMYVVSSRARKNLHLISERGRSRGWSGDYQPTDVLTGCAFRYDQLST

SEQ ID NO: 69154 - protein, 297 aa, Pseudomonas savastanoi pv. glycinea
MLSRVNPREVRYCRCEPKTRVSTVKKIRFPVNEVDASKFVRGAMLAYPELYFARFVLLVEGDSERIVLPILAEALDLLIDPAFVAIVPLGGHHVQYFWRLLKHLGIPHATLLDLDLGRDGGGFGRIKTAIQKLIEFDVPKTAVLEIDKGILSDTDLEKMHEWSTTGDHANLQAWISNNLRPHGVFFSAPLDLDLAMLQAFPDAYAGIIPKGGGPRMAEEKAADAVLGTAGPGLGAYTGPFEVYKALLPAYRYHFLTNSKPATHLAALSRLKQKDLREKMPAVLAEVLKHIEASLRRD

SEQ ID NO: 69155 - protein, 556 aa, Pseudomonas savastanoi pv. glycinea
MAVSSLRVRPEDWTPIGVKSLEANALKVVRAGINQSVIAGPGAGKTELLAQRAAFLLQTEAAPTPRRILAISFKRDAASNLAARVRKRCHSSHASRFDSMTFDAFAKGLLDRFGQALPEFWRPRPGYEITTYYERDYRNFLDLIAGSPPGDIGTKASLRAIGAKSFERKHLLGAPLPVAAWPKPDVAQWAMARFWHYSLHEGKKSVLTFPMIGRLVELLLRINPMVRDALRLTYSHLFMDEFQDTTQVQYDLVHTIFCGTDTVVTAVGDNKQQIMRWALAMDDPFSEFDADFGGLRTTLFNNYRSSPDLVRIQHVLAQALDSGAMEPISQTEGTIDGESCVILDFPSPKTEARHLAKTISAAIADKKLLPRDFVVLVRQKAGDYADVLRPAFEAEGLSLRNEAGTAGQIMLQELMTEDLSKHLVSLLRLAMNPRAGRHWSNCQTWLALLRGVAADEPGVQQKLAIDLDAFARALSANYPTPPGDEATSRSLVTEVLNFLGRERLSSSYPSYAHGDWLDTVIDSALKHLLDCSLNSIDWCSTLGGCRQNKLNFHSLV

SEQ ID NO: 69156 - protein, 639 aa, Pseudomonas savastanoi pv. glycinea; identical to SEQ ID NO: 62732

SEQ ID NO: 69157 - protein, 560 aa, Pseudomonas savastanoi pv. glycinea; identical to SEQ ID NO: 62733

SEQ ID NO: 69158 - protein, 444 aa, Pseudomonas syringae pv. cilantro
  MOD_RES (30)..(30): Any amino acid
MRLCVQVNSTARPVSFRPRYTFLGKTGEAXTILTPGATVTTFDVERLLKDHTQVRYRGVNGLTLPESYNGLGVRNLVYILLQLLKFFREFQATPAAASVHLIFIEEPEAHLHPQMQEVFIRQLHLIKGEFEKQLNDSRPWPVQFVISTHSPHMANEARFETMRYFLSATDEHGVRQSKIKDLRQGMGSVSLPDRDFLHQYLTLTRCDLFFADKAILIEGTSERLLLPTMIAKTDLAAAGESKLASQYVTVMEVGGAYAHRFHDLLSFLELRTLIVTDIDSVQPNEDKKRKACPVAEGQFTSNGCLKDWFEPDISPTQLLAKTSAEKTKGTRRLAYQVPEVAGGLSGRSFEDAFILANLGLFDLGHGDAALLAYRHAADQKKSEFALKYAIEDTNWAVPRYIAEGLRWLAVGAPVVDLQATVQAMAAVGEAAGQVIATERGNGDA

SEQ ID NO: 69159 - protein, 587 aa, Pseudomonas syringae pv. cilantro
MPNHQESPADIAGRQALERMFACLDEGQSFRLEAGAGAGKTYSLEKALSLLIKRRGTALVRQGQQIACITYTNVAKDEIISRFQAHPAIRAETVHGFCWSVLKDFQTSLRTFLSGQDFWRERFEPLGGIGGRRIHYEMGIPRVSDEEVSIRHEDVLILMIQALPSQKFRAVITSRYPILFIDEYQDTDEHFFEALRSWFLDRAEGPLIGLFGDHWQKIYGSGCGLVEHEALHVIDKNANFRSASRIVDVLNHMRPELVQMVSEPELIGEARVFHTNCWPGVRRTGQGGGHWKGDTSTDAARAYFSYLKALLIAEGWDFSPKKTKILILNHSGIAREQGYDSIPPIFGRFNEPWLKKEDPHIKYLTDHLEPACAAYAQRRYGEMFKHLASDRPTIRQHGDKVAWVEAMDKLAALRLTGTIGDVIDHLRRIPQMQLPNALMRNEQRLEAAGEEMSDEEPRRITQLRKLRGVSYRELIALDEFIDGHTPFATKHGVKGAEFENVVVILGRGWNEYNFAEMLEWYGAGPPADKRARFENNRNLFYVACSRPKIRLALLFTQLLSPNALGQITAWFGSEFVTELPPEPGCYR

SEQ ID NO: 69160 - protein, 769 aa, Pseudomonas syringae pv. maculicola
MSEAIVTTPVAGNIALRFLELCQFRRLGKVQLDVDKKTTILVGANNSGKTSVLAALRHFLSDGSPFGAFDISLSQWPTLRALGKAWEVLKEDPSTVTGSEKQWMEQLGIIHSAMPTLDLWFDAEAGMFHYVAPFLSKFSWKGGAVGVRLRLEPAASVDELKHLAWAYHTARLPVKDMGADSLAWPIDLLDFWLREPHKLGQVRAYKLDADNNPLEGLQTYATQTLTADSSPIERKHLQKLICVDFVAAQRGLGSEEADSRSASGPHRVGMFSNQLLKFARQHLNVATTGHGHRADLIKAVAEAQQELDKKIHEAIAPSVEEVKELGYPGLHDPQEIRFRTRIQTADLLDHGTAVQYSMQKDSLDELLPEYSIGLGYQNLQSLSYQLVSFKAARLKPEKGSPVPVHLVLIEEPEAHLHVQVQRVFPDKAHKLISPNDKDASGLKSQLIISTHSSHLAHAENFDRLRYVRRIAKSAENLMPTTEVVNLGQVFGDDKKTRRFAERYFRVQHTDLLFANAAIFVEGVAERMLVPLFIERDFKMLNSRYLSFLDIGGSHAHRLKPLVEKLRIPTVIITDVDPVEERAGKPAKDGEPTITLVAVANTGQAGLQCGNPTLRGWHPKLQQLEDFKSPAEVQLVWKEVAECLVRFAWQLPVAEAGDHWPSTFEDSLILKNIPWFKGLMDEKVDGDGNKIKPPKGALGSVARRVFDHENISDLLAALHKLMHGSFNKGDFAASIFEMVAADEPIACPKYISDALEWLQTQLDPNPELMS

SEQ ID NO: 69161 - protein, 649 aa, Pseudomonas syringae pv. maculicola
MTAVPIVGDNDRDAGVVEEICGYLTEEPPRSYFLFAGAGSGKTRTLVEVLRRLTGVIEHDKGEHLARRLRMYGRSIRVVTYTKNAVSVISGRLGDNDLVCVSTIHSFCWELINGFNDDIREALIAVKEAQLAKETAEAQAKPKGLTPAKQRDLDEINDDIEAFRATDVFIYHPDRNTYGSGALAHNYVLDATAWLLRNKPTLQTILKDRHPIVLIDESQDTMKGMLDALMGLAEQEGSYLTLGLLGDHRQRIYAHGHADLPSLVPKNWATPELQMNHRSQRRIVTLINKVWEAELEGRTQPTNGVEQHPRTEKAGGVVRLFVGDTSRSPEDKVLDERWCADRMHEATGAAAWSQSQYQLLALEHKLVATRGSFFHVYEAMVLLDPDAAAPSGSGDNKGPSAVQVLLNELAQLEVCVGINGAVDEFKATEVFRRYGSLDNMPEECAARASRVEEMQKAITAFATACVDPKSTVEEVLAPILSAKLFEIDHRLVEAYADKSPRLPSPGRGEEESKQARMRRGWCALFAAPWNQLRLYRTYLAGGTVLSTHQVVKGSEFAHVMVVMDDALAGGFLISYDKIFGGVELSKRDKENVGLGKETTIDRTLRLLYVTCSRAQESLALVLWSSDPAAALAKIKVSNWFANGEFQAIP

SEQ ID NO: 69162 - protein, 661 aa, Pseudomonas syringae pv. maculicola; identical to SEQ ID NO: 62490

SEQ ID NO: 69163 - protein, 634 aa, Pseudomonas syringae pv. maculicola; identical to SEQ ID NO: 62491

SEQ ID NO: 69164 - protein, 710 aa, Pseudomonas amygdali pv. mellea
MHISRLQLVNYRNFECANVVFNKGVNTIIGENGSGKTNLFRALRLLLDDTLLRAAYRLDEKDFHRGLGDWRGHWVVISLEFDEVSQDEAIQSLFLHGTGNIADGVIGKATYNLIFRPKAAVRRTLADLAVGDAVGLVEARSKITISDYETIFTGKSTANFLDPDTYRLLVGDFDAVIFPQELTTPAIGGVIPGMLSISREVCFTFVQALRDVVADFQNNRTNPLLTLLKCRSGEIDPQSFEPITALVKGLNDAIEGLPDVETIRTDIRDTITDAAGETYSPRSLSIRSDLSDEADRLFQSLKLFVGESEEEYEGAIHELSLGGANLIYLTLKLLEFKYQKQKESFANFLVIEEPEAHIHTHIQKTLFDRLNFADTQIMYSTHSTHISEVNNVVNINILGRRDGRCEVFQPSTGLDAGQIGNIQRYLDAVRSNLLFAKSVVLVEGDAEEILIPILVKKVFGLSLDELGISLINIRSTGFENVAVLFHNERIRKRCAIITDLDRAFIDTTDILDSDDKAATKKKALGSQIAGLQREAALKELCAGNPWLTVHFADHTFEVDFVSAGNVGTVVSVLGDVYKDGGTIATSKMELESGDIARFGTRVLTMARYAGKGWFAIILGRMITPETSIPDYILDAIFQAHIPVSIQTWARVLDYRVSILAASQLHAPGDIDAMRAQIRRYHRGEIDFAGVRAEMLQAFPADGINTILAGF

SEQ ID NO: 69165 - protein, 598 aa, Pseudomonas amygdali pv. mellea
MFVWDRKDLNDAQVAAIEHPGSVFLVACPGSGKTRTLTYKIARLLSELKSDKKRVVAITYTHRAADEIHERIEQLGVDTSQLWIGTIHSFCLEWILRPYGIYHLALKHGFRVINAHDTERMHEELCSAVQGTKLSSFDCAYYLKPKGCVLTCNKTDKHEAIRGVLQAYWKALRAERHVDFELILFYAYQLIEKNPSISVLLGSIFECVLLDEFQDTREIQYAILASILKASKGGASAFVVGDPNQAIYGSLGGYAITAADFGTQCGIAFKEMELSDNYRSSSRIVSYFGNYNVLPSKIEAVGTGKDYASVVSFDHQTHRDALEEELVRLIKFNVETLGIAQHEVCIVAPWWVHLASMTRRLVAALPAYSFDGPGMVPFARDVDNFWYKLARIILTEASPQLYVRRMRWAGEVIADLSVAGVEVQGLDRKTLLRVCNSITVTETDGLVFLRVFFDQVCSTLGVDRHTYAALQEHHDAFFECSQKRIDKLIKEGAEAIAELEMFRKVFAGRTGITVSTIHGVKGAEYDAVIAYGLLEGMVPHFSDPNQAETAKKLMYVVSSRARKNLHLISERARSRGWSGDYQPTDVLAGCAFGYDQLS

SEQ ID NO: 69166 - protein, 800 aa, Pseudomonas amygdali pv. myricae
MKLQAYRLQNYRRLRDVVIELDDEISIFVGANNSGKTSAVQGLYSMLRGEAKKFELFDFSAALWAEIDAIGRTPPGDEDAPKQLPSILLDLWFRVGEDDLATAMSLLPSTEWDGKCVGIRVAFEPQDAHALVRKFHELHEKANNAASALVARRSVGAEADAENAAAVVADPGEYKPWPESLTKYLTKELSKEYTFRYYVLDERAFVGYQPKEVDYAPLPLGKEPGGAAIIKSLVRVDFLRAQRHLDDPDAGSSDRAESLSRRLSRFYHRNLEKRGDDHAALKALDTSEKELNFHLKEVFSDTLKRLAKLGYPGVNNPEIVIRAALDPTTVLGQDSKVHYVVPGAITAQLPDSYNGLGFKNLVYMVVELLDLHEQWKAEEDKRAPLHLVFIEEPEAHLHAQIQQVFIRNVLRLLEDANDHATFFHTQLVVTTHSPHILYERGFSPIRYFRRVSEQLDHNTEVRNLSLFKTCAADAPAREFLQRYLKLTHCDLFFSDAVILVEGNVERLLLPAMIETAAKRLRSSALTILEVGGAFAHRFQELIAFVGLTTLVITDLDSVAVKTDAENAAEQDAGAGAVDGNNEEDDLKPFELEDDDEAAPGGKKKSKKRGSTCHAHVEGAYTSNQTLISWIPKKRLVAELWEVTAEQKTLSLAEGTSAEVRVAYQTKVLVTVGATTSQLCGRTLEEAFGLENSDWCQAEANRSVGLKLKRAPNSPEELAEKLHERVIGKNFDKTRFALEVLASGPLNCWKVPTYIAEGLAWLETKVAHEIEADAAIANEVATIEPTAAGVVAVIAGAGQTT

SEQ ID NO: 69167 - protein, 643 aa, Pseudomonas amygdali pv. myricae; identical to SEQ ID NO: 62763

SEQ ID NO: 69168 - protein, 710 aa, Pseudomonas savastanoi pv. phaseolicola; identical to SEQ ID NO: 69164

SEQ ID NO: 69169 - protein, 598 aa, Pseudomonas savastanoi pv. phaseolicola; identical to SEQ ID NO: 69165

SEQ ID NO: 69170 - protein, 652 aa, Pseudomonas syringae pv. maculicola str. M6
MHIERLELENFRCFGPQRSQITLDPSLVAFVGDNGTGKTALMQALQRMFGIASDQRRIRKQDFHVPCDEVERPAARTFVIEAIIGFPELDADAENVAVPAFFRNMAAVENGELKVRLRLQASWVDDGTLDGAIEESYCAIQTFGDFDENDMQQIRGADRSRIQLIYIPATRDGSSQVTAFVRGRLWRAINWSQEVKESLAGAGEEVNQAFLAETAVSSISTAVTQRWQQLHSAGTDSVPVFRPVDTRWQEFIRRVEVVFHPTEDGHDRALGDLSDGQRSLFHMAMAAATLDIEARIAGGDTPQGFTQAGVPLPALTIVALEEPENNLAPFYLSRIIKQVQEIASGRNAQAIVSSHSPSILARVDPSSVRHFRLNLQNRCSEVRQIDLPIGDEEASKFIREAVRAYPELYFARYVILGEGATEEVVLPLLAKAIDFPIDRSFVAVVPLGGRHVNHLWRLLSNLQVPYATLLDLDWGRSGGGFGRIKTVCEQLLSVGKTPEQIFGTALSSSTPEAILTGFPSRNQADIQSLRKWTTWLERFQIYFADPLDLDFTMLMAYPTAYRTLETEMRGPSARGEPREAVLGEEGYPAFYDATADDALRWYRYLFLGRGKPSTHVRILSCLPQEQLAAAIPQPLQRMLANVRETLEGGTTL

SEQ ID NO: 69171 - protein, 631 aa, Pseudomonas syringae pv. maculicola str. M6
MSWQPVSPEDWLPRGITNLEPNAWEALRREGATSVVAGPGAGKSEFLAQRAAYLLETGLCKPPQQILAISFKTDAAANLAARVRKRCPPELAGRFTSLTFDAFTKSLVDRFHASIPPHWRPTRPYDIDFPTRRVVEDELHRIRAMGQPAWQARLADFSPGTFEAQYIGGNRLALEVPQQLTTADDFARYHWLHKQLFGTEPSKLTFVTLNRLAELIVRANPKIARALRMTYPYVFVDEFQDTSFAQYDFLLSTFGQGGAVVTAVGDHKQRIMGWAGARQDAFEQFEADFDARRINLLFNYRSSPELVRVQHFVAQALDPHSPQIQSQAPSQLDSDVVQVWNSRSTDVEGRHLAQWVETDMATRQLQPRDYVLLVRQRPDQFEEELQPIFASVGLSIRNESRSIGRTNVQDLMVDEASCVALAALRLASGQRSASAWLTLSGAVYAIREIDEEDEVQRGRADRDLEGFLEELKLTVRAHAPTSESAVQIAYQIFEFLDVSAIKRAFPAYLRNDLLEIMIEGFSLHLHSAASETATWLDCINRYLGTNDIPLMTVHKSKGLEYDTVFFLGLDDRSWWSHTPRNPEGIATFFVALSRAKQRAIFMFCPHRGARQNVSELYQLLTDAGVEETEIG

SEQ ID NO: 69172 - protein, 661 aa, Pseudomonas syringae pv. maculicola str. M6; identical to SEQ ID NO: 62490

SEQ ID NO: 69173 - protein, 634 aa, Pseudomonas syringae pv. maculicola str. M6; identical to SEQ ID NO: 62491

SEQ ID NO: 69174 - protein, 639 aa, Pseudomonas savastanoi pv. glycinea; identical to SEQ ID NO: 62732

SEQ ID NO: 69175 - protein, 560 aa, Pseudomonas savastanoi pv. glycinea; identical to SEQ ID NO: 62733

SEQ ID NO: 69176 - protein, 711 aa, Pseudomonas savastanoi pv. glycinea; identical to SEQ ID NO: 62734

SEQ ID NO: 69177 - protein, 603 aa, Pseudomonas savastanoi pv. glycinea; identical to SEQ ID NO: 69153

SEQ ID NO: 69178 - protein, 745 aa, Pseudomonas amygdali pv. morsprunorum
MRITKIKMQNFRLLKDISVDLESGLSVIIGKNNTGKTSFLLCLEKFIGGTATRNTFTFEDLNSDVKDNLLKIVSGTALNESSIGIVLKVFIEYDDDDDLENIGDKVIMDLDPDNKVVVLAFEYKATTDDIATLVDDFKELTAKKNAEKKSLPSLFEYLRDKHNKYFTISRRSLYFDMQTKKEDDEHFVDLDLENINLSKIINFKWISARRNVSNKDADNSLSQLSAKIYKKLEASNPNESVVEEFKDTLTNTDAKLNIVYQKIFEGVINDVKKFGGLSQNDSVIKIVSSLQHRDLLEENTTVMYGLGNNEHDLPENYNGLGYLNLISMIFEIKLKLHDFHKDINESPSDINLLFIEEPEAHTHPQLQRIFIKNIKSLLKPGIKRVDGVKRDLQTILSTHSSYIVSESDFEDIKYFKKTDKGVTSKNLKDLKDYYEDSQYYTFLKQYLTIHRSELFFADKAVFIEGDTERVLLPAMMSKVDQEDLIKELETGVVNNIPLLSQNISMIEVGAYSHIFEKFVNFIGVRSLIITDIDASAMMPVIDKATGQPKLNKKAEVQLRLQKCKVEHGTHTTNASLRFFYKKEDLAFYQNLDSSQKTLEKMDDAQWSPSILGKLLCAYQVPEKNMEGEVYHATSFEDAFFHINRVFIKSLAFDEGDFFIGDKKLPSLVQIHLKSFASGDADAFDCAENAITSKPSFAMEILLNSTIKTVSVLNANTAKLENVSIDFSNWNTPLYIKEALQWLKQG

SEQ ID NO: 69179 - protein, 480 aa, Pseudomonas amygdali pv. morsprunorum
MAQTRLALEPEVQSIFDLVDQGKNFLLSGGAGSGKTYSLVQFIRQVLAEDPKKTIACITYTNAAVAEIRGRISAPNLHVGTIHEFLWDIIRPYKAELIDALIFSLKSESLTSIKNPDDKFDPEVLRGAEVQYKEYTRVREAIVSHDEILKLAHGMFSAYPKLCDIAKDRYKFILVDEYQDTSELVVDILLVHFQKSSKTSIIGFFGDAMQSIYDEGVGDLNKYRKLGLVEEVKKLQNRRNPKLIYELANRLRTDGITQEASTDENAPNMSEGKVICGNMKLVFTATDLDKLDEVKDSLGWDFKDVKENKELNLTHNLIAPKAGFAELMLIYDGDKIIAYRNRIKDFIKDGNIEEDFSGFTFGEVIDYLVERFPGKVKDVTPTKGMKPFIDSHQELYQIALATPYVTFRRMYVAKESLIDDKKDDPSATSKAGSKRDALIKHLFKIQNIINLYETGRYNEFLKRTEFKIRSVEDKRLLRKV

SEQ ID NO: 69180 - protein, 711 aa, Pseudomonas savastanoi pv. glycinea; identical to SEQ ID NO: 62734

SEQ ID NO: 69181 - protein, 603 aa, Pseudomonas savastanoi pv. glycinea; identical to SEQ ID NO: 69153

SEQ ID NO: 69182 - protein, 297 aa, Pseudomonas savastanoi pv. glycinea; identical to SEQ ID NO: 69154

SEQ ID NO: 69183 - protein, 556 aa, Pseudomonas savastanoi pv. glycinea; identical to SEQ ID NO: 69155

SEQ ID NO: 69184 - protein, 639 aa, Pseudomonas savastanoi pv. glycinea; identical to SEQ ID NO: 62732

SEQ ID NO: 69185 - protein, 560 aa, Pseudomonas savastanoi pv. glycinea; identical to SEQ ID NO: 62733

SEQ ID NO: 69186 - protein, 639 aa, Pseudomonas savastanoi pv. glycinea; identical to SEQ ID NO: 62732

SEQ ID NO: 69187 - protein, 560 aa, Pseudomonas savastanoi pv. glycinea; identical to SEQ ID NO: 62733

SEQ ID NO: 69188 - protein, 612 aa, Streptomyces sp. NRRL S-4
MQVQRVTLENFRGVKGGTVHLDGHSLLVGSNSVGKSTVCEGLELVLGPERMFRRPVVDEYDFYGGCYQEREGKLPEVRIEVVLTHLSDAAERRFGNHLRRWSARTSDFLDTVPDAVENAETGEWCLPVVFLGRYDPQEDDFVGGTFFAHPESVPDGLDGEEAGLGAGLKSFTREDKRHCGFLYLRPNRTGSRALTFQRGSLLDTIVRLEAELAGPLWEKALRDLDQVAVAAAESGFGKIRTEIRDRVDRFVSLGDTADPVDLKASELTREHLREVLRLFIATQPGPHAVPFNRLSTGSLNLLVFALLTYIAELKGDKSVIFAMEEPEIALPPHAQRRLIDFVVKRMGQVIVTSHSPYVIEKFEPSRIVMISRDSKGALRSNRVVLPGDFKLKKYRDNRRQFAEAVLGRAVLVVEGAAEAALFPAVSDVLEADPAVTGYVPLDLAGVTIFDAQNDVSVPLFAPVFKGLGKPVYGIHDQPDKPLDAKAAAKTADFTHYTVLNYKSVEKLLVAEVPVDAQRRFLATVAQRTDYPSGCARPDPSAMDPAVSALTYDVLWARKGDGYAALLIAECQGLSQLPAALADLLLRIDRDLGTPASGGETSDTAHSDETDED

SEQ ID NO: 69189 - protein, 569 aa, Streptomyces sp. NRRL S-4
MKIDPVRQEILDAPGHLLIVGGPGCGKTTIALLKAQTRLAALEPEQRVAFLSFSRAAVRQITDRMSGVLNRASRQRLEVRTFHAFFLDVVRSHGRLLTGRPSSFIAPDRERQIQADFDGDWKSERHRLATEEGRYVFDLLAGTTATLLERSAALRALYSSIYPLIIVDEFQDTNTDQWRVIKALSGTSTVICLADPDQRIFDHLDGVEEQRLDDAVAHLAPKPFDLSKDNHRSPGGGLLDYANAVLNNAPHPQPDNVRTWTYTPGYGVPWQTRVHKGVVAVRDHLATQLGRTPTIAVLASVNSLLGQVSETLDTDTDTGELTLPAVEHALQWDPELTAAAGYVVASIMEWPGLPRAEAIARTVQSLADFYRVKLTGGTVGARGKIKPLENGLVAFTSGKTIRSKSVKAVTAAYDAGISYIGQPVADWQTARDRLRGSSELEEVLKHTRLLRLLHATDAMAWGLSDAWDGQSTYSEAAATVRAVLAAESLTAAQQAPEPVSLMSMHRSKGKEFDGVVIVEGPYTGTLLDPRWDPERMRAQRRLLRVAVTRARFVVLFVRPQGSQRLTATP

SEQ ID NO: 69190 - protein, 720 aa, Phaeobacter sp. 11ANDIMAR09
MKISTFALKNYRRLSDVSLVLDDKQTVLVGANNSGKTSCIGALHTFLKSPENLRVRDISKKNWKAIQTLGEEVEKAFPKSEDMAGLSAKLISLLPCLDIDITAEASEAYKVRDILPDLEWRGGILSVRMTYEPKDIERLFREFVDARHVVSEHKGEVSLWPKDLCDFLEKGKNFSTHVKQKHHILSKASGASATETLQPLKSEALKKLIRVDVISEQRGLGAEDSAEQKGPYSEKQRLNKLLRDYYDRILNPEDFPAVEDLTVLGQQQKLEKGFTDRLNEQFKDPFEELKIMGYPGIGGNPTVEIAAKISGTDALQKSSSVQYKFDKDEDDFLPESYLGLGYQNLIYLTFRLLEFRDKWMRVGKSASTMEKVEEQIEPIHLVLLEEPEVNLHAQVQRVFISKAYETLRNHANLRDKGTGVDKPEYQTQLVISTHSSHIIDDIDFKDLRYFRRNSANASIAMDHTSIANMSELFASPKEELQFVRKHLKLTHCDIFFADGVIFVEGQAERLLVPEFIANSFSGLSSRYISMLEVSGAHTHKYRDLVEKLGVATLVLTDLDSVNSAKKSCFPQIQADQKTSNATLKNWHPKVVLVDELIDKSMMDHVTNSRGAPLYVAYQKSTKINGQDVLSRTFEDALILANFDNEFFQNEGSIRDAKVAFEDGSKPLSESLYDYVKKLNKGNFAFDCLFHLSSEETARFRPPVYMSDGLKWLEAQLSPKS

SEQ ID NO: 69191 - protein, 640 aa, Phaeobacter sp. 11ANDIMAR09
MSQEKFLAETKPIDHDSNIDEGIRECLRIGSGKSFITFAGAGSGKTYSLKEALDFLNSQHFSDFARQGKQIAVVTFTNNAADEIKDRIQQSPIFAVSTIHSFCWSAIAGFNEDIRKWYLGKVPADLAEVEDLERRGRAGTKASDARKRTIIRLREKLEWLAEPRTFVYDPNGVNSSQNALSHADVLKIFSNFLTTKPMMAEVIVNKFPFIFIDESQDTNKDVVSAFFDLQTAKSDSVVIGLLGDTMQRIFGGGEPELGKTKPSGWITFDKEMNHRSARRIVGLGNQIRSEDDGRMQFARDGAAEGYVRYFLLAHGVSDKDAIEAKIREFMAQATGDEAWVDSRSEETAILLLEHKMAGRRLGFDGLWDQLSVSEKIKGQISEGDNTELNFFSGVVFPLAEASLKENRAELMSILRRNKSPLLEASVLDANKDDPLKLGRAAEHALREVVSNDKVSFRAVLEVLADHRLLRLPSKLQAFVPASRNDEAETGEDLTEEVSELVSEEDDDSEIAAWANALETDFFQIQNYRDYIDQNSIFRTHQGVKGNEFERVMVVMDDDEAGGFLFSYEQYFGAKEPSKASQKKRDAGEEISADRTRRLFYVTSTRAKNSLAHVIYTSDMAKVKADLIERKFAKEGEVIEF

SEQ ID NO: 69192 - protein, 358 aa, Geobacillus sp. BCO2
MKVKKLYEYVDFPIEQYEYIIYGGDNPANKCDPYFLRMLKLEVLDALRDAKRELKANGEYKLLYRILNKDYDTDFVGIRTLLENLNEEIKQNEKLQQIKRELTHYLDRVSLVNSVEQNNIDFNFSSPEISEILKKLSLIYGQEPISIERNGLGKNNLLFISLVLSHLASQTENKSPLIFRVIGIEEPEAHLHPHSQKHLAHNLSDISKVETLDSDEGIQKNGESGIKKDTQIIVTSHSTHITTSIDLENLVVLYKDKGKLDYHYILDGFKDNREGREHIRYLKKYIDATNSSMFFARKLILVEGISEQILIPTFFKLLYGQTLERIGCNIINVNGLAFKPFLEVIKNGYFIKMWSCNG

SEQ ID NO: 69193 - protein, 429 aa, Geobacillus sp. BCO2
MGRSKKISKHKLIIAAAGSGKTRELIKRIKDKIKLLPPSKHLIVITYTNAATNEIKERLEEEISIPENVFIGTIHSFLIKYVIKPYGKILRLVPDEITITDYDIKIDSQTGNQYYQRKNQIINALSRKGIITYDGVVTLAKKILKNDVVRARFCKRIAYLFVDEFQDSDLGQFQIFEILRKGNCTEIVLVGDPEQNIMNFRKKITNHPIVSLQGKKTYHVECIQNNYRSSETIVEFINHFHSDIKQLYKNKEITSKNPIVFIESTELNQIVRNFNDLCTNKEYCENKPKKRFFLAYENKEFDEYRINNSGNRESKQAFKVIDLIMQYLGALYNVKKSKLINHFNMETIEFRKRCLNLFFKIRSDPNMKIEHIITYLNSLFPHKISPLEENTNIQFKIDKIVEDFIKDIQSIDFKKILITLLMMIMKTTF

SEQ ID NO: 69194 - protein, 689 aa, Aneurinibacillus migulanus; identical to SEQ ID NO: 66180

SEQ ID NO: 69195 - protein, 572 aa, Aneurinibacillus migulanus; identical to SEQ ID NO: 66181

SEQ ID NO: 69196 - protein, 711 aa, Serratia marcescens
MYLKSLVIHNFRKFGDVNNKVCFVKAGKTLPEQSPVAASTTVVIGKNNSGKTTITNSLSLICSDTERLTGNDFNHNYLRKILSSMMASDFSKYPEIKFEMEFILDDIHNDSTSNFAPFIDISSLSSTPGEENNAATALALITFKINDESIFQDKMKDLIREKQENSYNDTEVFRRFLDLISMTEFKRVIKNKSNRVIEKVRIKNIIDLRVIKVANNIHDQRLLAKSFNRIIKFMYEKNKDELKSILHLVDGNNHSLTEMIKLSHQDNVESVLNTIILDESLGIELRANLTFDKLMGDLITYEHRDGNNLIPEGQFGLGYANLINIISEIIDYSNRSLHEQKQLKIQLLCIEEPEVFMHPQMQVNFIRHIEEALVKILGLNFKDISSIKSQIIVTTHSSHILNSIIHGSGTFNEINYINSSKRNSECIVLNDDELCDGGKEFDYFKFIKKHVKHQVPELFFSDAIILVEGITEERVLNYHIDNNDILSRRNISVFRIDGAHGKVYSNLLKKINIPTLIITDIDFKRDSSLFKQVTIMEDGSEVTTEHFPQMEKIDNSTETTNSTLSYFLGSKKVGEYPTHHISDNIYISYQLERISIDIPGSKQSHYYATSFEEAFILKNYKNNLLREVLLRVVGKDYSDIISTKQDDYYLLATNSFKIQKKLSDCKSAFANSIIFELITSNKTKPILPSYILDGLSWLERQKTKKEGFDHV

SEQ ID NO: 69197 - protein, 676 aa, Serratia marcescens
MYEIDKNKAKKEEEIIERIYSLINKKESFYFQSGAGSGKTYALVKAIKHSGKLDLIKDNHGFRKILCITYTNNATSEIVERLPNSDLYYISTIHYFIWELLKNYNKELIDVHVSFLESEIINIEDAIFHNPDSKPSYKKFRDITITDLEFAIEKIYIDKTNYYEVAFGPAKEYWNYLESIMGTTTLQRIKSNKQDVCDVIKLLMNIRNYKFCLESIQNGHLEYKKIIYNSNQNIEILHRNIIGHDTLLKYAKMLLLKNRGLSKLVIDSYPYIFIDECQDTNPDIIDFFAEIYDYSKQSEDDFVLGFFGDPMQTIFSKEIVHAPFYSRLNVINKDFNRRSYDEIINSINIIRGNHQPIIQTSIFKNKKGGLVKFQRLDELYNEKSLIREIIAEHVREWNISSESSFACLVLKNKMLASLCDYEKVYSLVARLYQAENSSYHNKVNEEFVVREIKKAGRLAITLHKILLPLFFIVKDDRLSLNEVFPVIPKGQYNLNEVREAISFFKSVSNCSLLEYIDNIRNKLNSTYPREIKELIGCNFPTELVNADSSLEATILGLSGFKRVSECSPILSELLQVNTNEFLNWMNYLHGEKKTSGTNYLTCHSSKGLEFDNVLILLEDSMLHDKNIFSELLSSDLNITLNDKLERARRIFYVSVSRAIKNVSIVLFSKNAVDFQT

SEQ ID NO: 69198 - protein, 674 aa, Chryseobacterium indologenes
MKISNLKIKGFRSFGPEEIKIPVDEKLVGFIGLNSAGKTTALEALRKLFGQSLTDREIFRQDFHIGKDEKLEDITERTLSIEARIDFDEEEQEAVPHFFTDMVIDEENSNPYLRLRLEASWIKTDYGPEGEIDSKVYYIKVPEGSVEGDDTKQIFPNHLKRLIQILYVPAIRRPVEQLKYASGSILFRVLKKIKSNDTFKSEFDEKIKDINDAFKGLEDFNIVQTSITENWRQFHKDKRYKDTTLGFGGSDLDSILKKLEISFSPTGTHKTYQIDELGEGYRSLFYLTLVCALLEIEEKLAENDDEENIGINRPLLTILAIEEPENHIAPQLLGRVIKILKKIASKDNSQVLLSSHTPAIVKRLNPESILHFRITEKFETEVNKILLPEKTDDAYKYVKEAVHNYPELYFARLVVIGEGDSEEVIFNRLMEVMEVDFDDNIITFAPLGHRFVNHIWRLLETLHIPYVTLLDLDVEREGGGWGRIKYALNQLIKIGIKKEELLKLADGSILSDDALKEMHTWSLTEKDSIENLNGWVDYLRKYNIFYSNPLDLDFLMLTHYPEFYRKAIPKNGGPQIPDETTEAEKFDAKVKVAIQATLKSEKATAATYSEEDRKLMIWYNYHFLGRGKPTTHIQVLSSMTDEEINANLPQVFMEVFDCISSLLKTNQEDEANQI

SEQ ID NO: 69199 - protein, 617 aa, Chryseobacterium indologenes
MKPIKSKEWIPTDGMDLEENAFKVATTIENNLVVAGPGAGKTELLAQKACFLLQTNTCKFPHKILAISFKRDAAYNLKERVRLRCGDELSKRFDSLTFDSFAKQLLDRFKQALPDEYKISSEYEIVLGDQFILALYESEDINYFNTTHRNTIIQLHNAQLPHLSNNKAEAIRYKVWQKMIQQSKLSFTMVMRLAEYIINTNPKIKEYLQQTYHFVFLDEFQDTTELQYDLFKSCFLDSHTSYTAVGDDKQRIMMWAGARETVFEDFITDVNATRIPLNMNFRCAPRLVTLLNHLTRHLLGKDDFATPSPKWNAEQGECYFWVFENPESEMQILFREIQDWINTEGINPRDICILVKQQLTQYAGDLITYFNENGIKARDENKLQDILTQEVCIYIINILYAIFQKKAGEAKQAAFVFLSNLHTELEDDQLIKLQNIISVFIKIKQDAYQKRTLSEEQINTLIDEIIDFAGKDRIRASFPSYKNAAEFDRTITSLKEVLIKDYHTTKNNMILALDMVLGKDTIPVMTIHKSKGLEYHTVIFIGLEDGAFWSFERQPDEDKCAFFVALSRAKERVAFTFSKKRTGRFGLRDQSITNISVILDELKKSGIVTMAERKLNS

SEQ ID NO: 69200 - protein, 692 aa, Pseudomonas aeruginosa
MRIERVEIQNFRLLQNVSLGLEDGTTLIVGRNNCGKTSIAEVFRRLLSDRAPSFRLEDFSLGSHEEFWTAFNAFHGEIARSDVAVMLPVVRVTLDISYDIDAPDLGPLSECIVDLDPDCSCARIVLTYGPRATALESLFAEIIAPNAEQGDQRPGFFSLIKKRLAAAYEPRLEAVDPNDPTNRKDLDLKALTTLIRGGFINAQRGLDDDTHRERDILGKVVEVLFQSALTDPTDPEKRTTAEQLHGAVEKIQKELHDGFNAGLTSLLPTFELFGYPGLDDPGLTTVTTFDVERLLKDHTQVRYRGVNGLTLPESYNGLGVRNLVYILLQLLKFFREFQATPAAASVHLIFIEEPEAHLHPQMQEVFIRQLHLIKGAFEQQLNDSRPWPVQFVISTHSPHMANEARFETMRYFLSVTDEHGIRQSKVKDLRWGMGGAPAPDRDFLYQYLTLTRCDLFFADKAILIEGTSERLLLPTMIAKTDAAAVGEPQLASQYLTVMEVGGAYAHRFHDLLTFLELRTLIVTDIDSVKPNAERKRKACPVAEGLYTSNACLKDWFEAEVTPAQLLAKTSAEKTRGLRRIAYQIPEGNEPGPSGRSFEDAFILANLDRFQLGQGDVASLAYEHAADQKKSAFALKYAIDDTNWNVPRYIAEGLRWLAVGAPVVDAQMAARTMAAVVEAVGEAVAAEGGQGDA

SEQ ID NO: 69201 - protein, 584 aa, Pseudomonas aeruginosa
MPDIQESPADRAGREALERMFACLDEGQSFRLEAGAGAGKTYSLEKALSRLIEHRGPALIRERQQVACITYTNVAKDEIISRFQAHPAIQAETVHGFCWSLLRDFQSSLRAFLGAEAFWQDRFETVGGVGSRRIHYEMGIPRVSEDEVSIRHEDVLTLMVQALTSPKFRAVLTSRYPILFLDEYQDTDEHFVDALKSWFLDRGEGPMIGLFGDHWQKIYDEGCGLVEHEALQPIEKNANFRSASRIVDVLNQMRPGLQQEVRDPDLIGEARVFHTNRWPGARRTGAGGGHWTGDTSPEAARAYFECLKVQLNVEGWDFSPQKTKILILNHRGIAREQGYSSIPPIFGQFNDPWLKKEDPHIKYLADQLEPACVAYQQRRYGAMFGHLASDRPTIRRHSDKVAWTEAMEALLELRLTGTIGEVIDHIMAVPQMQLPNAVLRNEQGLQHAGVEPGEDEPRRITQLRKLREVPYSELIALDQFIDGHTPFATKHGVKGAEFENVIVVLGRGWNQYNFAEMLEWFQPGPPANRREKFESNRNLFYVACSRPKVRLALLFTQLLSPAALAQITAWFGAEHVFELPANPG

SEQ ID NO: 69202 - protein, 692 aa, Pseudomonas aeruginosa; identical to SEQ ID NO: 69200

SEQ ID NO: 69203 - protein, 584 aa, Pseudomonas aeruginosa; identical to SEQ ID NO: 69201

SEQ ID NO: 69204 - protein, 657 aa, Rhodopseudomonas sp. AAP120
MRIQSISISGFRSFGPTPQRVSLAGDLTTIVGPNASGKTALLQALAKMFGVTRAQRTLHRSDFHLPKDVAPDDRTTRDLFIDVVITLPELKDGSATAEAVAPTFRHQQLEGPKKVPACRLRLEARWQDDGTAEGEVTQELFWVDHLKEKVEADDKHTVSPADRGLIQFYYTPASRDAATQIRATTGALAARLIKAIEWSKGTRKAVDDATKKLSDAFGGEAAIDAISKALNVRWKELHDEETDTDPGLTLVSKRFEEVVAHIQVMFQHGPAKIERGLDVLSDGQQSLFYFALAAAVFDLERDAVATKIEGFRAEELRIPALSIFGLEEPENHLSPYYLSRIVKQVRSIVGGNAAQALITSHSPSVLSRIEPTEVRYCRCDQDTRASTLRTIELPSGATEAAKFIRGALLAFPELYFARFVVLVEGDSERIVIPRLAQAEGLTLDPSFVAIVPIGGRHVQYFWKLLNNLSIPHATLLDLDLGRKDGGYGRVSNSLKELVARGEDQDTLLKGKDFVVDPDKMKGWDSSDWSTLKTWVNFLEPYGVFYSAPLDLDMEMLSAFPDAYKAIIAKGGGPSLTPDEAVEVVLGKGGNGIAEYKAAEFAGYKAHMPAYRYHFLTRSKPATHIEVLAHLDDKALKKGMPDVYRRLIKHIDENLNRD

SEQ ID NO: 69205 - protein, 634 aa, Rhodopseudomonas sp. AAP120
MTLVSRRVQPDQWKPIDVDALELNALDVVHSTDNRCVIAGPGSGKTELLAQRASYLLQCGIAPPPKRILAISYKRDAASNLAARVKSRCHPDHAYRFDSLTFDAFAKSLIDRFGQALPERWRPCPDYKVVVDAYDRTFDEFLRFLSPPPKAIGSRADVMAIHSKDFQRRWLFGTPLPEGAPTITSPGEWAADQFWQSWLHDPGGSSLTFPMLSRLAGLLISSNPMVGHALQLTYSHLFMDEFQDTTQSQYDLAKAIFLGSDTVVTAVGDNKQQIMRWALAMDDPFTPFETEFKAKRTPLLNNYRSSPDLVAIQDVLAKALDAKSSTPVSKTKGTVSGDSCAVWDFSTPAVEADRLAEFVGKQMAEHKLTPRDFCILIRQKAGDYMKVLEPAFAKKKLPLRNEVEQVGEVTMQELLVEDLSEFLIVLLRLFTTVRAGRHWTACLDMMCTLNGLALDDDAGRAKLVKRLNAFEADFRKTYPVPVTSQADAKKIVQSLIAFIGRANILAASPAYRQGDWFDKVSDAAALHLEASSSSAANWTEALDEYEGVHTVPLMTIHKSKGLEYHTVIFVGLDDQAWWSFANDKIEATAGFFVAFTRAKQRVLFSYCAQRGDRSKIAVLYQLLSKAGVKTIKVA

SEQ ID NO: 69206 - protein, 623 aa, Bosea sp. AAP35
MKIYSVSIENFRGISSAKLILPDHAVLIGDNNTGKSSVLEAIDLALGPDRLSRRPPVDEHDFFEGKYLPLTAASAEEGAVADEAGAAPVAEAPKITVEVTIAGLSEEQEARFGGNIEWLNVETGDFFTEANPAGVDAAHIQAALRVTFIGAYDPDEDDFVGNTFYSRSLTEADKPEPFSKKDKQHCGFLFLRSLRTGSRALSLEHGSLLDIILRLKEIRPQMWEGTIGTLAAFDVASDPALGISGVLDSIDKSLKKYVPREWGLRPHLKVSNLTREHLRKVVTAFIATGDGDHAAPFFRQGTGTINMLVLAMLSQIAEDKQNVIFAMEEVETAIPPYAQKRIVHELRKLAAQSIVTSHSPYVLEEFKLDETVILSRTNHGVLSQAQISLPDSVKHKRYRQEFRTRFCEGLLSRRVLIAEGATEASAFPVAARRLSELNPAAYASLEALGICVIDAGTESQIADLAGLYKGLGKRTFGLCDKQTDPAKAAIEAQVERLFMHEEKGIEDLIIKKTTQDALERFSDALDWPPHILAKYPDPKGSVNAALKEYFGWAKGNWGIADFLGQCSEAEFPSWIRDACITLKAICDPPPAPPIPPAPLAPTVPAPPAPPAVNGQQAAPASGA

SEQ ID NO: 69207 - protein, 607 aa, Bosea sp. AAP35
MVDLTPAQKDVLAAEGHQLVVGGPGSGKTTVSILKAAKIAREKLRPGQRILFLSFARATVSRVFEAIDEERSVTKEEKKRIEVDTYHSFFWRILKAHGYLVGFPRRMTILTPPNEAIALSAIRGGFKAPSKLSDEEKVHKAALEVAERMRLATEEGKVCFDLFAERVAILLHGSTKVCELVSTMYPFIILDEFQDTSADQWRAVEAIGKSSTLISLADPEQRIFDFIGADPERLNHFKEAFKPFEHDLAGDNHRSKGTDIAIFGNHLLTGKFRDQPYHGVEYEGFASNPNQAYASLVAQVLRARQRLLALGRRDWSLAILVPTKRMTRLVSDNLRAPFGNVPPITHTAAVDMEGPILAAEVIAFLLQQRSNSGCFDEFVGVLCSFFNGRGGATPTKGDLEEALRFKSALEKWNGCIAKGKATPGNSVLQATFAVHEAASTIALTGQPDADWTAIRAVLEAGGCKRIVEVAQEARNVRLLERGTQLRQSLSQDWRDTGGYKNALTITRQSFAQEHFATAHKPESGIVVMNMHKAKGKQFDEVIIFEGWPKRFKGEIVGNPDRIVGGNVKSRALTQARQNFRVSVTRAKMRTTIMSPKDDICVLLIPME

SEQ ID NO: 69208 - protein, 691 aa, Fusobacterium nucleatum subsp. animalis
MILKEIVVENFRLLKDFKLELKDELSLIIGKNNCGKTSVFVILDKMLNSSEIAWEDVNLVKQKELYNEINEFNGTLQEGDKYLEAIKLQLYIEYNDIDSYENIQNFIMDLDPENNIILLEFILLIDIKNILELKDIIKEREIKDFSTFSRYMSKNFTKYFKIKKYSRGYDKGNKKLIPDMKEEIDSKNIQKVIKVMGIRADRAVFNDERNHALSTLTSRYYDTYRKNIKDESNSIFQELEVELEKADKALYKIYNGEKTNNKKGSEGIFKGIIDVVKTYGGSDNKINISIESSISEKNLLTNNTSLYYKHGDGDSSSLPETYNGLGYLNLIGILFEIETKLQELYEQPADINILYIEEPEAHTHPQLQYIFIRNIKNHINSHRDKLKNKKNKYLQIIITSHSSHIVSECDFDDIIYLKRIENNILAKNFNSLKKEYDGDKQRGFKFVKQYLTLNRSELFFADKVICIEGDTERILMPAMMYKVDKMQSSKNKSTIPLLSQNISVIEVGAYSHVFIPLFVFLGIKALIITDIDSAIKNNNGKYEKSHPDKATHTSNASIREFFKESGLDGGNKQFKELIEKKNEDKIKGKIRIAYQIPEIEGGYQASSFEDAFISLNKDFILKNKDNFYDYGALKKFNENEINKDSYEFSLNKIEKKSAFASGLLYFDEEDEGISWKVPHYIKEGLLWIQGF

SEQ ID NO: 69209 - protein, 636 aa, Fusobacterium nucleatum subsp. animalis
MDTRILEDGVKGALQCIEKGENFILEGGAGSGKTYSLISLIETLIIKSPEIKIVCITYTNNAVAEIKSRIGSKNLWVSTIHEFIWHIIKKYQKEIKNELILFINDETIKNFKKPKEMENTIITIDYFNNIDVEYDEYYSMNPNAENKVKISHDHILILTEKMFDKYKKLSDILKDIANCIFVDEYQDTSPYIAKILLEHLKKSKKKNVIGFFGDSMQSIYDEGIGDLKKYNLKKIVKKENRRNPKIVIEIANKFRDDNLMQIPSSDRNGPNMDKNGVVIEGNIKFIYGKEPEDINFLKNKALFKSWDFLDGKKTKELRLTHKYNSEMAGFKKLYDLYNDDLIIILIDKIKKVIDSSSNENNEKSLSKLVLELRPTYNKKDLLEEIINNKIYNSIYQSIENLAWKDILEKCKINKESLMSYKFNGISERYETNSYRDKVLQRLDILNELIELYESKKFNEFLKKTNFSIQNKNDKSKLKEIMNYLILEDGKTIEEVLNFSKKQGLITEDMFFDNYIGIKGFYLWERIKKISFKEYRNSILYLKEFSPISTQHSIKGNEFDNVLVVLESNWNKYDFKTLFGKGSGNENVIKRTRKLFYVCMTRVKKNLVIYMPTEDLEIVNSAKEYFGEENVLSIDSI

SEQ ID NO: 69210 - protein, 691 aa, Fusobacterium nucleatum subsp. vincentii ChDC F8
MVLKEIVVENFRLLKNFKLELKEDLSLIIGKNNCGKTSVLVILDKMLNSSEIAWEDVNLVKQKELYNEIKGFNGSVQDGNKFLEAIKLQLYIEYSDIDSYENIQNFIMDLDSENNIILLEFISLINIKNILELKDIIKGRKIKDFSTFSRYMSKNFTKYFKIKKYSRCYDKKTKKIISDMIEEVDNKNIQKVIKVMGIRADRAVSNDERNHALSTLTSRYYDTYRKNIKDESNSIFQELEVELEKADRRLYKIYNGERADDGKDSEGIFRGIIDVVKNYGSYDNGINISIESSISEKNLLTDNTSLYYKHGDGDSSSLPETYNGLGYLNLIGILFEIETKLQELYEQPADINILYIEEPEAHTHPQLQYIFIRNIKNHINSHRNRLNKEKNKYLQIIITSHSSHIVSECNFDDIIYLKRINNNILAKNFNSLKDEYEGDKKREFKFVKQYLTLNRSELFFADKVICIEGDTERILMPAMMYKVDKMQSSKNESTIPLLSQNISIIEVGAYSHVFIPLFKFLGIKVLIITDIDSAIKNNNGKYEKSHPDNATHTSNASIREFFKEDGLDDENNQFKELIEKKGKDKIKDRIRIAYQVPEIEEGYQASSFEDAFISLNKDFILKNKDNFYDYGALKKFNKNKIGKDFYKFSLNKIEKKSAFASALLYFDEEEDDMEWKVPRYIKEGLLWIQEF

SEQ ID NO: 69211 - protein, 633 aa, Fusobacterium nucleatum subsp. vincentii ChDC F8
MDTRILEDEVNTALQCIEKGENFILEGGAGSGKTYSLISLIETLIIKLPEIKIVCITYTNNAVAEIKSRIDNENLWVSTIHEFIWYIIKKYQKEIKNELVLLINNETIKSFKNPEDLENNLITIDYFNNIDVEYDEYYSMKPNENKVKISHDYILILAEKMFDRYKKLSDILKDVANCIFVDEYQDTSPYVTKILLEHLKKSKKKNVIGFFGDSMQSIYDEGVGDLNKYKLKKIVKKQNRRNPRIVIEIANKFRDDKIIQVPSKDKNAPNMDENGVIIEGNIKFIYGKEQEDINFLKNKALFKSWNFLNGEQTRELRLTHKYNAEMAGFKKLYDLYNDDLIIKLIDNIQKNIDNNENKESILDELVLKLRPTYNRKDLFEEIIGNEIYKSIYQNIKNLLWKDALEKCKISKESLMSYKFNGINGRYETNSHRDKILKKLDVLNELIELYESKKFNEFLKKINFSIQNKNDKSKLKELMNFLIFEDEKTIEEVLDFSKKQGLIKEDMDFDNYISVKGFYLWERIKKISFKEYRNSILYLKEFSPISTQHSIKGSEFDNVLVILESNWNKYDFKTLFGKGSENENVIKRTRKLFYVCMTRTKKNIVIYMPTEDLEIINSAKKYFGEENVLSIDSI

SEQ ID NO: 69212 - protein, 691 aa, Fusobacterium nucleatum subsp. animalis
MVLKEIVVENFRLLKNFKLELKEDLSLIIGKNNCGKTSVLVILDKMLNSSEIAWEDVNLVKQKELYNEIKGFNGSVQDGNKLLEAIKLQLYIEYSDIDSYENIQNFIMDLDPENNIILLEFISLINIKNILELKDIIKGRKIKDFSTFSRYMSKNFTKYFKIKKYSRCYDKKTKKIISDMIEEVDNKNIQKVLKIVGIRADRAVSNNEKNHALSSLTSRYYETYRKNIEDKSNSIFQELEVELEKADKALYKIYNGEKTNNGQDSEGIFKSIIDVVKTYGGSDNKINISIESSISEKNLLTDNTSLYYKHGDGDSSSLPETYNGLGYLNLIGILFEIETKLQELYEQPADINILYIEEPEAHTHPQLQYIFIRNIKNHINSHRNKLNKEKNKYLQIIITSHSSHIVSECNFDDIIYLKRIDNNILAKNFNSLKDEYEGDKKREFKFVKQYLTLNRSELFFADKVICIEGDTERILMPAMMYKVDKMQSSKNESTIPLLSQNISIIEVGAYSHVFIPLFKFLGIKVLIITDIDSAIKNNNGKYEKSHPDNATHTSNASIREFFKEDGLDDGNNQFKELIEKKGKDKIKARIRIAYQIPEIDKGYQASSFEDAFISLNKDFILKNKDNLYDYGALKNFSKKEINKDFYEFSLKNIEKKSAFASALLYFDEEEDDKEWKVPRYIKEGLLWIQEF

SEQ ID NO: 69213 - protein, 633 aa, Fusobacterium nucleatum subsp. animalis
MDTRILEDEVNTALQCIEKGENFILEGGAGSGKTYSLISLIETLIIKLPEIKIVCITYTNNAVAEIKSRIDNENLWVSTIHEFIWYIIKKYQKEIKNELVLLINDETIKNFKKPKDLKNTLITIDYFNNIDVEYDEYYSMNPNENKVKISHDHILILAEKMFDRYKKLSDILKDVANCIFVDEYQDTSPYIVKILLEHLKKSKKKNVIGFFGDSMQSIYDEGVGDLNKYGLKKIVKKQNRRNPRIVIEIANKFRDDKITQIPSKDKNAPNMDENGVIIEGNIKFIYGKEQEDINFLKNKALFKSWNFLNGEQTRELRLTHKYNAEMAGFKKLYDLYNDDLIIKLIDNIQKNIDNNENKENILDELVLKLRPTYNRKDLFEEIIGNEIYKSIYQNIKNLLWKDALEKCKISKESLMSYKFNGINGRYETNSHRDKILKKLDVLNELIELYESKKFNEFLKKTNFSIQNKNDKSKLKELMNFLIFEDEKTIEEVLDFSKKQGLIKEDMDFDNYISVKGFYLWERIKKISFKEYRNSILYLKEFSPISTQHSIKGSEFDNVLVILESNWNKYDFKTLFGKGSENENVIKRTRKLFYVCMTRTKKNIVIYMPTEDLEIINSAKEYFGEENVLSIDSI

SEQ ID NO: 69214 - protein, 660 aa, Pseudomonas libanensis
MRIESITISGFRCFGPNEISIPISDEVTTIVGPNAAGKTALLQAMSKLFGVTRAQRTVSLSDFHLAPGEDPESRDSKELFIEAIVAFPELLDGSATAETIAPSFRHMLITRAAQAPVCRMRLEAQWDDDGTLEGEVSQSLFWIDCLDDEPAEDKYQPVAVTDRGLIQLYYTPASRDAAGQIRATAGTLAARLLRAIEWSSDTEDKVQEATESLTAAFEGESAITAITEALQTRWADLHDDASNTKPRLSLVSRRFEEVINKIAVIFEQGPDGRERGIEALSDGQQSLFYFALAAAVFDLEREVVEGFVDGFREDALHIPALTLFALEEPENHLSPYFLARIIRQVRSLTEASGAQAIITSHSPAVLSRVEPSEVRYCRCNAKTRVSNVKRIELPTDDVEVSKFVRGAILAYPELYFARFVLLVEGDSERIVLPQLAEALDLLIDPAFVAIVPLGGRHVQYFWRLLKGLGIPYATLLDLDLGRDGGGWGRVKTALEKLIEFGEPKDKILKVTSGIMTDAKLAGMHKWSNRGDHSNLLGWMNRLKKYNVFFSAPLDLDLEMLNAFPDDYAAVIPKGGGPRTTADKAAEVVLGTSGPGLSVYTGPYEDYPALFPSYRYHFLTHSKPATHLAALTRVSKASLTADMPAVLAEVVRHIASSLRRD

SEQ ID NO: 69215 - protein, 634 aa, Pseudomonas libanensis
MAVSSRRIAREDWKPVGVEALEANALKVVRSRKNRSIIAGPGTGKTELLAQRAAFLLQTDTAPSPRRILAISFKRDAASNLAARVRQRCHHSHAKRFDSMTFDAFAKGLVDRFGQALPDRWRPRPDYEITTHTERDFRDYLHDLPPPPAVIGTRNDVREIGSKTFERRHLLGSPLPVEGWPDPTVAQWAADAFWRVSLHGGGKSVLSFPMIGRLAELLLRVNPMARDALRLTYSHLFMDEFQDTTRVQYDLVTTIFRGTETIVTAVGDNKQQIMRWAMAMDDPFSAFDADFGGVRTSLFNNYRSSPDLVRIQHVLAQALDVQAVQPISQTDGTIDGESCSILDFPSPKTEACHLAQSVASYIADLKLTPRDFVILVRQKAGEYAEILEPAFANENLALRNEAGMVGKVMLQELMTEEISKLAVNFLRLSMTPRAGSYWSTCQNWLASMRGIDADDSIRQSRLARVLDTYATELAARYSLPPRSKVASRALVDDILNFVGVEHVIRFNAAYGQGSWLEKVLDATAEHLLSSSLHSKDWSHALDMYEGVHAIPLMTIHKSKGLEYHTVIFVGLDDGAWWSFSQDEIEATAGFFVAFTRAKQRVIFTYCASRGTRTKIATLYELLTKAGVQITTGSS

SEQ ID NO: 69216 - protein, 699 aa, Chryseobacterium sp. ERMR1:04
MKIKTIEIKNFRLLKNTSLSLEDSTTVIVGRNNSGKTSLTEVFRRLIGDKNPVFSLYDFSISSIEGFKKALQAKLEGKEDAEIRSHIPSIEIIITIEYPKDLADLGSLGNFVIDLDVESNVAVIVIKYGLKDGKVDSLFENIADSSNESVKVLFKSLKEKIPNLFETKIIAQDPTDEENISLMEYSQFKSVLGAGFINAQRGLDDVTHSEKDVLGKVLAQLFKTSKSSTAPVDMKTKSDEIQKIVDEIQIKVDTDFNTEVNKLLPALSLFGYPGLSDPNLSTETTLNVANMLDSHTKIRYKQGDNLYLPETYNGLGSRNLIYILFQLFEFFREYQSRPISNALDIIFIEEPEAHLHPQMQQIFIKKLHEIADQFSATLNDGKKWQVQFVVTTHSTHIANESEFEAIRYFLTSKNEQRETKIKDLRLEFNQKVLREDKEFLHKYLTLTKCDLYFADKAILIEGTAERIMLPVLMSKTDAMDSAALQLALQYLSIIEVGGAYAHHFYKFLDFLELRTLVITDLDSVVKSPENTYPKSLVKDGTHTSNAGIKNWFAKGTDGHYLLSECITKTPQQKISGYRRIAFQIAEDGKSAIGRSFEEALILANRTNFGITSTEEDEVETIAQSKSPSNDKKSEFALKYALLETDWITPKYIFEGLKWLAENPNTPAAEVVAEIEEVVNATFENSGEGSEENTLTETEE

SEQ ID NO: 69217 - protein, 582 aa, Chryseobacterium sp. ERMR1:04
MPSENEISPAEKASQECLELVYKAIDDNENFLVEAGAGAGKTYTLIKALKYLIKKYEVDYEKSHKRIACITFTNVAKDEIQSRTDNHPIIIADTIHAFAWDCIKGFQKELRNRIGGLSDKWQIRVDETGLKSQEVIYSLGYPKMTDKEIYLHHNDVIKLFILLLNEKKFRKLFSSNYPIILIDEYQDTNKDLANAIVDKFILTREGSKIGFFGDHWQKIYGSESCGLIEADEDKLRIIGKKANFRSDKNIVEMLNRLRPELQQHEYDSSSEGELLVLQTNNWEGERRQESHWKDDLPEETAHKYLESVKEKLTNNGWDLSSTKTKILMLTNNVLAAEQGYQNVANVFDTEDYLKKNDDYIAFLTDVVEVGWEAFNKKKYGEMLKVLGLKQIGIKKHHDKEVWHDAMVRLSDLRQTGTVGQVIELLKSTSKPQLSRKIEEKEFRYSTVSKLREEDRSDEDKVFFDKITRMRAIAFTEITNVSKYIDDQTLYSTKHGVKGAEFENVIVVFGRGWNLYNWNQFLEWYNSGNIPAAKKDAYERNRNLFYVACSRPKKRLCLLFTQELSEGALQGLNKLFGNVINSA

SEQ ID NO: 69218 - protein, 398 aa, Bathymodiolus azoricus thioautotrophic gill symbiont
MLSKIEYSPADIQAIEQQIEQLNEKAVSSSNILSHIKETLKGLDSALENTRSGIELTPFTKKIRDLNKGLMIYYGDSQDSFSMEYHGMGTRSWSSLLTLKSFIGLLASNAEKVGSVFFPILAIEEPEAHLHPNAQKQLYSQINDIAGQKIISTHSPYIAAVADLGQIRSFYKDQEGTRCDKVAIDSLTDEDQRKITRHVINSRGEIFFSKLMVLFEGETEEQALPIFAKHHFGKSVVEMGVDFIGVGGYGNYLPFLRFAESLNIPWLILSDAEEKTRNSVKKQFDNCRSKKTEADVIVFLDNDNNIENQLLKDGFQDEIRQALIELDDYHSEQEKTSAQVKIKAFNDEKLYKQMKKSKTQFAPVIAEQIIKSKKTLPPKIIELFNKISSILNITEKAS

SEQ ID NO: 69219 - protein, 626 aa, Bathymodiolus azoricus thioautotrophic gill symbiont
MSHPIPLSEQQRSIVNAQNGALYVKASAGSGKTRVLTERIRVLLSRSNRKILALTFTNKAGKEIQDRLADIEDIEQRTFVGTFHGFCQSVLENHRHLLGYAEMPHIFEDESDRLELIEQAIQLTPSYAASYRKQDKKQQRDFRYRALNFIANMKLRLINEADIAAQTENENIILLYCSYQDILKSQNAIDFDDLLLKVYGLFNDYPKIAALYRRSFFAVCVDEAQDLNNAQYNLLKAMANGEFRNILMVGDPNQSIFHFNGSSPDYMDKEFVKDFQATIIELTENYRSSKAILQAAQNLIPDADQVEHIVKQGIFKLYKTKDENREAQWLAQKIQQIVGLEKHDDIEGELSYEKIAVLARNKYLFKPLEEALETTGIPHYYKMTPGALKFESSLMQIFDLALRIKINSQDELHWRRLLVALSLGYEGDVDLSNVVEKIEDTNKKVIIELVLSLADDSANFKRQLESYKENVTLEDSDEKNMLFGDINELLIHWHNYAKTTDNTSLHQFKNAMALGQTAPLSQHSGVTLSTVHTMKGQEFDIVFIIGMDDETFPDYRAVRSGGIELTQEKNNLYVAFTRSKRWLFVTWPENRTMPWGDTKRREISRFLKNFPPTEVQEESIGFCREN

SEQ ID NO: 69220 - protein, 674 aa, Propionispora sp. Iso2/2
MQITKLKVSNFRSLGEEETIIPLKDMSILIGNNSTGKTTAMQALIKLFGVYAKDRELVRADFHVPPGVEPEDITEAELYIEAVIEFAELQNTDGSGTGCIPQLFHQMVVNGQGQAPYVRIRLSATWQRGNTPDGDIDSKLEFITVAEGETITDDNRIPVKPHQRSLIQAFYVPAMRDPRAQLKHDSGTILYRFFKAVKWTSDLAETLKAKSEEVNGLFTSQPGVKTVENLIKAQWKEFHDDIKYSEARLGFSATELEKVLKRVEVYFQPTPEEKSYTIDQLGDGLRSLFYIALVSALLKLEADYTSMTAESGIEIDCNSIPVLTIMALEEPENHLAPHLLGRVIGLLKSVSSQPNAQVIISSHTPAVLKRVEPENILYFRMLNPQMRTCVKTITLPPATSEAFKYIKEAVKAYPELYFAKLVILGEGDSEELILAKTLEAMNTPIDRSFISIVPLGGRHVNHFWRLLSQLDIPYVTILDLDRERDGGGWGRIKYAIKQLNEVGVPITELTNIEFEDGSTIAFTNEQLEGMHLWPLDPERLELMDKFVKWLRKYGIFFSTPLDIDFMMLSSFPTIYQSATEGTGPRIPNRTEPAFLEKLNTAIKATLKNEKCTGYTYSEEEKELFIWYNYLFLGRGKPVTHLLALKEIEDGALVGNLPEPITALMNTVVNRLGRR

SEQ ID NO: 69221 - protein, 634 aa, Propionispora sp. Iso2/2
MLTPIRPENWVPSDNIILEPNAEAAVRSNVNTVVVAGPGAGKTELLAQRACLLLQTNSCKSPKRILAISFKKDAATNLAERVEKRCGKLLAQRFDSYTFDAFAKSLLDKFLNALPADYKPSRNYEIIFPTRDQMQEAIQELVLPPAWSGHNIYEIHAQRVLNNLCVRKLPLNNDTTLEQWAIREIWQKWLHSSNSSQLTFPMISRLAEYLLTQNPLLVKALQMTYSHIFLDEFQDTTYLQYDLLKTAFHNSQAIFTAVGDTKQRIMGWAGALPNIFSTYCNDFQAQRLDLIKNHRSAPVLVNIQAALFQHLDPEAVPAVAAEGWKANEGICEIYLFDSHIQEAEVLARQIHEWITLEYIDPRKIVILAKQQVDVYAREVINQLSLVGQKARVESDMQDLLAEPLIQIILQFLRLATMERMPTDWQAVVDLLLELRGCQHEEKSGKNIEIERQLASFLQTLRNELGNVTMETCSSTVIRYIVNLIVSFVGESSIKSQFPQYKRDRWYDSLLNKASTILSDDYQVSCEWSQTLDNFIGKNTIPIMTIHKSKGLEYDIVIFIGLEDDAFWSFRNQPHEDTCAFFVALSRAKKRVYFTFCERRQTRRGNNRQARQSIGSLYGLLTGAGVAVIDNRKCN

SEQ ID NO: 69222 - protein, 702 aa, Mesorhizobium plurifarium
MRIKKVAIKNFRLLSDVSLVLQPSETLIVGRNNSGKTSLSEVMRRLLDDGPVTFQLEDFSSASYRGFCAAVHAHLAGQQEDGVRALLPAIELRLYCTYDPDVPELGPLAPFVVDLDPGVSDALIVLRYELKDGGLGALFDGLADGSLDDASRKAFLVGLRERIPANFGLRIRAEDPNDPTNYRQLQPAALRSLVRTGFINAQRGLDDVTSRETDVLAKILEGLFVTASSPTADAADKVIAEALATVVQGLQTQIDGNFGNQLQNLMPTLTSFGYPGLGGQELQTETTLDIRKLLSNFTRVRYAGYGGVTLPESYNGLGVRNLIFILLRIVEFHKAFKAEPKTPGVHLVFIEEPEAHLHPQMQEVFIKQLGKIATQLAGLGAGAVPWPVQFVVSTHSSHIANAAGFESIRYFLGADVPGADAGIRQTKIKDLREGPGSTPAPDKQFLHQYLTLTRCDLFFADKAILVEGLSERVMLPVIIGKAEGAEPAIKLSSQYLTIMEVGGAYAHLFFGLLDFLELHYLIITDLDSVEAPGGAACPVHLGTASSNACLKTWFDDNPHSLAGVMAKSDDDKTNGRGRIAYQVPEVDGGPCGRTFEDAFILANQAFFGLAAGTPQEQEVAARDMAAGQKKSEFALKYAIENTGWVAPKYLTDGIRWLAVDYVPPVDPALAIVAAAAAAPAPAPAAPAPAAVPAPAPEGGGLE

SEQ ID NO: 69223 - protein, 577 aa, Mesorhizobium plurifarium
MSNHESPAEEASRIALEEVFACIQAGRSFRLEAGAGAGKTYSLVEALKYLIKRHERDFMRRGQQIACITFTNVAKDEIEARTDKHPIIYCNTNHSFCWLLIGGFQKQLKALVQQMPAWQDKLQEAGGIGDRGVEYSLGHRAVRERVLSLHHDDVIPLTISLMENPKFRKIMADRFPIVLIDEYQDTDKAWVEALKLRFLGQPNSPLFGFFGDHWQKIYGNGCGELNDAAVTPIGKKANFRSVNAIVGCLNRMRPALPQFVKDPAAPGRVRIFHTNGWVGQRQAGQHWGGDLPSEVAHQALEATKAKMIADGWDLSPKQTKILMLTHRVLASEQGYSNLADAFRYNDSYLKKEDRLIAFLIDVLEPAADAYSAKRYGAMFEAMGGTVPLLRRQADKAAWAASFDRLLELREGGSIGDVVDHLMAEQRPRLPDRVEDLQNALAAFNPEAGIDKPRPLAELEKLRVVSYLEVKALRKYLEGYSPFETKHGVKGAEFENVLVILGRGWNQYNFGEMLELAGGAVIPANKQAAFERNRNLFYVVCSRPKRRLTLLFTQELSNAALSRLQAWFGVDSIEALVF

SEQ ID NO: 69224 - protein, 765 aa, Achromobacter sp. ATCC31444
MSAPAQKSSATPTVSLACVELSQFRRLTRALVKIDKKTTVLVGANNSGKTSTLIAIRNFLAPGQVFGAFDISLDQWPALRALGEEWEKLTEDPASAAGEVAKWEGQLAALWACMPTLDLWFDAQIGSYNLVAPFITSLNWTGGAVGVRLRLEPASSVEGLQRLAWRYREARQPVKGLNKEAHAWPVDLVDYWLRHAADLGNVLVYKLDPAKGPLANPSAGAPQPLSSQAAPIDRAKLSKLLRVDFVAAQRGLGTEEAEARSTSGTHRVGLFSNQLLKYARQHLGVATTGQGHHPELIGAMAKAQLELDARIKAALTPSIEDVKKLGYPTLHDPQEIHFRTRIQAGDLLDHSTAVQYRLDGQHADVYLPEYSIGLGYQNLQSLSYQLVSFRDARLKPPEGSPAAVHLVLVEEPEAHLHVQVQRIFPRRASELISPTAPEHAHLSSQLIISTHASHLAHAENFDRLRYVRRIPVAVGTMPCSDVIDLATAFGSDKETKTFAERYFRVQHTDLLFADAAIFVEGAAERMLVPLFIERDFHELDKRYISFLDLGGRHAHRLRPLVERLGIPTVVITDVDPVELTQDEEGKFVRKAAAIVDPKVLECGNDTLNGWHPKKKELHLLAEPADADQVWANGSGGRVRFAWQVPVQKGGPWPSSFEDSLILTNIDWFKGIDPKKGKKEVEGEVAPPKLVGPLRVVVEIVVAQPDAEELNRALHAMLRKKFAKAEFAATMFERISLGDKVTCPAYITDSLAWLEKELASSKKGNI

SEQ ID NO: 69225 - protein, 660 aa, Achromobacter sp. ATCC31444
MAGLKVDPNERDAGVADEIVGYATSAPPRSFFLFAGAGSGKTRTLVAVLRKLTGIEQRASQDQLQLGFDDPAVRFARELRARAQTIRVITYTKNAALVITGRLGNNDLTQVATIHSFCWDLIAGFDDDIREALLALNVLALEKASVAAAGRKKGATEKDKVTIAELEAKAIALTATLQFTYSPDRKRYGDGALNHSQVLAVASWLLKQKPTLRSILRDQHPVILIDESQDTMKSILDSLLEVVAEDPSRLMLGLLGDHRQRIYLDGHADLPNTVPPTWATPKLEMNHRSQRRIVDLINKIWDSDLGGRTQAKKAVHQHPRDEKSAGIVRIFIGNTTSTPDDKLRREGLCELAMQAVTGVSEWQPGSLGHKILALEHALVARRGGFLEAFEALSLLDPDSVRPDANSEASGPTAVQMLLREMTDLADCVDDGGASDFAVTEVLHRYGRLQQLPEDGDARLRQVKAYQRAVDEFAKVCVNPTATVREVLAPILRGGLFEPDKRLVAAFNDTNPPPSTPKSRQPETTENRLARGWHGLFASPWSQLRRFKMYLSGNSHLATHQVVKGSEFDHVMVVMDDEDAAGSLFAYDRLFGAPLGDSDVKNADEGKETSIDRTLRLIYVTCSRAKESLALVLWASDAAQALAYAEKSNWFKPGEVQAIPD

SEQ ID NO: 69226 - protein, 712 aa, Achromobacter sp. ATCC31444
MHISKLTLVNYRNFKNTSLTFQRGVNTIIGENGAGKSNILRAIRLLLDDNMVRAAYRLEESDFSRALDQWKGHWIIISIEFENLSPDEAVQALFLHGTAGIHAGPISKATYNLIFRPKKEIRLKLAALDDFDYAELKAIRDGITIDDYETIFTGRSSADFSDPATYQRIVGDFNFCSFSDETEFPEIGAKVPGFLSVTKEVSLTFIQALRDVVAEFHNNRTNPLLTLLKSKSGEIDAAALVPIVDKVRDLNGAIEGLEDVQAVRKNIRETIKDTAGETYSPTSLSIRSDLPDEAEQLFQSLRLFVGESEDGYEGTINELSLGGANLIYLTLKLLEFKYQREKMAIANFLLIEEPEAHIHTHIQKTLFDRIAYDDAQVIYTTHSTHISEVSNVRNVNILGRRGAFCEAYQPATGLDAAQVSSIQRYLDAVRSNLLFAKSVILVEGDAEEILIPALVKQVLGLSVDELGLSVINIRSTGFKNVAVLFHDIRIRKRCAIVTDMDTIFFDTTPNPADDDAFAARKRKAIGSQTAGAHRKVDLDAFGAGNVWVRSFYATHTFEVDFVAAGNHEAIVRCVDKVYKAPATIAQATTELRSGLLHRSGTRTLTMAEQEGKGWFAVLLAQILDYQVVVPPYIREAVLFAHGTFSRPLIIRILHHRMTCLWRIDVASHARLNAFASDLEQFRDQKIDLPTLRAAAATALPGDVVHAFLSEMN

SEQ ID NO: 69227 - protein, 593 aa, Achromobacter sp. ATCC31444
MFAWDATELNPEQAAAVEEPSSVFLVACPGSGKTRTLTYKIAYELSRRTDKRMVAAITYTHRAADEIQERIEALGVETTALWIGTIHSFCLEWIIKPYGIYVPELARGYTVLDRHDREKMLERLCAPYRGVTLWDCDYYFEGDEYRLGCADTWKHDTIHQVLAAYFRELAGTRRIDFELILWYSQVLIRNQPHIAALLSQVFSYVLVDEYQDTKRIQYNLLGAILRAGGGSTKTFIVGDPNQAIYGSLGGYAISAADFRALTDIPIREMALRLNYRSSDRIIRYFSNFNVHATDIEGAGEMVGFPSQVSYNRLVAQEDLNDELVRLIQKSLAEGHAPEEICVLAPWWILLASTTRKLVALLPEQQFDGPGLVPFSNDPDNFWFKLSKIVLTESLPQMLVRRMRWARDVIADLRDLGVDTSKITQRVLLRESNSLNITETDGLAYLDQAFAALLDRLGIHLNSFPGLLEHREAFFASSQARLEKLQNAGAAYITDLSFFKKVFRERSGITVSTIHGVKGAEFDVVIAFGLLQGMVPHFSDVDGDIAASKLLYVLASRARRNLHLISEASRSRGRRGDYGPTEALLRCGFDYNGY

SEQ ID NO: 69228 - protein, 804 aa, Achromobacter sp. 2789STDY5608632
MKLQAYRLQNYRRLRDVVIELDNEISIFVGANNSGKTSAVQGLYSMLRGDARKFELFDFNAALWAEIDAVGRSAPADEEAAKRLPSILLDLWFRVGEDDLATAISLLPSTEWEGKCVGIRVSFEPRDASELVQRFHDLHKKANDVANALAAQRKAGNETAAEVDGGNNVEVKADASEYRPWPDSLTKYLTKELSKEYTFRYYVLDERAFVDYRATAGYEPQPLGKEPGGANILKSLVRVDFLRAQRHLDDPDAASSDRAESLSRRLSRFYHRNLEKRGDDHAALKALDTSEKELNFHLEEVFSDTLKRLGKLGYPGVNNPEIVIRAALDPTTVLGQDAKVHYVIPGAATAQLPDSYNGLGFKNLVYMVVELLDLHEQWKAEEDKRAPLHLIFIEEPEAHLHAQIQQVFIRNVLRLLEDANDHATFFHTQLVITTHSPHILYERGFSPIRYFRRVSDQLDHYTDVRNLSRFKMDEAEASAREFLQRYLKLTHCDLFFSDAVILVEGNVERLLLPAMIESAAKRLRSSALTILEVGGAFAHRFQDLITFIELTTLIITDLDSVTVKLDDEKAAAQAASAGPPLNDADEDDDLKSFELEEDDATHPSGKKKSKKRGSTCHAHLEGAVTSNQTLISWIPKKRSVAELWEVTPEQKTLWLAEGSSAAVRVAYQTKVPVTVGSATAQLCGRTLEEAFGLENAEWCQAEANRAIGLKLKRAPSNPQELAEKLHDRVVGKNFDKTRFALEVLASGPVSGWRVPAYIAEGLAWLEAKAAHEVEAEAAIANELAMIEPAATAAVAVIGGAEQTS

SEQ ID NO: 69229 - protein, 647 aa, Achromobacter sp. 2789STDY5608632
MSRRVDSPDTDADREIYACITATPPQPFVVRAGAGSGKTTSLIKALDWVMSAHGASMRARKQKVACITYTDLAANEILADVSGDPLVHVSTIHSFYWSITRTFQADIKLWLKDDIRRRVSQLEEEFKSYSQRVRQSTRDRNKADQERYARNLEALDDVRTFNYGVGSDYAKGILGHEDILQLADFLLQNRPLFRRVVALNYPFVFIDESQDTFPGVVKSFKEVESQMRGKFCLGFFGDPMQSIFMRGAGDISREDHWRFITKPENFRCAKQILDVANAVRAQGDGMEQVRGLHERVDGEFKLVEGSARMFVLPNTLNRTEALARVRAWSAAANNDEGWITPDLAVKILVIVHRMAANRLGFGGIYSALNDKTSEAMKQGMQDGTGWPVRPFLSFALPIVAAMNDGDEFAAMNLLREFSPRLAPANLNGRRAANVLRELHVAVMRLVAMLDEPGTTVGDIAIHLRDSGLFEFDERYERVLGFARDVGEVVQEAEVATAAPAEGRSSDAAMLKFFQCDAQELQPYARYVSQGSPYATQHGVKGAQFDRVVVVMDEEESDYRTYNYERVFASAAARAADRARAQEGDENTWSRTLRLLYVCSTRAKRGLVLTFFVADPATTVDNVVASGILPQSAVLTQEALATSLPART

SEQ ID NO: 69230 - protein, 804 aa, Achromobacter sp. 2789STDY5663447; identical to SEQ ID NO: 69228

SEQ ID NO: 69231 - protein, 647 aa, Achromobacter sp. 2789STDY5663447; identical to SEQ ID NO: 69229

SEQ ID NO: 69232 - protein, 581 aa, Achromobacter sp. 2789STDY5608609
MYLAQLRISNFRKLQKVDLSFQPGLNVLVGSNNVGKTAVVDALRALLAGHDEPYPRLDSEDMHRPKGGAPAGDIEFQYVFRDLDPDDEADFLAALKPDALGKLEAHITIRYSEADKTGRLRAKRWCGDHEDMGLTADMMENLRGVYLPPLRDASQGLKPSRTSQLARLFQLLADDAGRDGINDALKKLDEELKKHEPVVNTHTAIKNRHGTMLGPQLAQILDLGLSGSDFQRLASRLSLVVDTFEIEQNGLGFNNLIFMAVVLSELAKNPEASYRGLIIEEPEAHLHPQLQAVLLDYLGTIKAVEGEKPVQLFVTSHSPNFASIADLDSLACLVDTGSSVETFFPRTIAFGKGKREKLERYLDVTRAELFFARRVIFVEGAAELMLVSVLAEKCGHRLREHGVSLISVEGLNFDSFLPLFGEKALKIPVAVITDADPVGEPDGDGEPQAAYPAPGTAVKVSDNTAKMKEGEDTFVKVFHGLKTFEYDLALHADNRVAMLAALKELHPKIGETVAVAVEAAEGDAAKARALFSGMFERPQNNVQKGRFGQALAQVIADGAACVVPDYIREAITHACQVKEPE

SEQ ID NO: 69233 - protein, 579 aa, Achromobacter sp. 2789STDY5608609
MTQPSDEQLQVIGAPIAPMSVIACAGSGKTFTAVRRLAQMRRQLGDDRGRVALLSFSNVAVDTFRREYQNMVQEVPSRVAHGRVEIDTLDTFITGNVLRPHAYRTMGAQQAAFLVMGGEAFLGGFRFQTNTYPREITQMQVGIDNNGAYFCYADNDRTLRLDTMQATRLVHRLGQVGAYTHNLGRYWCYRTLVEQPGILRALVRRYPHILIDEAQDIGTAHQAIIEQLVGAGCQVSLIGDPNQGIYEFAGANGAFLTRYGQREGVNSLHLTRNFRSVPAILDLANMLSTRADTADRLVPDTTHGAFFVPYRNAERENLIAAFQAAVLAADLKLESSAVLCRARDMANKLGGNEGAPGQGTVKALAQAAILRDRHQDYLAAFKLVASGIVGLLANPPQGLVARITQPARYPDDRMLRRLVWAFTRNRDSGLPAATLTGDTQWHPLLLERTRTLLAQIAQDHGLASTNNLGNKLAKRGLPNAPLITAADLAANDDAPRIRVDTVHQAKGESLDAVLYLANREHANALLAGVDTEVGRIGYVAVTRARNLLWLGVPANALEELRPVLLERGFQEAGAAIALA

SEQ ID NO: 69234 - protein, 594 aa, Achromobacter sp. 2789STDY5663443; identical to SEQ ID NO: 62698

SEQ ID NO: 69235 - protein, 604 aa, Achromobacter sp. 2789STDY5663443; identical to SEQ ID NO: 64631

SEQ ID NO: 69236 - protein, 585 aa, Streptococcus pneumoniae; identical to SEQ ID NO: 66870

SEQ ID NO: 69237 - protein, 512 aa, Streptococcus pneumoniae; identical to SEQ ID NO: 62977

SEQ ID NO: 69238 - protein, 585 aa, Streptococcus pneumoniae; identical to SEQ ID NO: 62976

SEQ ID NO: 69239 - protein, 512 aa, Streptococcus pneumoniae; identical to SEQ ID NO: 62977

SEQ ID NO: 69240 - protein, 585 aa, Streptococcus pneumoniae; identical to SEQ ID NO: 62976

SEQ ID NO: 69241 - protein, 512 aa, Streptococcus pneumoniae; identical to SEQ ID NO: 62977

SEQ ID NO: 69242 - protein, 585 aa, Streptococcus pneumoniae; identical to SEQ ID NO: 62976

SEQ ID NO: 69243 - protein, 512 aa, Streptococcus pneumoniae; identical to SEQ ID NO: 62977

SEQ ID NO: 69244 - protein, 585 aa, Streptococcus pneumoniae; identical to SEQ ID NO: 62976

SEQ ID NO: 69245 - protein, 512 aa, Streptococcus pneumoniae; identical to SEQ ID NO: 62977

SEQ ID NO: 69246 - protein, 689 aa, Streptococcus pneumoniae; identical to SEQ ID NO: 62612

SEQ ID NO: 69247 - protein, 605 aa, Streptococcus pneumoniae; identical to SEQ ID NO: 62613

SEQ ID NO: 69248 - protein, 689 aa, Streptococcus pneumoniae; identical to SEQ ID NO: 62612

SEQ ID NO: 69249 - protein, 605 aa, Streptococcus pneumoniae; identical to SEQ ID NO: 62613

SEQ ID NO: 69250 - protein, 689 aa, Streptococcus pneumoniae; identical to SEQ ID NO: 62612

SEQ ID NO: 69251 - protein, 605 aa, Streptococcus pneumoniae; identical to SEQ ID NO: 62613

SEQ ID NO: 69252 - protein, 585 aa, Streptococcus pneumoniae; identical to SEQ ID NO: 62976

SEQ ID NO: 69253 - protein, 512 aa, Streptococcus pneumoniae; identical to SEQ ID NO: 62977

SEQ ID NO: 69254 - protein, 585 aa, Streptococcus pneumoniae; identical to SEQ ID NO: 66870

SEQ ID NO: 69255 - protein, 512 aa, Streptococcus pneumoniae; identical to SEQ ID NO: 62977

SEQ ID NO: 69256 - protein, 689 aa, Streptococcus pneumoniae; identical to SEQ ID NO: 62612

SEQ ID NO: 69257 - protein, 605 aa, Streptococcus pneumoniae; identical to SEQ ID NO: 62613

SEQ ID NO: 69258 - protein, 689 aa, Streptococcus pneumoniae; identical to SEQ ID NO: 62612

SEQ ID NO: 69259 - protein, 605 aa, Streptococcus pneumoniae; identical to SEQ ID NO: 62613

SEQ ID NO: 69260 - protein, 689 aa, Streptococcus pneumoniae; identical to SEQ ID NO: 62612

SEQ ID NO: 69261 - protein, 605 aa, Streptococcus pneumoniae; identical to SEQ ID NO: 62613

SEQ ID NO: 69262 - protein, 689 aa, Streptococcus pneumoniae; identical to SEQ ID NO: 62612

SEQ ID NO: 69263 - protein, 605 aa, Streptococcus pneumoniae; identical to SEQ ID NO: 62613

SEQ ID NO: 69264 - protein, 585 aa, Streptococcus pneumoniae; identical to SEQ ID NO: 62976

SEQ ID NO: 69265 - protein, 512 aa, Streptococcus pneumoniae; identical to SEQ ID NO: 62977

SEQ ID NO: 69266 - protein, 585 aa, Streptococcus pneumoniae; identical to SEQ ID NO: 62976

SEQ ID NO: 69267 - protein, 387 aa, Streptococcus pneumoniae
MQDGIFGTYDFPTSKHGKNFKCEVALDILKTIDSASEYIKYKFNTLYIDEFQDCDQSMNDLFLYLKNELGIPLFIVGDDKQSIYQWRGASPKYINNLWKNKNDFRKKRFIGNFRSLPRIVDFSLALTPEVTVDNIREEGSILYLEPNQDYPKEDIIKYLIDNGDINLQEKNYFLIGINKDIEETATHLNDILSNKVDYVRKNPFIDCTNSNFLQSMAQYYFLEDFSEYDVLNNLFPEYNDEFRKELLKKLKRLRQRPTQSLIEEIASYLDVSITNYEDKLESQILLEILSNLDNKKMFDTNLMSNNLLMTTHASKGLAADTVVIFVEYLIDWRTGLKFEDHYVAITRAKSKVIIIDNRTIYTSEINRLLSNNNGNFSFEDFIERRYI

SEQ ID NO: 69268 - protein, 585 aa, Streptococcus pneumoniae; identical to SEQ ID NO: 62976

SEQ ID NO: 69269 - protein, 512 aa, Streptococcus pneumoniae; identical to SEQ ID NO: 62977

SEQ ID NO: 69270 - protein, 689 aa, Streptococcus pneumoniae; identical to SEQ ID NO: 62612

SEQ ID NO: 69271 - protein, 605 aa, Streptococcus pneumoniae; identical to SEQ ID NO: 62613

SEQ ID NO: 69272 - protein, 585 aa, Streptococcus pneumoniae; identical to SEQ ID NO: 62976

SEQ ID NO: 69273 - protein, 512 aa, Streptococcus pneumoniae; identical to SEQ ID NO: 62977

SEQ ID NO: 69274 - protein, 695 aa, Streptococcus phocae
MKLTKIIINNFRSFGESQVIRFNDQTVLIGNNSSGKTTLLQALSKLFSDKQSDRIIRKHDFHLPKGSSPGENTRTLFIETIFEFDELDGTVGGPAIPLFFEHFTVSQDDTKPFLRIRLESSWEDDGTVEGSVDTQIYYISSDEDIIRDEDKHRAPRKDLDKIRVLYVPASRTPEKELSNASGSMLSKLVNSINWTENEINKITDKIDELNNTFLSENGALTQINQEIQKSWERYHQDNHFSQAELTINSSEMAAALRQIGLKFSPTTTEEAFTVSDLGDGLRSIFYFSLVNSILDIELKITKNREENSNNPRFKLIPPILTILAIEEPENHIAPHHIGKLVKRFKQLSNNDNSQVILTSHSPAIVKRIDPEDLRYLRIENNGRVLQTIVSDIQLPQAIGESYKYIKGAIQAYPELYFAKLVVLGEGDSEELLLPKFFDLLGKEIDSSQISIVPLGGRHVNHFWKLLNSLRIPHITLLDFDNERYGGGWGRVKYVIQQLLEIGIERSDLVKLKGGRILKDEDIDRISSWKICDIFSQSLLSWINHLEKFNIFFSAPLDIDFLMLQHYKERYLGTLSLKEGPVVSYADSDGNNKKVKLTDLDCIDKLQLEGLKKRIEEARRATLKDKSGSGDSFTEEEKELMIWYQYFFLGRGKPTTHMQLLSSISDDELTTNLPPVFEKMVKRAEELLGDIEHDKE

SEQ ID NO: 69275 - protein, 605 aa, Streptococcus phocae
MIKSEEWFPKGDINLEDAALGAIKDVDNCLVIAGPGAGKTELLAQKLDYLFSTNKCVSPKKILALSFKTDAASNLKERVKRRYGDEYASRFTSFTYSAFEKRILDQFRDVLPEEIRPSKDYMIEEMEVIKEVLDRNGFNTTGMGMNRIKDTAESIVLSENDSTIKNDLLKGTQCNKPVLFYRQITKLATRIIDKNEYIRKALQMTYNFVFLDEFQDTTYAQYNLLKTCFLGSSCKLTAVGDNKQAIMRWAGAKPDIFPDYIRDFNSNKYQLLMNHRSVLKLVEFQKEVDQILNKNTNIFQINDYSEFQEGEITLFEFDNEISEAKSIADDIESKIQGGIRPSGICILAKQKVDDYSSKLIPILSGKGIKARNENEYQKLLKDPTCNLLLDLISCSQGKRDPLIWENISNFYGNINGIDEFTDELTLAKNYREIDNIISDVTSLILNSIPNEDSMLNLIECIIKKIGDKRIISSFSIYNGKSDLDIIVKKFSKLLYKEYSQKQDDWIDIVSNFKGENSIPIMTIHKSKGLEYGAVYFLGLEDSAFWNFNDQPEEDKSAFFVALSRAKKHLIFTYCKIRDGRKQKNKNINEMYSLLTQSSLVDVCKS

SEQ ID NO: 69276 - protein, 549 aa, Thiotrichales bacterium SG8_50
LNIDGSGVGENTDAPARNAPNELDDGEAERAQIKIEVTVTHLSNEQQRHFWDWVEWWNELEQSFYEKAGPQGVDHPDIVAALRITFVGRYNSEEDDFEGDTYFSRSLEEGGEPQSFRKRDKQRCGFLYLRGLRTGSRALSLERGSLLDIILRLKELRPQMWEDTIAELADVDVASRPELGISGVLESINTALKRYVPHEWGVQPHLRVSNLTRDHLRKVITAFIATGQRDHAAPYYRQGTGTINMLVLAMLSQIAADKQNVIFAMEEPETAIPPYAQKRIVHELRNLSSQSILTSHSPYVLEEFDLEDTVILSRNATGEVDQATIELPSSVKLKRYRQEFRTRFCEGLLGRRVLLAEGATEAHAFPVAIRKLAELVPDEFTSLEALGVTVIDAGGERNIRDLGALYRGIGKTVFALCDKQEAATKTAIESKVDELFMHGKSGFESLVLQGTTRAALERFVATINWPPHLKGRFPEPENDPEAASAAYFEWSKGTGGLADFLAQCQLDEIPEWIKDVGRRLRAGCDPGSIDDPTEAGQRDHDSLVEAGDD

SEQ ID NO: 69277 - protein, 604 aa, Thiotrichales bacterium SG8_50
MIELTQDQRAILEAEGPILVAGGPGSGKTTVSILKGVRLARQHLRAGQRVLFLSFARATVSRVIEAIDEAGNITPEESRLIEVDTYHSFFWRVLRTHGYLLGLPRQLSILTPQAEAVALSDTRNQYPGKPKLSGADKAEKRAHEDQVRSSLATEQGRVCFDLFAPMVGDILESSEKIRCLLADRFPFIILDEFQDTNSDQWRVVRAIGRNATLIALADPEQRIYDFIGADPERLDHFRSAFSPTEFDLSDANHRSPRTEIAIFGDDVLAGKFRQNSYRGIERATFPSYNNGAFTALVTTTLQGRARLARSGTPDWSLAVLVPTKKMTRLVSEAFLNPVGGLPVIAHTAFLELESAMLAAELIACLLEPQVPPDIGQVVALLCAFYRGRGGADPSRSDLKTASQIETSHQRLRACQQAGKPLPANAILTKTQAVLEAAKTLELSGDPDTDWLAVRAVLDNGQCRRLQRVAQDVRNLRMLGRGTQLRAALSEDWRENGCYQNALAITRAAFVREHFASSRRPETGVVVMNMHKAKGKQFDEVVIFEGWPRRADGEIVSNPDRIVWGNDPKRKDVSTLQNLRVSVTRAKQRTTILTPCDDPCVALPS

SEQ ID NO: 69278 - protein, 789 aa, Pseudomonas viridiflava; identical to SEQ ID NO: 63754

SEQ ID NO: 69279 - protein, 660 aa, Pseudomonas viridiflava; identical to SEQ ID NO: 63755

SEQ ID NO: 69280 - protein, 617 aa, Bellilinea caldifistulae
MYLSKVCIKNFRNLEDVTVEFGEKIVLLGENGAGKSNFIEALRILLDSNYRPSLGESDFSRGSGKKPFGGRTIEIHAWFSGLDWENEQDLLPSFHDCHGKDNGTYQISAIYRPKKDTNPQNAITEDDYEFIRYCGGNENNTEGAKRLRQYVRLVVIPAVRDMERDMQSWRTSPLRRLVEMISLTNDANFKLVAQSVQNASKKLGQIPYIQDLQKDISDFLGTLVEGQSIQPTINIAGSNPEDLLRLLNIFAESDLPLERSSLGISNILYLITWLIYAKRLRTMPVKGDQKPEYVLLAIEEPESHLHPHFQRLVFENVFKQEHLLLTSTHSPTIVSIADPRHFVVLKRTSNGTAARSTANFAQKDEKMRQDISRYLDATRGEMVFARGVLLVEGDAEMFLIPAFARKMKEAGKISHTLDGAGISVCNVYGTDFRPYVEFLSGLDIPFAVLTDGDPDTQNPGLKRGLELVQKINAPKHAEIEVRFNKKEWGAVKTGLEEVGIFVNQRTLEGELIQAGYGDELCEVYQELGASDRQVKNLEEEIANNDFKAIIDRIQTTGMGKGRFAQRLAEKVDADRVPPYIEKAIKYLLAKMPQPSTDLQLPPESVERPQNPKDEISF

SEQ ID NO: 69281 - protein, 622 aa, Bellilinea caldifistulae
MSEYLKRLGKIEQDNNQRAAFYSEGSQVVIAGPGSGKTYLLTMKMAKALLEEKVRYPQKIACITFSRQLAEKLVKELRELGVYDSERMYVGTIHAFCIAEIILPAVNLLPPGSIPEPFRIASEKERKDALSQALQKQGKSLPKKDGAIRDIESDLDKFRRRCFQPEKKDFSSNSLAKVSDYSQRALQGLDWSQLAGDYHAYLERQVHGMDFVQIEMLALHILKTKPALARTLTARYPWWFVDEFQDLSPLFHQMVMHLVEQQLISVFAIGDPNQCIYEDLQGSKPETIHELSDTVERLCQNHPITLQKNYRSSQNLIEFSNLVLDSPTPYQSNQKHLAEIHYIQIKDCPYPQSVSQILMEQGNDKHIAVLMSQRRKSQKVKSIEDLLPELERLGMDLRPDKDPDYGSNTELIEWLEKVAQWCSGDEVYFYDLLPFWNSFCQLEGESDNAKRLEIERELFHALWTLRNGEMLLKDWLEQLCQAVLTSSRLEEYRRLRPDDVEEFEKLMAAVSTKERLQNKALHSFGKQKSQILLTTFYSSKGLEFDTAIVIDLDSIRKSQSAPDLHKRLAYVALSRAKSKLYVLDSKQGNLQGDFAKILQGASVEQLEFWTCDSQGKSTRRNE

SEQ ID NO: 69282 - protein, 642 aa, Vibrio splendidus
MKLSFVRLSNFQSFGPEPTTLTLDDMTYLIGPNGSGKTAALLALSRMFGFNPSVRRIQRSDFHVPLGEEETPEERTLWIESEFIFPELVEGSDNSTVAPHFGHMRLDDPDGLPRVRYRLTATMGIDGDIEETLDYVLEVNSDGSPLSSAKVPRGERNHIHVHYLPARRDPAEHVTYGSNAILGRMLRSIQWDNERETISRLTGEISDSLVGNPSIAALSQGLTNTWNKLHKGNFFKDPKVTFVTSEIEALLRHTSISFGPGHDEGFIDFSRLSDGQKSMLYLSLVLSSQTVNKATLCGEDTAFDVEKLKPPVFTIVALEEPENSLSPYYLGRIVNALVEMTKGGDAQALIATHAPSMLRRIKPEDIRYLRLNSARNTQVKHIQMPPTTDEAHKFVRQAIQAFPEIYFSRLVVLGEGDSEEIVLPRILAAKGIPVDESAITVAPLGGRHVNHFWRLLSALEIPYLTLLDLDVARYQAGWGRIKYASEQLAKYSDTNKLSDVFSPIPKWNEPKIPIRTHHFFNNGTISVFQELESKGVFYSSPMDLDFAMLISYPEAYGVQEEEPEESTIKAVLGKSHFNSEQYTADELRLFGTYHQLFKLGSKPASHIEAFAKLSDSDLLDSMPDSLVRLADSIKTRLEAIPE

SEQ ID NO: 69283 - protein, 549 aa, Vibrio splendidus
MISIDSWRPSDGLQLEPNAQIAATEQNQSLALTAGPGAGKTEMLAQRADFLLRTGVSRYPKRILAISFKVDASKNLRERVQRRCGTELGSRFDSYTFHAFAKRIIDRFRVVLTGDDALTTGYTIGETKIPHQQILFLDLVPLAIKILQSSEIARNAIRQTYSDVFLDEFQDCTNLQYELVKVAFLGTGARLTAVGDTKQKIMGWAGALEGIFLQFSRDFGARPLNMYRNFRSQPVLLRLQNEIIRTLDPVSVMPDAQLAGHEGEMHSLSFDTCSNEAEWIADTVLQWIRDERLPTSEIAILVSKQLDLYAAPLMAAFEARGIPYRNEQQMQDITTEPLARLIVDYLQCLYGERCPDAWRSLSKLLTPFEDEDAQSSVKQSFGQFIRQQRREIVQENAEGDRYYSWWEGVRNFLTFVGLEVVTSLSPDYESKVRLNEVAAETHARINELREIEEDLLGALSRFSDDQAVRILTIHKSKGLEFDSVIMMAIENEIFFGDQGANRCAFFVGVSRAKRRLVLTHSEVRQRPDGYTGRWSERRTPQEEYLGYTR

SEQ ID NO: 69284 - protein, 665 aa, Citromicrobium sp. RCC1878
MRLENIKIRNFRLLRRLSIDLAQDKTTTILVGPNNSGKTSVMEALRLFIGQGAEAPKISFHDLSQLRHRDLKRIERKVAAEADPEKKIELLRRLTPRMRLDLTFSYGEDPADLVAATKLLMDLTPGTSRVRMRIDYRLENAKKLLDEFGARPRKDVSLCDYLKETFRDHFKRVFFKVSPDGKEVEQLEDGNLLKSLLRIDIVPAQRHVDDDEGSRSAKLSKLLHDHYERFYRVDDAAGYQAIEDALTASAGDLTGMYGKAFGRLTKRLQSFGYPPGQKAPDLRVRAELSAETIYRDNARIYYASEHAEKEGVMEEFELPEKYNGLGYKNLIYIVLQLESFRAAIDATMGDKPRVHIIAIEEPEAHLHPQMQTVFISEISKVLETDGGTTAQVLLSTHSSHMIAHSEFEPVRYFRRVGRQVVMQDLSQLPLPPHNPDLLDFLRRYVRLTHCDLFFADKAIFVEGQVERLLLPMMIEEQAKVAGCETLGSQYVSISEVGGGHAHKFKPIIDFLGIPSLIITDLDSVDDGGKKCPVATGKSTSNACLRKWIPEKETVEELQACDNAAKTQGCIRVAYQVTQDGHCGRSFEEAFIYANITWLTDNHAKLSTTKAAVKKAIDAGLTAQAWELSGKLGKVDFALDLMGAPGWEIPLYIQQGLQWLAEHPAK

SEQ ID NO: 69285 - protein, 566 aa, Citromicrobium sp. RCC1878
MAGRASRKMMTEADEKILDCLHTRQSFLIDAGAGSGKTSSLIRALDFIRGPDRSSVIGEGQRVACITFTNVAKNEIIERTEHDPLFVVSTIHDFLWASIKNFQKELRPALLAFNDRLPASSRRKQDQEELAEALKTVPTIAYSDRGANFLEGRIFHDDLLGVAHIMFHDHPLLSKVVAARFPFIFVDEYQDTDPLVVSALLDHLLKTEHPPLIGFFGDKMQNIYSGGVGELSADQQAQLVQIKKEENYRCSKAVIDVLNKVRTDIQQEPAGANLPGGAVYVSLTGTAPDADIAELAVQKAQDVFGWSVQGELKVLFLTHRLIARKAGYADLLAAFASRGSFTQDKFQSGEDPIAAFFLKKVEPFITAWREGRVGRAISSLKERPIPIAGAAEKARVKAALDDLIKLIDAGGTIEAILMHLRAAQLVTLLDDLEAAVAGPVVAAEAGSPEAAHQAFLDLLLAVPYLEVSRYRAVLENSMPFSTKHGVKGDEFQNVIVVLDDAGANWNQYSFGKLLAGTDTSESRERRTRHLFYVCCSRAKDKLIVADLGVGAQAKIEALFGASAVAM

SEQ ID NO: 69286 - protein, 665 aa, Citromicrobium sp. RCC1885; identical to SEQ ID NO: 69284

SEQ ID NO: 69287 - protein, 566 aa, Citromicrobium sp. RCC1885; identical to SEQ ID NO: 69285

SEQ ID NO: 69288 - protein, 650 aa, Pseudomonas putida
MFIERLTLTKFRSFGVETDIDLTPGLTAFIGANGSGKTAVMQALQRLFGITGDQRRIRRQDFHVPAAEDVAPLQRHFSLEAILAFPELDTEEAEAAAIPEFFQQMAADEAGRLKCRLRLDATWTDDGSIDGAIEQKYWAIRAFGEFTDEDCVELKAVDRARIQMIYVPASRDGSSQVTSFLRGRLWRAINWSQGVRDTFDEAGTTLNGAFAGEAAVDVVADAVRRRWQEVHTAGTDTTPLFRPMDLRFQEFIRKVEVVFRPDEAGRERALDDLSDGQRSLFHLAMTAATLDVENSIAGDPVAAGFQPGGVPLPALTLIAIEEPENNLAPFYLSRIVRQVEDLTGGNRAQAVVSSHSASILSRVDPSQVRHFRLDSANRTSLVRAICLPEGLEEESKFVREAVRAYPELYFARFVVLGEGASEEVVIPHLAEAMGFDIDRSFVAVVPLGGRHVNHLWRLLKDLEIPYATLLDLDWGRDGGGWGRIKSACTQLLEIGITPQALFGQHLDPNGPEVNLARFDGLPAENTAGMQEWTNWLRRFEVFFCAPLDLDYSMLCAFPAAYQVIEPGRQGPSNQGDPRIVVLGETGRRELYGLDQEASLRWYRYLFLGRGKPSTHVRVLSSQASETLAAGAPEELRALLMAINARLEPAN

SEQ ID NO: 69289 - protein, 626 aa, Pseudomonas putida
MAQIRPEDWQPRGIEDLEPAAWRALRHEGSACVVAGPGAGKTEFLAQRAAYLLETGICPAPYRVLAISFKGDAADNLAARVRKRCPPDLANRFTSLTFDSFTKGLVDRFQAAIPVPWRPTRPYDVAFPTRRQVEQSIARARQNSAAQWQATIGSFSAGTFESHKVGAYRLPIARNAPQSAEEFAIHHWWREQLERQPSSGLTFISLNRLAELLLRSNPHIRRALQHTYPFVFVDEFQDTTYAQYDFLLSAFGGADIAVTGVGDDKQRIMTWAGARLDSFDRFSEDFGAVRIPLLFNFRSSPNLVRIQQVVARALDPNAPQAEAQAQRQVDGDVAQVWNSRTRNQETTHLARWIVSDMANRGLSPRHYAILVKQRSDDFEADLAPAFAQVGLRIRNESHALGRTTLQDLLSDNFAKIAIGLLRLGASRRAPAAWQLVSSALWAIRAIAPDDELGAMRMETELSRFIATLRADMTNCPPSLANANVFANRVVEFLDLAALRRTYIEYASSDVLAIMEEAFHLHLAASSDAADWNGCLDTFEGLAQIPMMTVHKSKGLEYDTIVFVGLDDQAWWAHTPGNLEGLATFFVALSRAKQRAIFAFCQERGQRQRVAELFQLLTAAGVPEIAI

SEQ ID NO: 69290 - protein, 764 aa, Pseudomonas sp. In5
MRIQHVEISNFRKLLSVRIDFANETTLLVGANNSGKSSAMLALRRFLVSKASAFRLQDLTLCHLAKLYEIGKEWENPPANFEIPTAKDWTDWLPSLDIWVSADQGEFHFIRDLIPSFAWRGGLVGMRFLLEPDDMNTLYTDYRKERARVAELEDAIGKEDPPGSPLTLWPQSLHDYLNRRLGDKFKIRWYRLDPQQLKKPDKSTRMAQMQQLSPTTLPLESNPLSGLIRVHEINAQRGFGDHSDDNQGDNARPSGARKLSEQLRSYYSRHLDPGDSPDISDLEALRAIEAAQSAFDTRLSSSFDTAIREVEGLGYPGRNDPRIKVKSRLATTDGMNHEAAVLFELDSIQGAPGAPPLHLPETANGLGYQNLISMIFRLMGFRDEWLRKTRAASTEVIDRVEPIHLVLIEEPEAHLHVQVQQVFVRHAYQVLCRDALLERYPNLKTQLLVSTHSSHVTHEVEYQNLRYFRRLPAGMYGIGVPVSTVSNLSNVFGEETKTKEFVTRYLRAQHADIFFADAVILVEGSAERMMLPHFLRNKFPFLDRCYITTLDIGGSHAHRLRPLVDALGILTLVITDLDAGLNKAAKPVQRNANQITNNPTLRSWMKLMHLGSTVDELLELPANQKEHEIDELYSVRIAYQTPIPTHLPASGEAIQALPNTFEDSFVLSNAGHFAEKTGTTGLMKAFVKVLNESQTSEAVGEGFFNELREGKKAEFVLLVLADKNFPSLKIPEYISEGLNWLDSKLRSKQRELLVIPPEAAEVTP

SEQ ID NO: 69291 - protein, 615 aa, Pseudomonas sp. In5
MSEAAVADADTTMQACLNLTNPKSFFLYAGAGSGKTHSLVEAIRELKNRERERLTFEGRRIAVITYTNAACDEILRRLEFDSLVEVSTIHAFAWRLIQGFDNEIREWLRIKLAQDIEKIEGELARSRGDNKTSRGNRRKLQSKTRRLETLDEITKFVYSPTGDNRERQALNHDEVIKLTAAFVPERPLLDVLVDRYPVVLIDESQDTHAPVMQAFLKVQQLAQTRFCLGLMGDTMQQIYGHGVTRLDKAIPGDWLKPEKVVNRRCPRRVVDLINVIRSTADTHQQTSKPDAIEGVVRMYCISQSQEQAPNLEEGIAHSMAAITNDGEWATGPDGRKTLILEHKMAGRRMGFEKLFTPLYAVEHLQTGLLDGTLPALRVFSEGVLPILTAKDDHFLLLEAVRSRSPLLSKDAMQSTGDQSAHMQHVEDATHALLALFESNDPTLIEVATLLLQTQLLDVPDNLVGAMVLGAPGEAPDPEDTNAMTNYAYQQFLERPFSELAAFASYADGLSPYGTHQGVKGLEFPRVMVVINDEEAGGFLFSYDKLLGVKEPTKTDRDNERDGKDNALARTRRLLYVTCSRAEKSLAIVVYTPQPTLAKRNVVAAGWLQESEVEIL

SEQ ID NO: 69292 - protein, 592 aa, Pseudomonas sp. In5
MRLANLSIRNFRNFEMVNIPLAGNVVLLGENRVGKSNLLFAIRLVFDPTLSDSARQLKLSDFWDGCDLTQNPQIEVHLDFADFESDDGLLALLTDFRTAGNPKVARLSYVFRKKPEVGGAPQSGEDCEFITYGGGDESRPISSRVRRRIALDMLDALRDAEGQLASWRYSPLRPLLEDAVASVSRSDLEGVAADLEAANKKMEDFPSVKLLEESLRSGILNLAGSTHDIGARLRFGPTDPLRLFRSIAMYIDEGKRGIAEASLGSANVALIALKLAEFAWRRAKNERNYSLLCIEEPEAHLHPQLQRTVFDKLFQNTDPAQALIVTSHSPTLAAVTPLRSIVTLRSVRGASRAYSLAALPVNTDEIDDIERYLTASRSELLFARGVIFVEGDAEEALLPGFADALGKNLDRLGITICNVAGTNFAPYVKLAGSLGLPFAVVTDWDPLDGTKPPLGKARTLGIWDAFCAVSGTTPLTPENRATWEATDFTEFSKGWEPAGIFLNNQTFEVAVANTPSLIGALLDILAEQGFGSVRTARITAWRAGTPVDPDQLLAMISDIGKGRLSGKLARRLPGLTPPAYIASAIQFVASRV

SEQ ID NO: 69293 - protein, 593 aa, Pseudomonas sp. In5
MSNHLALIRALADLQGNPEQYNAACEHGHCVVLAGPGSGKTKTLTTAMARTLIEDVIDPRGVACITYNNECAIELEMRLAKLGIKSSDRSFIGTVHSFALTQVIGPYARCIVGLLPDDFRVATRSESRDAIEIAYEKVFNDAGNPHDRWRFAEEKRRRDVDRNLPSWRGSNHELADFIEAYEDELRHSGLIDFDDMPLIAFRMIKDHPWIRNALRARFPVLFVDEYQDLGQALHELVLLLCFEGGLRLFAVGDADQSIYGFTGANPELLQRLTKRDDVRTIRLRFNYRSGGKIIRASLGALGEERDYRGVEGASEGELTFWPVEGGHELQAQHIAKTVLPALLSRGLRSEQIAILYRAAWLGDKVVDSLERSNITYIRTDSNALVKRSSRLARFIEACAGWVTGGWQVADPPYERLVGQAIGLVYGGRVTEFEEQALSQQLMAFLRGSIDSSETTHVWLQRFQQELITPWQSISRNAHQEWEVCLEMIKRTDPRDNNDMLLTILSGRIDGTGRVTLSTLHSAKGREFDAVILFGINSDDIPNWRDKKSPLALREARRLFYVGVTRPRKELCLVYQKNHHSPWIAELYQRSQQP

SEQ ID NO: 69294 - protein, 711 aa, Sphingopyxis macrogoltabida
MHISRLQLVNYRNFERANVVFNKGVNTIIGENGSGKTNLFRAIRLLLDDTLLRSAYRLDEKDFHRGLGDWRGHWVIISLEFEDVSQDEAIQSLFLHGTGNIADGTIGRATYNLIFRPKVAIRRSFGDLPVGDTSGLAAVRSKITLDDYETIFTGKSVADFRDPATYKELVGDFDAVEFPQELSNPAIGGVIPGMLSISREVCFTFVQALRDVVADFQNNRTNPLLTLLKGRSGEIDAASFQPISALVKGLNDAIEGLPDVGTIRADIRETITDAAGGTYSPRSLSIRSDLSDEADRLFQSLKLFVGESDEQYEGAIHELSLGGANLIYLTLKLLEFKYQKQKESFANFLVIEEPEAHIHTHIQKTLFDRLNYDDTQVIYSTHSTHISEVSNVENINILGRQGGRCDVFQPSAGLDSGQIGNIQRYLDAVRSNLLFAKSVVLVEGDAEEILIPILVKRVLGLSLDELGISLINIRSTGFENVAVLFHDDRIRKRCAIITDLDRAFIDTDDDILDSEEDAAAKKKALGSQVAGLRREAALKLLCDGNPWLTAHFADNTFEVDFVAAGNAGTVVSVLSDIYKDAGTIAVSKEELESGDIERFGTRVLTMARYAGKGWFAIILGRMITPETVIPDYILDAIFQAHLPVTTQTWANVLEYRVGVLAQSDIHAPEAITAMREQIRRYSRGEIDFAGVRSEMLTAFPADGINVILASF

SEQ ID NO: 69295 - protein, 599 aa, Sphingopyxis macrogoltabida
MFVLDKTDLNDAQVAAIEQPGSVFLVACPGSGKTRTLTFKIARLLSELKSDKKRIVAITYTHRAADEIHERIEQLGVDTSQLWIGTIHSFCLEWILKPYGIYYPALANGFQVINGHDTEQMLDDICGKVQGTNLNRYDCAYYFTPSGYRLTSTATDKHPVIKGVLKTYWGTLRDERKIDFELILFCAYQLIKKNPSISVLLGSIFECVLVDEFQDTREIQYAILASILKASQGRVRAFVVGDPNQAIYSSLGGYAITAADFGARCGIQFKEMELVDNYRSSSRIVGYFGNYNVFASKIEAVGHNKNYASVVSFDQQTHRDDLEAELVRLIKYNVETQGIAAHEVCIVAPRWVHLASMTRRLVAALPGYSFDGPGMVPFARDVDNFWYKLARIILTEASPQLYVRRMRWAGDVIAGLHDAGVDTAGLDRRRLLRTCNAIEIGETDGLAFLRAFFDQLCAALGIDHGAYSLLKEHHDAFFGCSQRRVDLLVKEGSPAIAEVAMFKKVFADRTGITISTIHGVKGAEFDAVIAYGLLEGMVPHFSDPAQIETAKKLVYVVSSRARKNLHLISERGRSRGWSGDYQPTDVIVGCAFQYNQPPF

SEQ ID NO: 69296 - protein, 779 aa, Azospirillum brasilense
MQSFAETLVDAASATPLNEAVTPLAVPAVLSPIRLACAEVGNFRRLAQTRLDFDDCTTVLVGANNSGKTSLLIALRNFLSESPGFRAFDIGLAQWSTLRQLGEVWEAIDEDPTTDTKDADAWEHQHQQLLACMPFVDLWFDAKEGAYHYVAPFINTLKWSGGAVGLRLRLEPVSDSSDLRKLAWRYREARVPVRNLAKKGHAWPTDLLDYWLRHPADLRRIQAYRLDPAKGPLQSPEASAPQPLPPSSQPVELALLRQLIRVDFVPAQRGLGAEDDEARSEPAGARPGLFSNQLVKFARQHLNVNASAHGHSEALVEAIANAQASLDERIFEALQPSMQDVRILGYPGLHDPQGIHFRTRIKTADLLAHSTAIQYCNDETALNELLPEHSIGLGYQNLQSLSFMLVSFRTARLNPTQGTPAAVHLVMVEEPEAHLHVQVQRCFSTNAHALLCPKGAEQSHLHTQLLISTHSSHLAHGNKFTRLRYVKRTLASAAGAKPSTRVINLATVFGSDEQTRTFAERYFEVQHTDLLFADAAVFVEGAAERMLVPQFIARDFQALDRKYLSFLDIGGSHAHRLRPLVECLGIPTVVITDVDPVVPQKVRGRTVKVAVCIAGQSDLECGNDTLTVWHPKLTNFQEYGTPKAEDLEWTSPNGGKVRFAWQVPIPSAGGQWPSSFEDALVLSNIDWFKQLDEEKDPVSGKKVKHSGTLGKVIGLAVDYPNPTELAQQLHDMMHRGFSKGDFAATLFERFNKGSFACPSYIAEALDWLSKQLHGAGASA

SEQ ID NO: 69297 - protein, 652 aa, Azospirillum brasilense
MNAAVDQVGNERDAHVVEEICGYVTGIPPRSFFLFAGAGSGKTRTLVEVLRRITGVVEHAAGGIYASKLRVRGQSVRVITYTKNAAKVVTSRLGENRLTEVSTIHSFCWDLVKGFDEDIREALIAKNMEELAKAKAHAQSKKRGESDTDRRKYAELEAKAEELRAIPTFRYHPDQNTYGEGALSHQEVLRVAAWLLCERPTLQRIVQDRHPLLLIDESQDTMRGVLDALFDLTTIRPGHFTLGLLGDHRQRIYPDGHVDLPSHIPPTWARPALQMNHRSRERIVRLINAIWEADIEGRTQSKIGVAQHPRSEKQGGKVRIFVGDTANTTSVKLSFEADCARSMAQITGAEAWSANQKSFKTLALEHKLGAKRGDFYNIYCGMALLDKEAATPDPNGERMGPAMVRPLLGGLLELAECVRPDGTLDEFAAVAVLRRHNALTKLPSEHAARAVRLAELYEAISRFAVLCHRTEGAQVKQVLAPILEANVLPADSRLVGAYWDERPPPPEPEREASESKEDRQRRGWHLLMNAPWAELARYRTYLGGEAPFATHQVVKGSEFKHVMVVMDDEEAGGNLFSYDKLFGAEILSKDDKDNIAAGKETTIDRTLRLLYVTCSRAEESLALVLWAKDTNSALTAINACGWFTADEVVVLP

SEQ ID NO: 69298 - protein, 420 aa, Citrobacter freundii
DLERFIRKEKRQLLKIAQQSLNSDEREEDDDLLGEISSDLQLINDKISQLIYIERATKEVNDELKKLAHHYSEYSVQLDTGAIGINDFIDSLQLGANTNGSNVMLGGDGRNNQILLALWKAKSIKEHDIDNEVIFYVIEEPEAHLHPHQQRKLADYLIDELPGQTIISSHSPQIAANFEPGSIIRLLDRGGHTVAASEGCSKGISDGWEDMSYRMSILPAESFFSNGVFLIEGPSEILFYHSLAKSLNIDLDYLNISLISVDGISFKIYVAILDALEIPWVMRTDNDISKLKDKEKWNYAGINRCLDIAGIEKFEHSDKKITSLDTLTNGDWQAVSEEINESGIYLSKVDLETDLVEELGASILDALDKKNNQSAIEYLQKKKAIRMRILLKKIKKDLHKLNAGDLVKPLKHLVKIVKGE

SEQ ID NO: 69299 - protein, 361 aa, Citrobacter freundii
MNAFSPITQQKLAIDYPKSMVITACPGSGKTTVIKEKIRNITGCLPEHKGVIAITFTRKASSELERRCKAEGHNTKNSFFGTIDSFCLKEIIIPFLPRIWGGKPTECKVLKKLESPYKYYLEEEFFGTPSVVNINEDSGYKRLYDEGILWMSSFVALALKILNESPAAKRYIKARYSHIFIDEYQDSSLSQHQLFLKMNELGLCSIAVGDVWQSIYEFRGGNAELLLDLVRDKHAFAHFEINLNHRCHPSIINYASRLLDSNFSLLPCKSINVYRKRLSGNLKDVSMTLSSWISEWLNEGQWSVEQANQIAIFTRKEQSLLLLCSGLTSNFRAYIDTPLDKLGTECSDLYKDLLAYRYKSI

SEQ ID NO: 69300 - protein, 594 aa, Serratia marcescens subsp. marcescens
MYLSKLGIRNFRNFEAADIPLAGNVVLLGENRVGKSNLLFAIRLVIDPTLPDSARQLKLSDFWDGCDLESNPQIEVHLEFADFDSDPSLSALLTDFRIAEDPTVARLSYIFRKKEEVDGAPRSGEDCEFIVFGGGQESRAIPGRVRRRISIDMLDALRDAEAQLASWRNSPLRPLLEDAFSSLSRADLDRVATELQAATETMEKFPSIKDLEDSLRGGILDLAGTAHDLDARLRFAPADPLRLMRSISMFIDDGKRGIIEASLGSANVALISLKLAEFAWRREKNERNFSLLCIEEPEAHLHPQLQRAVFDKLFNNADKDQSLIVTSHSPTLATIAPLRSVVRICRDPEGRSRAFSLADLPVTSEELDDIERYLTATRSELLFANGVIFVEGDAEEVLLPGFAQAMGINLDQLGITVCNVAGVNFEPYVKLAASLGLPFSVVTDWDPLDGTKQPMGKTRSIGIWQAYSDVSEKLGKLTPENINWFNNSSYEVCKPVFERIGIFLNDQTFEVAVANTTGLKEALLDILDEQGFGVLRSSRIASWRAGIAPDPTQLLAMISDIGKGRLAAKLKQKAPGLAPPEYIASAIQYVVSNV

SEQ ID NO: 69301 - protein, 597 aa, Serratia marcescens subsp. marcescens
MWCRMSDRRALSEALNELLPNREQYAAATYPGHCVVIAGPGSGKTKTLTTAMARALIEEVADPRGVACITYNNECASELEGRLACFKVIGDERNFIGTVHSFALNQVLIPYSRCIPGLLPDDFRVATRDESRAAVEVAYQARFGSVGDPHARWKFAEEKRRRDVNRLLPAWRNNNPELADFIEGYEAELRRLGLIDFDDMPLIAFRIISEHEWVRNAIRSRYPVLFVDEYQDLGHALHELVLLLCFNGGIRLFAVGDADQSIYGFNGANPGLLDSLVSRADVRPFRLRFNYRSGAKIIRASLGALGEDRDYVGPDGNPEGELGFHGINGDYDAQAHFIAHDLIPSLFERGFHPERIGVLYRAAWLGDKVADEFKARNIAIIRADSNALIKRNSRLARFIEACSQWVTGGWKEASPLFNLLLGQALFLVYGRRASRAEEQLLTVQLITFLRNGIDKAESAHEWLRRLNDELITGWMAVSQNTQQEWDVISELLKRTDPFRGLDVALDIFAGKVEGTGRITLSTLHSAKGREFDVAIMFGVNKYDFPSKRDLTSDNALREARRLFYVGVTRPRKELHMVYEKGKHSPWIAELYHRSQQT

SEQ ID NO: 69302 - protein, 771 aa, Enterobacter cloacae subsp. cloacae
MHLRKLAVRNFRRLHDVVIDLASDISIFVGANNSGKTSVGHALQLFTGKSRFNIHDFNAECWTDIVTFGEGADAASLPSLELDIWFEVTPNDVHRVVDLLPSLSWSGSLVGMRVAFSPINPEEIRSRFLAVRQLAIDATPKDENGTLKYDPSPRNLWEYLRDRLNDEYELRYFVLDPARFNAEMISEEGYEPTPLTGRDRSGREILNSLIQINFLNAQRHLSDGSGGSRSEDLSRVLSRFYGRNLEQKGEDYEALIALAASESAFNQHLERVFAPTLKSLAKLGYPGLSNPRMMIRSALDPAQIMNNQNGAVIHYALGEDDGNPTPPTLPDSYNGLGFKNLIFMVVELLDIHNQWLAIEENRPPVHLIFIEEPEAHLHAQLQQAFIRKIMDLLAMESQELMHYTTQVVVTSHSTHILYERGFRPIRYFRRKRSSNMSATDVLNLSVFYDNTDPEIRDFLERYLKLTHCDLFFADGAVLVEGNVERLLLPQMIATAAPRLKSSYLTVLEIGGAFGYRFQKLIEYLGLTTLIITDLDSVYCPPPVQDATEARADELDSLAENPAANDDGEEPDDDEEEQANTETPGKSCIASHPGAMTSNQTLRQWLPKCDTVAALWDATEEMKIQSRTTECDALVRVAYQCQTNVTWKEETLALAGRTLEEAFALENLSWCQDVSCKLLKLRIARAVSMDLLQLAQRIHKRVQSKSFSKTDFALNLLLKKPDEWSVPAYIAEGLKWLEAEIAPPELEVAEGQEEDVEDMSVALAETDGGRVA

SEQ ID NO: 69303 - protein, 625 aa, Enterobacter cloacae subsp. cloacae
MTSRIGSPDTQADIDVRTCLDSSPPRSFVMVAGAGSGKTTSLIKALAHLADTRGSALRRAGQKISCITYTEVAVGEIAADVGNSQLFHISTIHSFLWSVIRPFHLDIAKWVVARIHEKIAEKQAHYDKPRTQAKTKSRLEDEIAYLSAQLECIDDVDKFIYGTGSNYAKGILGHDDILKLVPACVEAHPLLRRIVAKRFPFIFVDESQDTDPDVISALRTIANDNPDICIGFFGDPMQKIYMSGAGAIPLSDGWAEITKPENFRCPTSVLGVINSIRASGDGLQQIRGRTTIVDGVEQTVLGTVNLFILPSNVERSAYLTSVRRYLANETSDEQWLSDTREGDVRLLVLVHRMAANRLGFPNLFSALTDKAPMSLSEGVNDGSAWPLRPFVQHILPIFAAAQANDQFQIMSIMRNECPKLEPLRLHGQDMVAVLNELQHGINSLLALLEEGSQATVRDILLHVRDCELLRLDDRFDNHLSDEPVNDGNDDFGNVQNYLRCNVHELWAYRRYLSEESPFATHHGVKGAQFERVLVVIDDEEARFSQYSYGKYFQYIPLSDNDLANLEEGKESVLDRTRRLFYVCCSRALKDLAVVIFVPDVAVAQAAIVEQNLFPASAILGQHDLS

SEQ ID NO: 69304 - protein, 594 aa, Serratia marcescens subsp. marcescens; identical to SEQ ID NO: 69300

SEQ ID NO: 69305 - protein, 597 aa, Serratia marcescens subsp. marcescens; identical to SEQ ID NO: 69301

SEQ ID NO: 69306 - protein, 789 aa, Burkholderia pseudomallei
MDIPEVSAHSSATDPASSSAPSAPAVPPAETVALPGDSPIRLACVEVCNFRRLAKTRLELDDATTILVGANNSGKTSLLTVLRNFLSDSPGFRAFDISLSQWAKLRQLSELWEALDEDPTTESKDAEKWEQQYRQLLGCMPFIDLWFDAKEGAYNYVAPFITSLKWRGGAVGVRVRLEPVADSDELRKLAWRYREARSPVRTLPKDGHAWPMDLLDYWLRYSADLRRIAVYRLDPAKGPLATEQCNELQELPPDSQPVELQLLRKLVRVDFVPAQRGLGAEDDETRSESAGTRPGLFSSQLLKFARQHLNVAPSGHGNREDLVAAIARAQAELDDSIYKALQPAMEDVEVLGYPGLHDPQQLHFRTRIQTADLLAHSTAVQYRLDETAVDESLPEHSIGLGYQNLQSLSFMLVSFRAARLNPPQGSPAAVHLVMVEEPEAHLHVQVQRNFSSNAHELIRPKELVHSNLRSQLLISTHSSHLAHGDSFTRLRYVKRIASTGAGVRPSSEVVNLGDAFGDDIQTRTFAERYFQVQHTDLLFADAAIFVEGTAERMLVPLFIERDFPKLAKKYVSFLDIGGSHAHRLRPLVERLGIPTAVITDLDPVVPTTSKGGRVVRAAVHIAGQADLECGNDTLTSWHPKLADFHAYAKPTSAHLEWVSDSGVKVRFAWQLPVAAASDQWPSSFEDALVLTNIDWFKALDEEKDSVSGKKKDHRGTLGKVIGLVLDHSDHTELLKELHAMLHGNFSKGDFAATLFERLNAGQALACPTYIADALAWLSGQLEATAGETE

SEQ ID NO: 69307 - protein, 576 aa, Burkholderia pseudomallei; identical to SEQ ID NO: 64757

SEQ ID NO: 69308 - protein, 687 aa, Yersinia enterocolitica
MLVKNVEIQNFRLLRDVSLRLEENITLVVGRNNSGKTSIAELFRRLLSDKGPSFRLEDFSLGCHEGFWAAFEALQAGKLSEDIYHHLPSIIIKLDVEYDVDSPDLGPISDCIIDLNPDCNFVRMVLTFGPSSVATESLFADVTVPPEGMNIERTALFRAVEMRLTQSYECKLEAVDPNDPTNRKNLDLKTIKILINGGFINAQRGLDDDTHRERDVLGKIIEVLFQSALTDPIDSNKRTIAAQLKMAVEQIQTELHVGFNEKLTSLLPTFDLFGYPGLADPGLVTETSFDVDKLLNNHTKVRYVGVNGITLPETYNGLGMRNLVYILLQLLRFFREYQATPTAAGVHLIFIEEPEAHMHPQMQEVFIRQLSKITKSFETQLNENRPWPVQFVISTHSPHMANEARFESMRYFLTREGNDGFRQSVVKDLRKGMGDAPVPERDFLYQYLTLTRCDLFFADKAVLIEGTSERLLLPAMIRKTDAAAPDEPQLGSQYLTVMEVGGAYAHRFFDLLSFLELRTLIITDIDSVKRNANNKRVATPVANGEFTSNGCIKAWFSNNDITPTQLLTQSHVDKIVDSRRLAYQVPEIDGGPCARSFEDAFILANFESFALGDGDRATLAYDHAADQKKSTFALNYAIENTTWNVPRYISEGLRWLAEGNPVVVIPQVTPSDIVAAVAGIEMSGEGA

SEQ ID NO: 69309 - protein, 587 aa, Yersinia enterocolitica
MTTEIHESPADAAGRLALERMFDCLEQDRSFRLEAGAGAGKTFSLEKALRWLIDKRGSELIRKRQQVGCITYTNVAKDEIISRIKSHPAVCPETVHGFCWSILKDFQAMLREFVPLLPSWAERLEQVNGIGVRRVHYELGYPSVADHQVSIRHEDVLALMIKAMNLPKFRTVFCARYPILLIDEYQDTDSAFITALKNWFLDRREGPVIGLFGDHWQKIYGEGCGLVEHASLVIIDKNANFRSVDPIVRVLNRMRPALLQMVSDPDAPGEARVFHTNQWIGQRRTGRGGGHWTGDTTPEAAKAYFSYLKSHLISDGWDFSIENTKILMLSHSVLAREQGYASIPTIYGQYNDPWLKKEDPHIKFLTDQLEPACSAFNDRRYSDMFESFGTSMPHIRRHQDKIAWTESMNSLIELRLRGSIGEVVDFIAAQPHMRLPRAVEERELKLEEIGDEPVDEESRRVTQLRKLRNVSYTEIIALDCFIDGNTPFATKHGVKGAEFENVLVIVGRGWNKYNFIQMLEWIDAGPPADKVEFFENNRNLFYVACSRPKRRLAVLFTQELSANATLKLTEWFGRENIVALPANPELY

SEQ ID NO: 69310 - protein, 764 aa, Yersinia mollaretii; identical to SEQ ID NO: 68700

SEQ ID NO: 69311 - protein, 615 aa, Yersinia mollaretii; identical to SEQ ID NO: 68701

SEQ ID NO: 69312 - protein, 799 aa, Yersinia pseudotuberculosis; identical to SEQ ID NO: 67260

SEQ ID NO: 69313 - protein, 622 aa, Yersinia pseudotuberculosis; identical to SEQ ID NO: 67261

SEQ ID NO: 69314 - protein, 710 aa, Yersinia pseudotuberculosis
MYISKLSLLNYRNFANTKLLFNKGTNTIIGENGAGKTNLFRAIRLLLDDNMIRSAYRLDKTDFHRGLGQWQGHWIIISLEFEEISADEAVQALFLHGTGLAENVGKATYNLIFRPKKEIRLRLSQLDEGDHAGLDAILGLVTIDDYETIFTGRSEADFNDETFYRQVVGDFTNVRFNKETEFRCIGAKIPSVLSVSKEISFTFVQALRDVVAEFHNNRTNPLLILLKSKSGDIDPVLFTAITDKVKELNDSIEALPDVQNVRTDISSTIKDAAGEAYSPSSLSIKSDLPEEADELFQSLKLFVGESGEDHEGPIQDLSLGGANLIFLTLKLLEFKYRKARQSIANFLLIEEPEAHIHTHIQKTLFDRLNYDDTQIIFSTHSTHISEISNVQNVNILGRDGGRCEAYQPASGLQPEEIGNIQRYLDAVRSNLLFAKSVILVEGDAEEILIPILVKKVLGISLDELGISLINIRSTGFQNVAVLFHDDRIRKRCSIVTDLDKSIIDTEAVEGESEARAKRKAKYQASEKKGLARKVQLEAFCNDNDWIAPFFAPHTFEVDFVTAGNSRNVIAVLPDVYTDVPTTARAKASLKSGDITRYGQRVLTMAENQGKGWFAILLGKKIDPQTAIPRYILDAIAFAHPVVKKEVWFNVLSYRLSFIEKNDFFVEAEAVDNFKAMLQLFKNGYIDFAGIKNEMFAYFPDDRINDVLEVF

SEQ ID NO: 69315 - protein, 598 aa, Yersinia pseudotuberculosis
MFTWDDGDLNPEQEAAIREPGSVFLIACPGSGKTRTLTYKIAHELSQLESKKQFIVAITYTHRAADEIHERIENLGVDTSRLWIGTIHSFCLEWILKPYGIYHEALDRGFRVIDLHEREKVLESLCQPYQKPKITFWDCEYYFTDEGYVISCPHDWKHAGLAEILEQYFDYLREARQIDFELILYYAYQLIAAQPQISAILGQLFSFILVDEYQDTKRIQYSIIASILKAGQGTKAFIVGDPNQAIYESLGGYPIAFEEFQSMAGIKLEELELSQNYRSSERIIDYFANYNVYDTRIEVASNDKAYSSLISFNDSVTKDGLEDELIRLIRFNIETIGIPPHEVCILAPQWMHLASMTRRLVASMPEYAFDGPGMVPFARDLDNFWYKLSRIALTQVSPSMYVRRLRWAGEVLSDLEGVGANVSMLTRQSLLRECNAITIDATDGLVYLRFFFDKLFSNLAFDIQAFTQLHEHYEAFFESSQARIDRLKKEGTEMIGDIATFRKVFQSRTGITISTIHGIKGAEFDAVIAYALLENMLPNRNDQNGQDSAMKLLYVIGSRARKNLHLISERGRIDKFTRAEYQATKKLNACCFEYDQIP

SEQ ID NO: 69316 - protein, 769 aa, Yersinia pseudotuberculosis
MSAADATTSLSGQISLRFVELCQFRRLGKVQLEIDPKTTILVGANNSGKTSILAALRHFLADGSSFGAFDISVSQWPKLRELGRAWDALEEDPSTSGASEGEWEEQLGTLLSAMPTLDLWFDAKAGMFHYVSPFLSKFSWKGGGVGVRLRLEPATNIEELKQLAWKYHLTRIPVKDMGKDSLAWPIDLLDFWLREPSQLGQVRAYKLDADNNPLDGIKTYVSQVLDADSSPIDRKHLQKLIKIDFVAAQRGLGSEEADSRSASGPHRIGLFSNQLLKFARQHLNVAATGHGHRADLIKAVAEAQQELDKKIHEAIGPSVEEVKELGYPGLHDPQEIRFRTRIQTADLLDHGTAVQYSMQKDSLEELLPEYSIGLGYQNLQSLSYQLVSFKAARLNPEKGAPVPVHLVMIEEPEAHLHVQVQRIFPGKAHKLISPNGSDELGLKSQLIISTHSSHLAHAENFDRLRYVRRIAKSDEQTMPTTEVVNLGQVFGDDKTTRQFAERYFRVQHTDLLFANAAIFVEGVAERMLLPLFIERDFAILNSRYLSFLDIGGSHAHRLRSLVERLRIPTVIITDIDPVEERPGKPKKNGEPTTTLVAVANTGQSGLQCGNPTLRGWHPKLQQLEDFKNPKDEHLVWNEIAECFVRFAWQLPVAEADSQWPSTFEDSLILRNIPWFKELMNEKVDEEGKQITPPKGALGSVARQVAENDNIPELLAALHKLMHGSFNKGDFAASIFEMVAAEEPIVCPKYIEDALEWLQTQLEPSKEVMP

SEQ ID NO: 69317 - protein, 649 aa, Yersinia pseudotuberculosis
MTNSPTLDGNDRDAGVVEEICGYLTDIPPRNYFLFAGAGSGKTRTLVEVLRRLTGLTEHEKGGQLARSLKMYGRSIRVVTYTKNAVSVINGRLGDNNLVSVSTIHSFCWELINGFNDDIREALIALKEAQLARDTAEAEAKPRGITPAKQRALDEIIDEIEILRATEVFIYHPDRNTYGPGALPHNYVLDATAWLLRNKPTLQSILKDRHPIILIDESQDTMKGVLDSLMLLAEKRERDLTLGLLGDHRQRIYTDGHADLPSIVPENWATPELQMNHRSQRRIVTLINKIWETELEGRTQPTKGSAQHPRTEKAGGTVRLFLGDTSRSPEDKVLSERWCAERMFEISGLADWNQGQYQLLALEHKLVATRGSFLHVYEAMVLLDPHAAAPSGSGDNKGPSSVQTLLNELAHLEACISNDGIVNEFMATEVFRRYGRLDNIPEDYEARAARTDEILKAVNIFAAACAKPESTVADVLAPVLCASLFEVDHRLQEAYADKSPTPPAPERGEDESKQTRMRRGWCALFAAPWKQLKCYRNYLAGISELATHQVVKGSEFKHVMVVMDDELAGGFLIKYDKIFGGMELSKRDKDNAEAGKETTIDRTLRLLYVTCSRAQESLALVLWSSDPTAAMARIEESQWFEEGEVQIIT

SEQ ID NO: 69318 - protein, 678 aa, Yersinia aleksiciae; identical to SEQ ID NO: 66804

SEQ ID NO: 69319 - protein, 559 aa, Yersinia aleksiciae; identical to SEQ ID NO: 66805

SEQ ID NO: 69320 - protein, 678 aa, Yersinia rohdei
MQLKKIFISGFKSISNQHPQTINLEHELTTFIGHNGTGKSTAMEALNKLFSVDQSLRSLSINDFYNADVEKDEKNKSLIIEAWFSFPKPNEGKISIPSLIEHLTIDKSDGVILFRVRLEGKLSFDANPIGDIDEDIWVISSSDDVVEESSKQKLSAAVRNAIQVSYVPANRDPSLQLKYSSKAVLGRLLKAIEWAGGSQKVIEEQAAKLNALTKSNTALNEIAAAINASWGLIYKGRYLSQASLNFPLANIDEILKLIQLQFNPDEVGNTVNVDRLSDGQKSLVYFSLIKAMFDIDKKTRDLISSGESSNFNPEKMRLPIFSMISLEEPENHLSPHYLGRIIKLVKDYGRNELCQVIISSHSSSILSRIDPEQIRHFRLDQDSKSTVVSALTLPDKADELSKFIKEAVKAYPEIYFSKLVIFGEGDSEEIIIPKVLELHSTEIDSHSISVVPLGGRHVNHFWRLLKSLKVPFITVLDFDIDRNGGGFGRLKYAIDQLAEIGESRSIYIHKDISKIIPLWDSEQDPRKFTIKCDDGAKINIVDELENCNVYFSSPLDIDYSMIEAFPDIFCVKDEAYGERGPLNIKKKEGAEEDQKELIKAVLKKGNSGVRYEFSADYLKYFQWYRYRFLSNKSKPASHVRMFSKIEEMYKPDEINAKLPSVLIRIAEKTVTILEEVIE

SEQ ID NO: 69321 - protein, 556 aa, Yersinia rohdei
MMMQWQPSEGITPTPELMDIILCDQSVSVLAGAGAGKTELLAQKSNYLLQTGKCMWPKRILCLSYKKEAQENIKERVMKRCGKKGDRFDSYTFDAFCKSIVDRFKDILSRDKRPLNSYDLVFSPKESNGKDKLSFDLIRQLALEILKIRADIVDLFSLTYSHVFIDEFQDTRSDQYELIKLLFKDRGTQLLAVGDINQSIMLWAGARKTVFEDCEKEFNTTKKLLVQNFRASDEIQEVLRCFIHFVQNDVNFSPITRSVDSCTIHHYDNEFSEADDLANKIENFIASGIEEKEICVLAKQQSEQYTEKLRDKLTTKGIRNLDMSELQDVLKEPLGRIFSSLFKVCTSRSSSGYTELCDLYLALHRVNHGDDKEDGLIKSLSDKIAENREKLINSASPDLLILCIKDIIKFFGVNKIMGRWNQYKSTNYWDKLWNSLEQHLRYTIGATQSFNEAALMFQAENSVQVMNIHKCKGLEYKVVIFLGLEDQAFWNYKKAKFENDCAFYVALSRAKEKILVTTAENREHRINNGYDNRNSKYQLVEQIYSFLTSHCKFKSI

SEQ ID NO: 69322 - protein, 561 aa, Burkholderia pseudomallei; identical to SEQ ID NO: 63122

SEQ ID NO: 69323 - protein, 631 aa, Burkholderia pseudomallei; identical to SEQ ID NO: 62563

SEQ ID NO: 69324 - protein, 561 aa, Burkholderia pseudomallei; identical to SEQ ID NO: 63122

SEQ ID NO: 69325 - protein, 631 aa, Burkholderia pseudomallei; identical to SEQ ID NO: 62563

SEQ ID NO: 69326 - protein, 641 aa, Salmonella enterica; identical to SEQ ID NO: 62984
  subsp. enterica serovar Typhimurium str. DT104

SEQ ID NO: 69327 - protein, 553 aa, Salmonella enterica; identical to SEQ ID NO: 62985
  subsp. enterica serovar Typhimurium str. DT104

SEQ ID NO: 69328 - protein, 641 aa, Salmonella enterica; identical to SEQ ID NO: 62984
  subsp. enterica serovar Typhimurium str. DT104

SEQ ID NO: 69329 - protein, 553 aa, Salmonella enterica; identical to SEQ ID NO: 62985
  subsp. enterica serovar Typhimurium str. DT104

SEQ ID NO: 69330 - protein, 641 aa, Salmonella enterica; identical to SEQ ID NO: 62984
  subsp. enterica serovar Typhimurium str. DT104

SEQ ID NO: 69331 - protein, 553 aa, Salmonella enterica; identical to SEQ ID NO: 62985
  subsp. enterica serovar Typhimurium str. DT104

SEQ ID NO: 69332 - protein, 641 aa, Salmonella enterica; identical to SEQ ID NO: 62984
  subsp. enterica serovar Typhimurium str. DT104

SEQ ID NO: 69333 - protein, 553 aa, Salmonella enterica; identical to SEQ ID NO: 62985
  subsp. enterica serovar Typhimurium str. DT104

SEQ ID NO: 69334 - protein, 641 aa, Salmonella enterica; identical to SEQ ID NO: 62984
  subsp. enterica serovar Typhimurium str. DT104

SEQ ID NO: 69335 - protein, 553 aa, Salmonella enterica; identical to SEQ ID NO: 62985
  subsp. enterica serovar Typhimurium str. DT104

SEQ ID NO: 69336 - protein, 641 aa, Salmonella enterica; identical to SEQ ID NO: 62984
  subsp. enterica serovar Typhimurium str. DT104

SEQ ID NO: 69337 - protein, 553 aa, Salmonella enterica; identical to SEQ ID NO: 62985
  subsp. enterica serovar Typhimurium str. DT104

SEQ ID NO: 69338 - protein, 641 aa, Salmonella enterica; identical to SEQ ID NO: 62984
  subsp. enterica serovar Typhimurium str. DT104

SEQ ID NO: 69339 - protein, 553 aa, Salmonella enterica; identical to SEQ ID NO: 62985
  subsp. enterica serovar Typhimurium str. DT104

SEQ ID NO: 69340 - protein, 641 aa, Salmonella enterica; identical to SEQ ID NO: 62984
  subsp. enterica serovar Typhimurium str. DT104

SEQ ID NO: 69341 - protein, 553 aa, Salmonella enterica; identical to SEQ ID NO: 62985
  subsp. enterica serovar Typhimurium str. DT104

SEQ ID NO: 69342 - protein, 561 aa, Burkholderia pseudomallei; identical to SEQ ID NO: 63122

SEQ ID NO: 69343 - protein, 631 aa, Burkholderia pseudomallei; identical to SEQ ID NO: 62563

SEQ ID NO: 69344 - protein, 607 aa, Burkholderia pseudomallei
MRVARLSIENFRGIHQAELHFTGHTLLVGGNNIGKSTVCEALDLVLGPDRLNRNPPVEEFDFRNAGYLAADGETVAPIRIEAILVDLTNDIKTMCANNLEFWHKAENRLLGEGEIGAADNPNVEFCLRLITLARYDVEEDQFVARTIYGRSDEESEDERKAIPVRVKRAIGFLYLRTVRTGSRALSLERGTLLDNILRMKEARKGMWERIRRRLSTLAPPVDADATELGPILDEIEARLAEYIAPGGEGRSTRLFVSQLTREHLRKTIAFFLTMGQGEEAVPFQQAGSGTLNTLVLALLTFIADIKKDNVIFAMEEPEIALPPYTQRRIANYLLEETSQCFVTSHSPYVIERFEPDGILKLNRDEHGVLSGTAIKLPDNMKTKNYRQNFRRAIAEAMLGKGVIVGEGITEQDALLVVAQKMEDSNNELFPLDVAGISVINADGDGNLEKLGSFFREIGIPAFAFFDRKNRTDAQVSALQGAYVIAKEIAQKGAEALMAAETPLDRQWQYLEALRENDREGHFGIPAQRSADDDDDVRKLTVSTLKGLKGEGGAAKLLELCTVAELPPTITAFLSDIYQRYPKPKRKKIEAQEPAAALGDGPQEVGGV

SEQ ID NO: 69345 - protein, 577 aa, Burkholderia pseudomallei
MPLVICPQRQSILDEGGPILVTGGPGSGKTTIALVKAQLVIERGLSAGQSVLFLSFSRAAVARVIEASKVQLPKPLQSKLSVQTFHSYFWRILQAYGYLLGAPRSLKLLMPHDEAALRHEFENNGGRWEDERERLFRDEGKVAFDLFAPKALELLSRGARLRDLFSACHPLIVVDEAQDTAEDQWQCIRLFSAGTQLMCLADLDQQIYDFRPGVSAERVTHIMATLRPLRVDLAGQNHRSANSEIVAFGNDILLNTPRGGMYRGVSRMNYRANRDLRDRAIRQAIGIVIQRARAATNENIESIAVLATWNRGVSVISRALTGNGANTIPHRVMIDEASVLQSSRLIAFLLEPRRPANDELSDLADGLELAATVFRARGGNGNLETAQRLAASAQQCRAGRAPRANGVASRLLGVLRTLRGHLFSGAPKRDWIDARRFLHDSGANPLRAIAEDAEQLVTFQRGRRIEDSLAELWQSQGTYRNARAALDAALAEDQLLSGGNDLRGIHVMTIHKSKGKEFDAVIVFDDPNSSPLLFCAESPPYPRCRKLLRVGITRARHHVLMLCDLFTPSGLLQGHQL

SEQ ID NO: 69346 - protein, 561 aa, Burkholderia pseudomallei; identical to SEQ ID NO: 63122

SEQ ID NO: 69347 - protein, 631 aa, Burkholderia pseudomallei; identical to SEQ ID NO: 62563

SEQ ID NO: 69348 - protein, 587 aa, Burkholderia pseudomallei
MTGHLNTLLVGGNNIGKSTVCEALDLVLGPDRLNRNPPVEEFDFRNAGYLAADGETVAPIRIEAILVDLTNDIKTMCANNLEFWHKAENRLLGEGEIGAADNPNVEFCLRLITLARYDVEEDQFVARTIYGRSDEESEDERKAIPVRVKRAIGFLYLRTVRTGSRALSLERGTLLDNILRMKEARKGMWERIRRRLSTLAPPVDADATELGPILDEIEARLAEYIAPGGEGRSTRLFVSQLTREHLRKTIAFFLTMGQGEEAVPFQQAGSGTLNTLVLALLTFIADIKKDNVIFAMEEPEIALPPYTQRRIANYLLEETSQCFVTSHSPYVIERFEPDGILKLNRDEHGVLSGTAIKLPDNMKTKNYRQNFRRAIAEAMLGKGVIVGEGITEQDALLVVAQKMEDSNNELFPLDVAGISVINADGDGNLEKLGSFFREIGIPAFAFFDRKNRTDAQVSALQGAYVIAKEIAQKGAEALMAAETPLDRQWQYLEALRENDREGHFGIPAQRSADDDVRKLTVSTLKGLKGEGGAAKLLELCTVAELPPTITAFLSDIYQRYPKPKRKKIEAQEPAAALGDGPQEVGGA

SEQ ID NO: 69349 - protein, 577 aa, Burkholderia pseudomallei
MPLVICPQRQSILDEGGPILVTGGPGSGKTTIALVKAQLVIERGLSAGQSVLFLSFSRAAVARVIEASKVQLPKPLQSKLSVQTFHSYFWRILQAYGYLLGAPRSLKLLMPHDEAALRHEFENNGGRWEDERGRLFRDEGKVAFDLFAPKALELLSRGARLRDLFSACHPLIVVDEAQDTAEDQWQCIRLFSAGTQLMCLADLDQQIYDFRPGVSAERVTHIMATLRPLRVDLAGQNHRSANSEIVAFGNDILLNTPRGGMYRGVSRMNYRANRDLRDRAIRQAIGIVIQRARAATNENIESIAVLATWNRGVNVISRALTGNGANTIPHRVMIDEASVLQSSRLIAFLLEPRRPANDELSDLADGLELAATVFRARGGNGNLETAQRLAASAQQCRAGRAPRANGVASRLLGVLRTLRGHLFSGAPKRDWIDARRFLHDSGANPLRAIAEDAEQLVTFQRGRRIEDSLAELWQSQGTYRNARAALDAALAEDQLLSGGNDLRGIHVMTIHKSKGKEFDAVIVFDDPNSSPLLFCAESPPYPRCRKLLRVGITRARHHVLMLCDLFTPSGLLQGHQL

SEQ ID NO: 69350 - protein, 561 aa, Burkholderia pseudomallei; identical to SEQ ID NO: 63122

SEQ ID NO: 69351 - protein, 631 aa, Burkholderia pseudomallei; identical to SEQ ID NO: 62563

SEQ ID NO: 69352 - protein, 631 aa, Burkholderia pseudomallei
MHVVRVRIRNFRGIAAGDVHLHGHTVFVGDNNTGKSTLLEAIDLVLGPERLNRRPVVDEHDFYAGVYVSLPKREVIPIQVEVVVAGLSEEQQRHFRDHVEWWNTATKAMLAGPPTAGTDAEQVVTALRVFFNGWYDVDEDDFTGDTYYAIPEAPGGDFVRFTTGDKRKCGFLYLRTLRTGARALSLERGSLLDVILRLRETRLKMWEDLLSQLRALPVGEAEEIGELLASVQEAVRHYVPSDWAEEPHMRVSDLTRDMLRRTLTVFMGTGAKRPDGSTYAAPYQHQGTGTINTLVLALLSIIAELKQSVIFAMEEPEIALPPHTQKRIINSLRQRSAQAIFTSHSPYVLEEFEPDQILVLKRVMGVMTGTPATYPPSVKPKAYRTEFRTRFCEALLARYVLVVEGRTEFDALPAAARRLSTLDAMRFKSLENLGVAIVDAQGESNVAPLGAFFRSLGKTVFAVFDKQTPDALKAIIDSVDHAFESATTGFENLVLTGTSEAALRAYAAAAVASGGWPQHLAAKTPTPESSMGDLQSALSSFFGWAKGGGDAGDLLASCADPGDVPAYVRNTLESIKNVIEPPLSVATAADRDGDAAGDSAGDEASADLSAAEEPTLGAYAKFLPHPPKPLA

SEQ ID NO: 69353 - protein, 570 aa, Burkholderia pseudomallei
MNAEWSDQKKRFLACREHALALGGPGAGKTHIALIKARDEIRSGSLKPGQKVLFLSFARPTVARIIEKASELISREDLAWLEVSTYHGFAWSILRSHAYLLNGRPAVHLLPPPEAAAHLTDIDKSGHEAEKQRLFAQEGRLHFDLFARLVAELFEKSGRLAAIYMDSYPVVILDEFQDTNSDEWALIQQLGRRSRLIALADPDQRIYEFRGADPRRLQEFLKAFKAESFDFVGENHRSNGADITTFGNDLLQGTNRGKTYQQVKITRYGFIRGKSLHFSAKAAVYAALERLKNVPNKSIAILVPSKRLMLDLSDYLSSNADNLPALHHDVAMDAEPPALAAGVIAALLEGGSAGAIACRALSALHTHIRGRRGSRPTPQADLDLASALTNFLTTGRVRGDKRKLIISEIQRIADEREKLVMTGDPARDWLHLRDLLESSSAAALKQVAADARFLRLLQRGSALRNKLGALWRAQGSYQGAEEAVRNALLQEHFSAAQKDWRGVHLMTIHKSKGKEFDEVIIYDGLYQRIARKPDDEKVRAQDILALRVGVTRAIRRAVILTPKSDPCPFL

SEQ ID NO: 69354 - protein, 631 aa, Burkholderia pseudomallei; identical to SEQ ID NO: 69352

SEQ ID NO: 69355 - protein, 570 aa, Burkholderia pseudomallei; identical to SEQ ID NO: 69353

SEQ ID NO: 69356 - protein, 689 aa, Streptococcus pneumoniae; identical to SEQ ID NO: 62612

SEQ ID NO: 69357 - protein, 605 aa, Streptococcus pneumoniae; identical to SEQ ID NO: 62783

SEQ ID NO: 69358 - protein, 689 aa, Streptococcus pneumoniae; identical to SEQ ID NO: 62612

SEQ ID NO: 69359 - protein, 605 aa, Streptococcus pneumoniae
MVKSEEWFPKGDIILEETALGAVKDVTNCLVIAGPGAGKTELLAQKLDYLFSTNKCVSPKKILALSFKTDAASNLKERVKKRYGDEYASRFTSLTYSAFEKRILDQFRDVLPEDIRPSRDYLIEDWYTIKELLSMNGINVNGWRMSDIRRYVENIILNNGDNHKFKTDLLKGTQDNKPVLLYRQITKLSTQIIDTNEYIRKALQMTYDFVFLDEFQDTTYAQYDLLKTCFLGSSCKLTAVGDDKQAIMRWAGAKPDIFPDYIRDFNPNEYQLLMNHRSVPKLVEFQKEVHQILNSNHSSIQTNNYPEFQEGEITLFEFENESLEAKLIANDIELKIQGGIRPSEICILAKQKVGIYSFELISILNSKGIKARIENEYQDILKAPTCNLLLDLISCSQGKRDPLIWENISNFYGNINGIDELTDELILAKSYKEIDNIVSDITYLISNFIPNEESMLKLIDCIIEKIDEKRIISNFSTYNGKSDLDIIVKNFSKLLYIEYSQTQGEWLDTVSSFKGENSIPIMTIHKSKGLEYEVVYFLGLEDSAFWSFNNQPEEDKSAFFVALSRAKSHLIFTYCKLRNNSPQNNRNINEIYSLLTQSNLVDVIN

SEQ ID NO: 69360 - protein, 689 aa, Streptococcus pneumoniae; identical to SEQ ID NO: 67050

SEQ ID NO: 69361 - protein, 605 aa, Streptococcus pneumoniae; identical to SEQ ID NO: 62613

SEQ ID NO: 69362 - protein, 689 aa, Streptococcus pneumoniae; identical to SEQ ID NO: 62612

SEQ ID NO: 69363 - protein, 605 aa, Streptococcus pneumoniae; identical to SEQ ID NO: 62783

SEQ ID NO: 69364 - protein, 689 aa, Streptococcus pneumoniae; identical to SEQ ID NO: 62612

SEQ ID NO: 69365 - protein, 605 aa, Streptococcus pneumoniae; identical to SEQ ID NO: 62783

SEQ ID NO: 69366 - protein, 645 aa, Streptococcus pneumoniae; identical to SEQ ID NO: 63402

SEQ ID NO: 69367 - protein, 605 aa, Streptococcus pneumoniae; identical to SEQ ID NO: 63191

SEQ ID NO: 69368 - protein, 689 aa, Streptococcus pneumoniae; identical to SEQ ID NO: 62612

SEQ ID NO: 69369 - protein, 605 aa, Streptococcus pneumoniae; identical to SEQ ID NO: 62613

SEQ ID NO: 69370 - protein, 689 aa, Streptococcus pneumoniae; identical to SEQ ID NO: 62612

SEQ ID NO: 69371 - protein, 605 aa, Streptococcus pneumoniae; identical to SEQ ID NO: 62783

SEQ ID NO: 69372 - protein, 689 aa, Streptococcus pneumoniae; identical to SEQ ID NO: 62612

SEQ ID NO: 69373 - protein, 605 aa, Streptococcus pneumoniae; identical to SEQ ID NO: 62783

SEQ ID NO: 69374 - protein, 689 aa, Streptococcus pneumoniae; identical to SEQ ID NO: 62612

SEQ ID NO: 69375 - protein, 605 aa, Streptococcus pneumoniae; identical to SEQ ID NO: 62783

SEQ ID NO: 69376 - protein, 689 aa, Streptococcus pneumoniae; identical to SEQ ID NO: 62612

SEQ ID NO: 69377 - protein, 605 aa, Streptococcus pneumoniae; identical to SEQ ID NO: 62613

SEQ ID NO: 69378 - protein, 531 aa, Streptococcus pneumoniae; identical to SEQ ID NO: 63406

SEQ ID NO: 69379 - protein, 605 aa, Streptococcus pneumoniae; identical to SEQ ID NO: 62783

SEQ ID NO: 69380 - protein, 689 aa, Streptococcus pneumoniae; identical to SEQ ID NO: 62612

SEQ ID NO: 69381 - protein, 605 aa, Streptococcus pneumoniae; identical to SEQ ID NO: 62783

SEQ ID NO: 69382 - protein, 689 aa, Streptococcus pneumoniae; identical to SEQ ID NO: 62612

SEQ ID NO: 69383 - protein, 605 aa, Streptococcus pneumoniae; identical to SEQ ID NO: 62783

SEQ ID NO: 69384 - protein, 645 aa, Streptococcus pneumoniae; identical to SEQ ID NO: 63402

SEQ ID NO: 69385 - protein, 605 aa, Streptococcus pneumoniae; identical to SEQ ID NO: 63191

SEQ ID NO: 69386 - protein, 689 aa, Streptococcus pneumoniae; identical to SEQ ID NO: 62612

SEQ ID NO: 69387 - protein, 605 aa, Streptococcus pneumoniae; identical to SEQ ID NO: 62783

SEQ ID NO: 69388 - protein, 689 aa, Streptococcus pneumoniae; identical to SEQ ID NO: 62612

SEQ ID NO: 69389 - protein, 605 aa, Streptococcus pneumoniae; identical to SEQ ID NO: 62783

SEQ ID NO: 69390 - protein, 689 aa, Streptococcus pneumoniae; identical to SEQ ID NO: 67134

SEQ ID NO: 69391 - protein, 605 aa, Streptococcus pneumoniae; identical to SEQ ID NO: 62783

SEQ ID NO: 69392 - protein, 689 aa, Streptococcus pneumoniae; identical to SEQ ID NO: 62612

SEQ ID NO: 69393 - protein, 605 aa, Streptococcus pneumoniae; identical to SEQ ID NO: 62613

SEQ ID NO: 69394 - protein, 689 aa, Streptococcus pneumoniae; identical to SEQ ID NO: 62612

SEQ ID NO: 69395 - protein, 605 aa, Streptococcus pneumoniae; identical to SEQ ID NO: 62783

SEQ ID NO: 69396 - protein, 689 aa, Streptococcus pneumoniae; identical to SEQ ID NO: 62612

SEQ ID NO: 69397 - protein, 605 aa, Streptococcus pneumoniae; identical to SEQ ID NO: 62783

SEQ ID NO: 69398 - protein, 506 aa, Streptococcus pneumoniae
MLSRLVNSINWTEDEINEITDKIDELNNTFLSENGALTQINNEIQKSWELYHEDNRFSQAELIINSSEMAAALRQIALKFSPTTTEEAFTVSDLGDGLRSIFYFSLVDSILDIELEITKDREENPDNPRFKLIPPVLTILAIEEPENHIAPHHIGKLIKRFKQLGNNDNSQVILTSHSPAIVKRIDPEDLKYLRIENNDRVLQTIVSDIQLPPAIDESYKYIKGAIQAYPELYFAKLVVLGEGDSEELLLPKFFDLLGKEVDSSQISIVPLGGRHVNYFWKLLNALRIPHITLLDFDNERYGGGWGRIKYISQHLYELNTEFQEWFHTQRLDFNEIGSRGCESIGAQRLINWFNKLEEFNVYFSSPLDIDFLMLQHYKDNYLNTLSPIEGPVVSYNDSDGSSKKVKLSDLDCLDRLQLEGFNKRKEEAIRATLKDKSGHGDSFNEEEKELMIWYQYFFLGRGKPTTHMQFLSSISDDELTRNLPPVFEKIVNSAEELLGDIQHGKE

SEQ ID NO: 69399 - protein, 605 aa, Streptococcus pneumoniae; identical to SEQ ID NO: 62783

SEQ ID NO: 69400 - protein, 689 aa, Streptococcus pneumoniae; identical to SEQ ID NO: 62612

SEQ ID NO: 69401 - protein, 605 aa, Streptococcus pneumoniae; identical to SEQ ID NO: 62783

SEQ ID NO: 69402 - protein, 689 aa, Streptococcus pneumoniae; identical to SEQ ID NO: 62612

SEQ ID NO: 69403 - protein, 605 aa, Streptococcus pneumoniae; identical to SEQ ID NO: 62783

SEQ ID NO: 69404 - protein, 689 aa, Streptococcus pneumoniae; identical to SEQ ID NO: 62612

SEQ ID NO: 69405 - protein, 605 aa, Streptococcus pneumoniae; identical to SEQ ID NO: 62783

SEQ ID NO: 69406 - protein, 689 aa, Streptococcus pneumoniae; identical to SEQ ID NO: 62612

SEQ ID NO: 69407 - protein, 605 aa, Streptococcus pneumoniae; identical to SEQ ID NO: 62783

SEQ ID NO: 69408 - protein, 689 aa, Streptococcus pneumoniae; identical to SEQ ID NO: 62612

SEQ ID NO: 69409 - protein, 605 aa, Streptococcus pneumoniae; identical to SEQ ID NO: 62783

SEQ ID NO: 69410 - protein, 689 aa, Streptococcus pneumoniae; identical to SEQ ID NO: 62612

SEQ ID NO: 69411 - protein, 605 aa, Streptococcus pneumoniae; identical to SEQ ID NO: 62783

SEQ ID NO: 69412 - protein, 689 aa, Streptococcus pneumoniae; identical to SEQ ID NO: 62612

SEQ ID NO: 69413 - protein, 605 aa, Streptococcus pneumoniae; identical to SEQ ID NO: 62783

SEQ ID NO: 69414 - protein, 689 aa, Streptococcus pneumoniae; identical to SEQ ID NO: 62612

SEQ ID NO: 69415 - protein, 605 aa, Streptococcus pneumoniae; identical to SEQ ID NO: 62783

SEQ ID NO: 69416 - protein, 689 aa, Streptococcus pneumoniae; identical to SEQ ID NO: 62612

SEQ ID NO: 69417 - protein, 605 aa, Streptococcus pneumoniae; identical to SEQ ID NO: 62783

SEQ ID NO: 69418 - protein, 689 aa, Streptococcus pneumoniae; identical to SEQ ID NO: 62612

SEQ ID NO: 69419 - protein, 605 aa, Streptococcus pneumoniae; identical to SEQ ID NO: 62783

SEQ ID NO: 69420 - protein, 689 aa, Streptococcus pneumoniae; identical to SEQ ID NO: 62612

SEQ ID NO: 69421 - protein, 605 aa, Streptococcus pneumoniae; identical to SEQ ID NO: 62783

SEQ ID NO: 69422 - protein, 689 aa, Streptococcus pneumoniae; identical to SEQ ID NO: 62612

SEQ ID NO: 69423 - protein, 605 aa, Streptococcus pneumoniae; identical to SEQ ID NO: 62783

SEQ ID NO: 69424 - protein, 689 aa, Streptococcus pneumoniae; identical to SEQ ID NO: 62612

SEQ ID NO: 69425 - protein, 605 aa, Streptococcus pneumoniae; identical to SEQ ID NO: 62783

SEQ ID NO: 69426 - protein, 689 aa, Streptococcus pneumoniae; identical to SEQ ID NO: 62612

SEQ ID NO: 69427 - protein, 605 aa, Streptococcus pneumoniae; identical to SEQ ID NO: 62783

SEQ ID NO: 69428 - protein, 689 aa, Streptococcus pneumoniae; identical to SEQ ID NO: 62612

SEQ ID NO: 69429 - protein, 605 aa, Streptococcus pneumoniae; identical to SEQ ID NO: 62783

SEQ ID NO: 69430 - protein, 689 aa, Streptococcus pneumoniae
MKLTKVIINNFRSFGESQIIELNNQTVLIGNNSSGKTTVLQALSKLFSDKQNDRIIKKSDFHLPKGSRPGENTRNLFIETIFEFDELDGTPYSQAIPSFFEHFTVSKDGAKPFLRIRLESSWEDDGTVEGSIDTQFYYISSDEDTIRDEDKHRAPRKDLDKIRVLYVPASRTPEKELGNASGSMLSRLVNSINWTEDEINEITDKIDELNNTFLSENGALTQINNEIQKSWELYHEDNRFSQAELIINSSEMAAALRQIALKFSPTTTEEAFTVSDLGDGLRSIFYFSLVDSILDIELEITKDREENPDNPRFKLIPPVLTILAIEEPANHIAPHHIGKLIKRFKQLGNNDNSQVILTSHSPAIVKRIDPEDLKYLRIENNDRVLQTIVSDIQLPPAIDESYKYIKGAIQAYPELYFAKLVVLGEGDSEELLLPKFFDLLGKEVDSSQISIVPLGGRHVNYFWKLLNALRIPHITLLDFDNERYGGGWGRIKYISQHLYELNTEFQEWFHTQRLDFNEIGSRGCESIGAQRLINWFNKLEEFNVYFSSPLDIDFLMLQHYKDNYLNTLSPIEGPVVSYNDSDGSSKKVKLSDLDCLDRLQLEGFNKRKEEAIRATLKDKSGHGDSFNEEEKELMIWYQYFFLGRGKPTTHMQFLSSISDDELTRNLPPVFEKIVNSAEELLGDIQHGKE

SEQ ID NO: 69431 - protein, 605 aa, Streptococcus pneumoniae
MVKSEEWFPKGDIILEETALGAVKDVTNCLVIAGPGAGKTELLAQKLDYLFSTNKCVSPKKILALSFKTDAASNLKERVKKRYGDEYASRFTSLTYSAFEKRILDQFRDVLPEDIRPSRDYLIEDWYTIKELLSMNGINVNGWRMSDIRRYVENIILNNGDNHKFKTDLLKGTQDNKPVLLYRQITKLSTQIIDTNEYIRKALQMTYDFVFLDEFQDTTYAQYDLLKTCFLGSSCKLTAVGDDKQAIMRWAGAKPDIFPDYIRDFNPNEYQLLMNHRSVPKLVEFQKEVHQILNSNHSSIQTNNYPEFQEGEITLFEFENESLEAKLIANDIELKIQGGIRPSEICILAKQKVGIYSFELISILNSKGIKARIENEYQDILKDPTCNLLLDLISCSQGKRDPLIWENISNFYGNINGIDELTDELILAKSYKEIDNIVSDITYLISNFIPNEESMLKLIDCIIEKIDEKRIISNFSTYNGKSDLDIIVKNFSKLLYIEYSQTQGAWIDIISNFKGENSISIMTIHKSKGLEYEVVYFLGLEDSAFWSFNNQPEEDKSAFFVALSRAKSHLIFTYCKLRNNSPQNNRNINEIYSLLTQSNLVDVIN

SEQ ID NO: 69432 - protein, 689 aa, Streptococcus pneumoniae; identical to SEQ ID NO: 62612

SEQ ID NO: 69433 - protein, 605 aa, Streptococcus pneumoniae; identical to SEQ ID NO: 69431

SEQ ID NO: 69434 - protein, 689 aa, Streptococcus pneumoniae; identical to SEQ ID NO: 62612

SEQ ID NO: 69435 - protein, 605 aa, Streptococcus pneumoniae; identical to SEQ ID NO: 62783

SEQ ID NO: 69436 - protein, 689 aa, Streptococcus pneumoniae; identical to SEQ ID NO: 62612

SEQ ID NO: 69437 - protein, 605 aa, Streptococcus pneumoniae; identical to SEQ ID NO: 69431

SEQ ID NO: 69438 - protein, 689 aa, Streptococcus pneumoniae; identical to SEQ ID NO: 62612

SEQ ID NO: 69439 - protein, 605 aa, Streptococcus pneumoniae; identical to SEQ ID NO: 69431

SEQ ID NO: 69440 - protein, 689 aa, Streptococcus pneumoniae; identical to SEQ ID NO: 62612

SEQ ID NO: 69441 - protein, 605 aa, Streptococcus pneumoniae; identical to SEQ ID NO: 62783

SEQ ID NO: 69442 - protein, 689 aa, Streptococcus pneumoniae; identical to SEQ ID NO: 62612

SEQ ID NO: 69443 - protein, 605 aa, Streptococcus pneumoniae; identical to SEQ ID NO: 62783

SEQ ID NO: 69444 - protein, 689 aa, Streptococcus pneumoniae; identical to SEQ ID NO: 62612

SEQ ID NO: 69445 - protein, 605 aa, Streptococcus pneumoniae; identical to SEQ ID NO: 62783

SEQ ID NO: 69446 - protein, 689 aa, Streptococcus pneumoniae; identical to SEQ ID NO: 62612

SEQ ID NO: 69447 - protein, 605 aa, Streptococcus pneumoniae; identical to SEQ ID NO: 62783

SEQ ID NO: 69448 - protein, 689 aa, Streptococcus pneumoniae; identical to SEQ ID NO: 62612

SEQ ID NO: 69449 - protein, 605 aa, Streptococcus pneumoniae; identical to SEQ ID NO: 62783

SEQ ID NO: 69450 - protein, 689 aa, Streptococcus pneumoniae; identical to SEQ ID NO: 62612

SEQ ID NO: 69451 - protein, 605 aa, Streptococcus pneumoniae; identical to SEQ ID NO: 62783

SEQ ID NO: 69452 - protein, 689 aa, Streptococcus pneumoniae; identical to SEQ ID NO: 62612

SEQ ID NO: 69453 - protein, 605 aa, Streptococcus pneumoniae; identical to SEQ ID NO: 69431

SEQ ID NO: 69454 - protein, 689 aa, Streptococcus pneumoniae; identical to SEQ ID NO: 62612

SEQ ID NO: 69455 - protein, 605 aa, Streptococcus pneumoniae; identical to SEQ ID NO: 69431

SEQ ID NO: 69456 - protein, 689 aa, Streptococcus pneumoniae; identical to SEQ ID NO: 62612

SEQ ID NO: 69457 - protein, 605 aa, Streptococcus pneumoniae; identical to SEQ ID NO: 62783

SEQ ID NO: 69458 - protein, 689 aa, Streptococcus pneumoniae; identical to SEQ ID NO: 62612

SEQ ID NO: 69459 - protein, 605 aa, Streptococcus pneumoniae; identical to SEQ ID NO: 62783

SEQ ID NO: 69460 - protein, 689 aa, Streptococcus pneumoniae; identical to SEQ ID NO: 62612

SEQ ID NO: 69461 - protein, 605 aa, Streptococcus pneumoniae; identical to SEQ ID NO: 62613

SEQ ID NO: 69462 - protein, 689 aa, Streptococcus pneumoniae; identical to SEQ ID NO: 62612

SEQ ID NO: 69463 - protein, 605 aa, Streptococcus pneumoniae; identical to SEQ ID NO: 62613

SEQ ID NO: 69464 - protein, 695 aa, Streptococcus pneumoniae; identical to SEQ ID NO: 64780

SEQ ID NO: 69465 - protein, 605 aa, Streptococcus pneumoniae; identical to SEQ ID NO: 66879

SEQ ID NO: 69466 - protein, 699 aa, Streptococcus pneumoniae; identical to SEQ ID NO: 66962

SEQ ID NO: 69467 - protein, 605 aa, Streptococcus pneumoniae; identical to SEQ ID NO: 66963

SEQ ID NO: 69468 - protein, 695 aa, Streptococcus pneumoniae; identical to SEQ ID NO: 64780

SEQ ID NO: 69469 - protein, 605 aa, Streptococcus pneumoniae; identical to SEQ ID NO: 64781

SEQ ID NO: 69470 - protein, 689 aa, Streptococcus pneumoniae; identical to SEQ ID NO: 62612

SEQ ID NO: 69471 - protein, 605 aa, Streptococcus pneumoniae; identical to SEQ ID NO: 62613

SEQ ID NO: 69472 - protein, 699 aa, Streptococcus pneumoniae; identical to SEQ ID NO: 64132

SEQ ID NO: 69473 - protein, 605 aa, Streptococcus pneumoniae; identical to SEQ ID NO: 64133

SEQ ID NO: 69474 - protein, 699 aa, Streptococcus pneumoniae; identical to SEQ ID NO: 64132

SEQ ID NO: 69475 - protein, 605 aa, Streptococcus pneumoniae; identical to SEQ ID NO: 64133

SEQ ID NO: 69476 - protein, 699 aa, Streptococcus pneumoniae; identical to SEQ ID NO: 64132

SEQ ID NO: 69477 - protein, 605 aa, Streptococcus pneumoniae; identical to SEQ ID NO: 64133

SEQ ID NO: 69478 - protein, 585 aa, Streptococcus pneumoniae
MEFKKLVIENFRNFSSIEVALSNKNVIFGMNDSGKTNLLFAIRYLLDRTIRNKGFIKSDYHRHDTSRPIKIQLELDLSDRKMEGDEESLKSSHSRLLISTVAGARNNSSLDTFFISLEAVYNEKELFGNPVLSWGSTLDNLVEVPQYGTRSDIDKIFQIVYVNPAIELDSFFKRNRRILFSDDSKTDEDVKLEEEIENNIEKLNENISNLHLITSVQSQLTEAYKSYRKENLEIKIQSEISISGYLDNLTPYINWNDDTHNYPTSGDGRKKLLSYAINHLISEKQYNKKVIIYLIEEPENSLHRSVQISLSKQLFVQNIYEYFFLTTHSAEVLYEMDNTQLIKITNQQDATGQSVYYTVPNEFSNLKKKLNKSLAQSIFYDRILLVEGPSEYYLFSAIFEYVSPNFETDGKYLLQVDGINFKPYSELYKALGIDFWIKTDNDLKASRGDKHVFSPIGLNRCIDLLDHSATPILDNYRIDFSSKDERKQNIKSKKEELYLTNHNLVLQLNADGIFISEIDLENDLAQVLSDSERNEMSKLDFVNWLQSSKQYNMLEYISNHLTKEIALKIVESGYFKVLAEFLDYE

SEQ ID NO: 69479 - protein, 512 aa, Streptococcus pneumoniae; identical to SEQ ID NO: 62977

SEQ ID NO: 69480 - protein, 695 aa, Streptococcus pneumoniae; identical to SEQ ID NO: 64780

SEQ ID NO: 69481 - protein, 605 aa, Streptococcus pneumoniae; identical to SEQ ID NO: 64781

SEQ ID NO: 69482 - protein, 695 aa, Streptococcus pneumoniae; identical to SEQ ID NO: 64780

SEQ ID NO: 69483 - protein, 605 aa, Streptococcus pneumoniae; identical to SEQ ID NO: 64781

SEQ ID NO: 69484 - protein, 689 aa, Streptococcus pneumoniae; identical to SEQ ID NO: 62612

SEQ ID NO: 69485 - protein, 605 aa, Streptococcus pneumoniae; identical to SEQ ID NO: 62613

SEQ ID NO: 69486 - protein, 695 aa, Streptococcus pneumoniae; identical to SEQ ID NO: 64780

SEQ ID NO: 69487 - protein, 605 aa, Streptococcus pneumoniae; identical to SEQ ID NO: 64781

SEQ ID NO: 69488 - protein, 695 aa, Streptococcus pneumoniae; identical to SEQ ID NO: 64780

SEQ ID NO: 69489 - protein, 605 aa, Streptococcus pneumoniae; identical to SEQ ID NO: 66879

SEQ ID NO: 69490 - protein, 695 aa, Streptococcus pneumoniae; identical to SEQ ID NO: 64780

SEQ ID NO: 69491 - protein, 605 aa, Streptococcus pneumoniae; identical to SEQ ID NO: 64781

SEQ ID NO: 69492 - protein, 699 aa, Streptococcus pneumoniae; identical to SEQ ID NO: 64132

SEQ ID NO: 69493 - protein, 605 aa, Streptococcus pneumoniae
MVKSEEWFPKGDIILEETALGAVKDVTNCLVIAGPGAGKTELLAQKLDYLFSTNKCVSPKKILALSFKTDAASNLKERVKKRYGDEYASRFTSLTYSAFEKRILDQFRDVLPEDIRPSRDYLIEDWDTIKELLSMNGINVNGRRMSDIRNFVENIILNDGNTHKFKKNLLKGTQDNKPVLLYSQITKLSTQIIATNEYIRKALQLTYDFVFLDEFQDTTYAQYSLLKTCFLGSSCKLTAVGDDKKAIMRWAGAKPDIFPDYIRDFNSNEYQLLMNHRSVPKLVEFQKEVHQILNSNHSSIQTNNYPEFQEGEITLFEFENESLEAKLIANDIESKIQGGIRPSEICILAKQKVGIYSFELISILNGKGIKARIENEYQDILKDPTCNLLLDLISCSQGKRDPLIWENISNFYGNINGIDELTDELILAKSYKEIDNIVSDITYLISNPIPDKDRMLNLINCIIEKIGDKRIISNFPMYNGKNDLLITINKFSKLLYEEYSQSQGAWIDIISNFKGENSISIMTIHKSKGLEYEAVYFLGLEDSAFWSFNDQPEEDKSAFFVALSRAKSHLIFTYCKLRNNSPQNNRNINEIYSLLTQSNLVDVIN

SEQ ID NO: 69494 - protein, 695 aa, Streptococcus pneumoniae; identical to SEQ ID NO: 64780

SEQ ID NO: 69495 - protein, 605 aa, Streptococcus pneumoniae; identical to SEQ ID NO: 64781

SEQ ID NO: 69496 - protein, 695 aa, Streptococcus pneumoniae; identical to SEQ ID NO: 64780

SEQ ID NO: 69497 - protein, 605 aa, Streptococcus pneumoniae; identical to SEQ ID NO: 64781

SEQ ID NO: 69498 - protein, 695 aa, Streptococcus pneumoniae; identical to SEQ ID NO: 64780

SEQ ID NO: 69499 - protein, 605 aa, Streptococcus pneumoniae; identical to SEQ ID NO: 66879

SEQ ID NO: 69500 - protein, 695 aa, Streptococcus pneumoniae; identical to SEQ ID NO: 64780

SEQ ID NO: 69501 - protein, 605 aa, Streptococcus pneumoniae; identical to SEQ ID NO: 66879

SEQ ID NO: 69502 - protein, 695 aa, Streptococcus pneumoniae; identical to SEQ ID NO: 64780

SEQ ID NO: 69503 - protein, 605 aa, Streptococcus pneumoniae; identical to SEQ ID NO: 66879

SEQ ID NO: 69504 - protein, 695 aa, Streptococcus pneumoniae; identical to SEQ ID NO: 64780

SEQ ID NO: 69505 - protein, 605 aa, Streptococcus pneumoniae; identical to SEQ ID NO: 64781

SEQ ID NO: 69506 - protein, 695 aa, Streptococcus pneumoniae; identical to SEQ ID NO: 64780

SEQ ID NO: 69507 - protein, 605 aa, Streptococcus pneumoniae; identical to SEQ ID NO: 64781

SEQ ID NO: 69508 - protein, 699 aa, Streptococcus pneumoniae; identical to SEQ ID NO: 64132

SEQ ID NO: 69509 - protein, 605 aa, Streptococcus pneumoniae; identical to SEQ ID NO: 64133

SEQ ID NO: 69510 - protein, 695 aa, Streptococcus pneumoniae; identical to SEQ ID NO: 64780

SEQ ID NO: 69511 - protein, 605 aa, Streptococcus pneumoniae; identical to SEQ ID NO: 66879

SEQ ID NO: 69512 - protein, 695 aa, Streptococcus pneumoniae; identical to SEQ ID NO: 64780

SEQ ID NO: 69513 - protein, 605 aa, Streptococcus pneumoniae; identical to SEQ ID NO: 66879

SEQ ID NO: 69514 - protein, 695 aa, Streptococcus pneumoniae; identical to SEQ ID NO: 64780

SEQ ID NO: 69515 - protein, 605 aa, Streptococcus pneumoniae; identical to SEQ ID NO: 66879

SEQ ID NO: 69516 - protein, 695 aa, Streptococcus pneumoniae; identical to SEQ ID NO: 64780

SEQ ID NO: 69517 - protein, 605 aa, Streptococcus pneumoniae; identical to SEQ ID NO: 64781

SEQ ID NO: 69518 - protein, 695 aa, Streptococcus pneumoniae; identical to SEQ ID NO: 64780

SEQ ID NO: 69519 - protein, 605 aa, Streptococcus pneumoniae; identical to SEQ ID NO: 64781

SEQ ID NO: 69520 - protein, 699 aa, Streptococcus pneumoniae; identical to SEQ ID NO: 64132

SEQ ID NO: 69521 - protein, 605 aa, Streptococcus pneumoniae; identical to SEQ ID NO: 64133

SEQ ID NO: 69522 - protein, 695 aa, Streptococcus pneumoniae; identical to SEQ ID NO: 64780

SEQ ID NO: 69523 - protein, 605 aa, Streptococcus pneumoniae; identical to SEQ ID NO: 64781

SEQ ID NO: 69524 - protein, 695 aa, Streptococcus pneumoniae; identical to SEQ ID NO: 64780

SEQ ID NO: 69525 - protein, 605 aa, Streptococcus pneumoniae; identical to SEQ ID NO: 64781

SEQ ID NO: 69526 - protein, 695 aa, Streptococcus pneumoniae; identical to SEQ ID NO: 64780

SEQ ID NO: 69527 - protein, 605 aa, Streptococcus pneumoniae; identical to SEQ ID NO: 66879

SEQ ID NO: 69528 - protein, 699 aa, Streptococcus pneumoniae; identical to SEQ ID NO: 64132

SEQ ID NO: 69529 - protein, 605 aa, Streptococcus pneumoniae; identical to SEQ ID NO: 64133

SEQ ID NO: 69530 - protein, 695 aa, Streptococcus pneumoniae; identical to SEQ ID NO: 64780

SEQ ID NO: 69531 - protein, 605 aa, Streptococcus pneumoniae; identical to SEQ ID NO: 66879

SEQ ID NO: 69532 - protein, 695 aa, Streptococcus pneumoniae; identical to SEQ ID NO: 64780

SEQ ID NO: 69533 - protein, 605 aa, Streptococcus pneumoniae; identical to SEQ ID NO: 66879

SEQ ID NO: 69534 - protein, 695 aa, Streptococcus pneumoniae; identical to SEQ ID NO: 64780

SEQ ID NO: 69535 - protein, 605 aa, Streptococcus pneumoniae; identical to SEQ ID NO: 64781

SEQ ID NO: 69536 - protein, 695 aa, Streptococcus pneumoniae; identical to SEQ ID NO: 64780

SEQ ID NO: 69537 - protein, 605 aa, Streptococcus pneumoniae; identical to SEQ ID NO: 64781

SEQ ID NO: 69538 - protein, 699 aa, Streptococcus pneumoniae; identical to SEQ ID NO: 64132

SEQ ID NO: 69539 - protein, 605 aa, Streptococcus pneumoniae; identical to SEQ ID NO: 64133

SEQ ID NO: 69540 - protein, 695 aa, Streptococcus pneumoniae; identical to SEQ ID NO: 64780

SEQ ID NO: 69541 - protein, 605 aa, Streptococcus pneumoniae; identical to SEQ ID NO: 66879

SEQ ID NO: 69542 - protein, 689 aa, Streptococcus pneumoniae; identical to SEQ ID NO: 67080

SEQ ID NO: 69543 - protein, 605 aa, Streptococcus pneumoniae; identical to SEQ ID NO: 67081

SEQ ID NO: 69544 - protein, 695 aa, Streptococcus pneumoniae; identical to SEQ ID NO: 64780

SEQ ID NO: 69545 - protein, 605 aa, Streptococcus pneumoniae; identical to SEQ ID NO: 66879

SEQ ID NO: 69546 - protein, 695 aa, Streptococcus pneumoniae; identical to SEQ ID NO: 64780

SEQ ID NO: 69547 - protein, 605 aa, Streptococcus pneumoniae; identical to SEQ ID NO: 66879

SEQ ID NO: 69548 - protein, 695 aa, Streptococcus pneumoniae; identical to SEQ ID NO: 64780

SEQ ID NO: 69549 - protein, 605 aa, Streptococcus pneumoniae; identical to SEQ ID NO: 64781

SEQ ID NO: 69550 - protein, 689 aa, Streptococcus pneumoniae; identical to SEQ ID NO: 67080

SEQ ID NO: 69551 - protein, 605 aa, Streptococcus pneumoniae; identical to SEQ ID NO: 67081

SEQ ID NO: 69552 - protein, 689 aa, Streptococcus pneumoniae; identical to SEQ ID NO: 62612

SEQ ID NO: 69553 - protein, 605 aa, Streptococcus pneumoniae; identical to SEQ ID NO: 62613

SEQ ID NO: 69554 - protein, 695 aa, Streptococcus pneumoniae; identical to SEQ ID NO: 64780

SEQ ID NO: 69555 - protein, 605 aa, Streptococcus pneumoniae; identical to SEQ ID NO: 66879

SEQ ID NO: 69556 - protein, 695 aa, Streptococcus pneumoniae; identical to SEQ ID NO: 64780

SEQ ID NO: 69557 - protein, 605 aa, Streptococcus pneumoniae; identical to SEQ ID NO: 64781

SEQ ID NO: 69558 - protein, 695 aa, Streptococcus pneumoniae; identical to SEQ ID NO: 64780

SEQ ID NO: 69559 - protein, 605 aa, Streptococcus pneumoniae; identical to SEQ ID NO: 64781

SEQ ID NO: 69560 - protein, 695 aa, Streptococcus pneumoniae; identical to SEQ ID NO: 64780

SEQ ID NO: 69561 - protein, 605 aa, Streptococcus pneumoniae; identical to SEQ ID NO: 64781

SEQ ID NO: 69562 - protein, 689 aa, Streptococcus pneumoniae; identical to SEQ ID NO: 62612

SEQ ID NO: 69563 - protein, 605 aa, Streptococcus pneumoniae; identical to SEQ ID NO: 62613

SEQ ID NO: 69564 - protein, 695 aa, Streptococcus pneumoniae; identical to SEQ ID NO: 64780

SEQ ID NO: 69565 - protein, 605 aa, Streptococcus pneumoniae; identical to SEQ ID NO: 66879

SEQ ID NO: 69566 - protein, 699 aa, Streptococcus pneumoniae; identical to SEQ ID NO: 64132

SEQ ID NO: 69567 - protein, 605 aa, Streptococcus pneumoniae; identical to SEQ ID NO: 64133

SEQ ID NO: 69568 - protein, 695 aa, Streptococcus pneumoniae; identical to SEQ ID NO: 64780

SEQ ID NO: 69569 - protein, 605 aa, Streptococcus pneumoniae; identical to SEQ ID NO: 66879

SEQ ID NO: 69570 - protein, 699 aa, Streptococcus pneumoniae; identical to SEQ ID NO: 64132

SEQ ID NO: 69571 - protein, 605 aa, Streptococcus pneumoniae; identical to SEQ ID NO: 64133

SEQ ID NO: 69572 - protein, 695 aa, Streptococcus pneumoniae; identical to SEQ ID NO: 64780

SEQ ID NO: 69573 - protein, 605 aa, Streptococcus pneumoniae; identical to SEQ ID NO: 64781

SEQ ID NO: 69574 - protein, 695 aa, Streptococcus pneumoniae; identical to SEQ ID NO: 64780

SEQ ID NO: 69575 - protein, 605 aa, Streptococcus pneumoniae; identical to SEQ ID NO: 64781

SEQ ID NO: 69576 - protein, 695 aa, Streptococcus pneumoniae; identical to SEQ ID NO: 64780

SEQ ID NO: 69577 - protein, 605 aa, Streptococcus pneumoniae; identical to SEQ ID NO: 66879

SEQ ID NO: 69578 - protein, 591 aa, Streptococcus pneumoniae; identical to SEQ ID NO: 67480

SEQ ID NO: 69579 - protein, 505 aa, Streptococcus pneumoniae; identical to SEQ ID NO: 67481

SEQ ID NO: 69580 - protein, 689 aa, Streptococcus pneumoniae; identical to SEQ ID NO: 62612

SEQ ID NO: 69581 - protein, 605 aa, Streptococcus pneumoniae; identical to SEQ ID NO: 62613

SEQ ID NO: 69582 - protein, 695 aa, Streptococcus pneumoniae; identical to SEQ ID NO: 64780

SEQ ID NO: 69583 - protein, 605 aa, Streptococcus pneumoniae; identical to SEQ ID NO: 64781

SEQ ID NO: 69584 - protein, 695 aa, Streptococcus pneumoniae; identical to SEQ ID NO: 64780

SEQ ID NO: 69585 - protein, 605 aa, Streptococcus pneumoniae; identical to SEQ ID NO: 64781

SEQ ID NO: 69586 - protein, 699 aa, Streptococcus pneumoniae; identical to SEQ ID NO: 64132

SEQ ID NO: 69587 - protein, 605 aa, Streptococcus pneumoniae; identical to SEQ ID NO: 64133

SEQ ID NO: 69588 - protein, 689 aa, Streptococcus pneumoniae; identical to SEQ ID NO: 62612

SEQ ID NO: 69589 - protein, 605 aa, Streptococcus pneumoniae; identical to SEQ ID NO: 62783

SEQ ID NO: 69590 - protein, 699 aa, Streptococcus pneumoniae; identical to SEQ ID NO: 64132

SEQ ID NO: 69591 - protein, 605 aa, Streptococcus pneumoniae; identical to SEQ ID NO: 64133

SEQ ID NO: 69592 - protein, 695 aa, Streptococcus pneumoniae; identical to SEQ ID NO: 64780

SEQ ID NO: 69593 - protein, 605 aa, Streptococcus pneumoniae; identical to SEQ ID NO: 66879

SEQ ID NO: 69594 - protein, 695 aa, Streptococcus pneumoniae; identical to SEQ ID NO: 64780

SEQ ID NO: 69595 - protein, 605 aa, Streptococcus pneumoniae; identical to SEQ ID NO: 66879

SEQ ID NO: 69596 - protein, 699 aa, Streptococcus pneumoniae; identical to SEQ ID NO: 64132

SEQ ID NO: 69597 - protein, 605 aa, Streptococcus pneumoniae; identical to SEQ ID NO: 64133

SEQ ID NO: 69598 - protein, 689 aa, Streptococcus pneumoniae; identical to SEQ ID NO: 62612

SEQ ID NO: 69599 - protein, 605 aa, Streptococcus pneumoniae; identical to SEQ ID NO: 62783

SEQ ID NO: 69600 - protein, 695 aa, Streptococcus pneumoniae; identical to SEQ ID NO: 64780

SEQ ID NO: 69601 - protein, 605 aa, Streptococcus pneumoniae; identical to SEQ ID NO: 64781

SEQ ID NO: 69602 - protein, 699 aa, Streptococcus pneumoniae; identical to SEQ ID NO: 66962

SEQ ID NO: 69603 - protein, 605 aa, Streptococcus pneumoniae; identical to SEQ ID NO: 66963

SEQ ID NO: 69604 - protein, 689 aa, Streptococcus pneumoniae; identical to SEQ ID NO: 62612

SEQ ID NO: 69605 - protein, 605 aa, Streptococcus pneumoniae; identical to SEQ ID NO: 62613

SEQ ID NO: 69606 - protein, 699 aa, Streptococcus pneumoniae; identical to SEQ ID NO: 64132

SEQ ID NO: 69607 - protein, 605 aa, Streptococcus pneumoniae; identical to SEQ ID NO: 64133

SEQ ID NO: 69608 - protein, 695 aa, Streptococcus pneumoniae; identical to SEQ ID NO: 64780

SEQ ID NO: 69609 - protein, 605 aa, Streptococcus pneumoniae; identical to SEQ ID NO: 66879

SEQ ID NO: 69610 - protein, 699 aa, Streptococcus pneumoniae; identical to SEQ ID NO: 64132

SEQ ID NO: 69611 - protein, 605 aa, Streptococcus pneumoniae; identical to SEQ ID NO: 64133

SEQ ID NO: 69612 - protein, 689 aa, Streptococcus pneumoniae; identical to SEQ ID NO: 62612

SEQ ID NO: 69613 - protein, 605 aa, Streptococcus pneumoniae; identical to SEQ ID NO: 62783

SEQ ID NO: 69614 - protein, 695 aa, Streptococcus pneumoniae; identical to SEQ ID NO: 64780

SEQ ID NO: 69615 - protein, 605 aa, Streptococcus pneumoniae; identical to SEQ ID NO: 64781

SEQ ID NO: 69616 - protein, 695 aa, Streptococcus pneumoniae; identical to SEQ ID NO: 64780

SEQ ID NO: 69617 - protein, 605 aa, Streptococcus pneumoniae; identical to SEQ ID NO: 64781

SEQ ID NO: 69618 - protein, 695 aa, Streptococcus pneumoniae; identical to SEQ ID NO: 64780

SEQ ID NO: 69619 - protein, 605 aa, Streptococcus pneumoniae; identical to SEQ ID NO: 66879

SEQ ID NO: 69620 - protein, 699 aa, Streptococcus pneumoniae; identical to SEQ ID NO: 64132

SEQ ID NO: 69621 - protein, 605 aa, Streptococcus pneumoniae; identical to SEQ ID NO: 64133

SEQ ID NO: 69622 - protein, 695 aa, Streptococcus pneumoniae; identical to SEQ ID NO: 64780

SEQ ID NO: 69623 - protein, 605 aa, Streptococcus pneumoniae; identical to SEQ ID NO: 66879

SEQ ID NO: 69624 - protein, 689 aa, Streptococcus pneumoniae; identical to SEQ ID NO: 62612

SEQ ID NO: 69625 - protein, 605 aa, Streptococcus pneumoniae; identical to SEQ ID NO: 62783

SEQ ID NO: 69626 - protein, 689 aa, Streptococcus pneumoniae; identical to SEQ ID NO: 62612

SEQ ID NO: 69627 - protein, 605 aa, Streptococcus pneumoniae; identical to SEQ ID NO: 62783

SEQ ID NO: 69628 - protein, 689 aa, Streptococcus pneumoniae; identical to SEQ ID NO: 67080

SEQ ID NO: 69629 - protein, 605 aa, Streptococcus pneumoniae; identical to SEQ ID NO: 67081

SEQ ID NO: 69630 - protein, 699 aa, Streptococcus pneumoniae; identical to SEQ ID NO: 64132

SEQ ID NO: 69631 - protein, 605 aa, Streptococcus pneumoniae; identical to SEQ ID NO: 64133

SEQ ID NO: 69632 - protein, 689 aa, Streptococcus pneumoniae; identical to SEQ ID NO: 67080

SEQ ID NO: 69633 - protein, 605 aa, Streptococcus pneumoniae; identical to SEQ ID NO: 67081

SEQ ID NO: 69634 - protein, 689 aa, Streptococcus pneumoniae; identical to SEQ ID NO: 62612

SEQ ID NO: 69635 - protein, 605 aa, Streptococcus pneumoniae; identical to SEQ ID NO: 62613

SEQ ID NO: 69636 - protein, 695 aa, Streptococcus pneumoniae; identical to SEQ ID NO: 64780

SEQ ID NO: 69637 - protein, 605 aa, Streptococcus pneumoniae; identical to SEQ ID NO: 66879

SEQ ID NO: 69638 - protein, 689 aa, Streptococcus pneumoniae; identical to SEQ ID NO: 62612

SEQ ID NO: 69639 - protein, 605 aa, Streptococcus pneumoniae; identical to SEQ ID NO: 62613

SEQ ID NO: 69640 - protein, 699 aa, Streptococcus pneumoniae; identical to SEQ ID NO: 64132

SEQ ID NO: 69641 - protein, 605 aa, Streptococcus pneumoniae; identical to SEQ ID NO: 64133

SEQ ID NO: 69642 - protein, 689 aa, Streptococcus pneumoniae; identical to SEQ ID NO: 62612

SEQ ID NO: 69643 - protein, 605 aa, Streptococcus pneumoniae; identical to SEQ ID NO: 62613

SEQ ID NO: 69644 - protein, 695 aa, Streptococcus pneumoniae; identical to SEQ ID NO: 64780

SEQ ID NO: 69645 - protein, 605 aa, Streptococcus pneumoniae; identical to SEQ ID NO: 66879

SEQ ID NO: 69646 - protein, 699 aa, Streptococcus pneumoniae; identical to SEQ ID NO: 64132

SEQ ID NO: 69647 - protein, 605 aa, Streptococcus pneumoniae; identical to SEQ ID NO: 64133

SEQ ID NO: 69648 - protein, 699 aa, Streptococcus pneumoniae; identical to SEQ ID NO: 64132

SEQ ID NO: 69649 - protein, 605 aa, Streptococcus pneumoniae; identical to SEQ ID NO: 64133

SEQ ID NO: 69650 - protein, 689 aa, Streptococcus pneumoniae; identical to SEQ ID NO: 62612

SEQ ID NO: 69651 - protein, 605 aa, Streptococcus pneumoniae; identical to SEQ ID NO: 62613

SEQ ID NO: 69652 - protein, 699 aa, Streptococcus pneumoniae; identical to SEQ ID NO: 64132

SEQ ID NO: 69653 - protein, 605 aa, Streptococcus pneumoniae; identical to SEQ ID NO: 64133

SEQ ID NO: 69654 - protein, 689 aa, Streptococcus pneumoniae; identical to SEQ ID NO: 62612

SEQ ID NO: 69655 - protein, 605 aa, Streptococcus pneumoniae; identical to SEQ ID NO: 62613

SEQ ID NO: 69656 - protein, 689 aa, Streptococcus pneumoniae; identical to SEQ ID NO: 62612

SEQ ID NO: 69657 - protein, 605 aa, Streptococcus pneumoniae; identical to SEQ ID NO: 62783

SEQ ID NO: 69658 - protein, 689 aa, Streptococcus pneumoniae; identical to SEQ ID NO: 62612

SEQ ID NO: 69659 - protein, 605 aa, Streptococcus pneumoniae; identical to SEQ ID NO: 62613

SEQ ID NO: 69660 - protein, 689 aa, Streptococcus pneumoniae; identical to SEQ ID NO: 62612

SEQ ID NO: 69661 - protein, 605 aa, Streptococcus pneumoniae; identical to SEQ ID NO: 62613

SEQ ID NO: 69662 - protein, 699 aa, Streptococcus pneumoniae; identical to SEQ ID NO: 64132

SEQ ID NO: 69663 - protein, 605 aa, Streptococcus pneumoniae; identical to SEQ ID NO: 64133

SEQ ID NO: 69664 - protein, 689 aa, Streptococcus pneumoniae; identical to SEQ ID NO: 62612

SEQ ID NO: 69665 - protein, 605 aa, Streptococcus pneumoniae; identical to SEQ ID NO: 62783

SEQ ID NO: 69666 - protein, 689 aa, Streptococcus pneumoniae; identical to SEQ ID NO: 62612

SEQ ID NO: 69667 - protein, 605 aa, Streptococcus pneumoniae; identical to SEQ ID NO: 62613

SEQ ID NO: 69668 - protein, 689 aa, Streptococcus pneumoniae; identical to SEQ ID NO: 67080

SEQ ID NO: 69669 - protein, 605 aa, Streptococcus pneumoniae; identical to SEQ ID NO: 67081

SEQ ID NO: 69670 - protein, 699 aa, Streptococcus pneumoniae; identical to SEQ ID NO: 64132

SEQ ID NO: 69671 - protein, 605 aa, Streptococcus pneumoniae; identical to SEQ ID NO: 64133

SEQ ID NO: 69672 - protein, 689 aa, Streptococcus pneumoniae; identical to SEQ ID NO: 62612

SEQ ID NO: 69673 - protein, 605 aa, Streptococcus pneumoniae; identical to SEQ ID NO: 62783

SEQ ID NO: 69674 - protein, 689 aa, Streptococcus pneumoniae; identical to SEQ ID NO: 62612

SEQ ID NO: 69675 - protein, 605 aa, Streptococcus pneumoniae; identical to SEQ ID NO: 62613

SEQ ID NO: 69676 - protein, 689 aa, Streptococcus pneumoniae; identical to SEQ ID NO: 62612

SEQ ID NO: 69677 - protein, 605 aa, Streptococcus pneumoniae; identical to SEQ ID NO: 62613

SEQ ID NO: 69678 - protein, 699 aa, Streptococcus pneumoniae
MKLTKMVINNFKSFGECQAINFNNQTVLIGNNSSGKTTVLQALSKLFSDKQSDRIIRKSDFHLPKGLRPGENTRNLFIETIFEFDELDGTVYGPAIPTFFEHFTVSQDDPKPFLRIRLESSWEDDGTVEGSIDTQIYYISSDEDTIRDEDKHRAPRKDLDKIRVLYVPASRTPEKELGNASGSMLSRLVNSINWTEDEIKEIKDKIDELNNTFLSENGALTQINNEIQKSWELYHEDNRFSQAELIINSSEMAAALRQIALKFSPTTTEEAFTVSDLGDGLRSIFYFSLVDSILDIELEITKDREENPDNPRFKLVPPILTILAIEEPENHIAPHHIGKLIKRFKQLGNNDNSQLILTSHSPVIVKRIDPEDLRYLRIENNDSVLQTIVSDIQLPQSNDESYKYIKGAIQAYPELYFAKLVVLGEGDSEELLLPKFFDLLGLEIDSSQISVVPLGGRHVNYFWKLLNALRIPHITLLDFDNERYGGGWGRIQYAIKQLILNGVAKEKLVTVTAESQKSRVLDDDEIDKIKDWKIDRPDNQLLEGWIKMLEKFNVFFSAPLDIDFLMLQYYKEHYLETLSTNEGPVVSYTDENSDNKKIKLTKMDRTNDYQLIGFKNRISEAIQATLKDKSGPGDSFTEEEKELMIWYQYFFLGRGKPTTHMQFLSSISDDELTRNLPPVFKKIVNRAEELLGDIEHGKE

SEQ ID NO: 69679 - protein, 605 aa, Streptococcus pneumoniae; identical to SEQ ID NO: 64133

SEQ ID NO: 69680 - protein, 695 aa, Streptococcus pneumoniae; identical to SEQ ID NO: 64780

SEQ ID NO: 69681 - protein, 605 aa, Streptococcus pneumoniae; identical to SEQ ID NO: 64781

SEQ ID NO: 69682 - protein, 689 aa, Streptococcus pneumoniae; identical to SEQ ID NO: 62612

SEQ ID NO: 69683 - protein, 605 aa, Streptococcus pneumoniae; identical to SEQ ID NO: 62783

SEQ ID NO: 69684 - protein, 699 aa, Streptococcus pneumoniae; identical to SEQ ID NO: 64132

SEQ ID NO: 69685 - protein, 605 aa, Streptococcus pneumoniae; identical to SEQ ID NO: 64133

SEQ ID NO: 69686 - protein, 689 aa, Streptococcus pneumoniae; identical to SEQ ID NO: 62612

SEQ ID NO: 69687 - protein, 605 aa, Streptococcus pneumoniae; identical to SEQ ID NO: 62613

SEQ ID NO: 69688 - protein, 689 aa, Streptococcus pneumoniae; identical to SEQ ID NO: 62612

SEQ ID NO: 69689 - protein, 605 aa, Streptococcus pneumoniae; identical to SEQ ID NO: 62613

SEQ ID NO: 69690 - protein, 695 aa, Streptococcus pneumoniae; identical to SEQ ID NO: 64780

SEQ ID NO: 69691 - protein, 605 aa, Streptococcus pneumoniae; identical to SEQ ID NO: 64781

SEQ ID NO: 69692 - protein, 695 aa, Streptococcus pneumoniae; identical to SEQ ID NO: 64780

SEQ ID NO: 69693 - protein, 605 aa, Streptococcus pneumoniae; identical to SEQ ID NO: 66879

SEQ ID NO: 69694 - protein, 695 aa, Streptococcus pneumoniae; identical to SEQ ID NO: 64780

SEQ ID NO: 69695 - protein, 605 aa, Streptococcus pneumoniae; identical to SEQ ID NO: 66879

SEQ ID NO: 69696 - protein, 699 aa, Streptococcus pneumoniae; identical to SEQ ID NO: 64132

SEQ ID NO: 69697 - protein, 605 aa, Streptococcus pneumoniae; identical to SEQ ID NO: 64133

SEQ ID NO: 69698 - protein, 695 aa, Streptococcus pneumoniae; identical to SEQ ID NO: 64780

SEQ ID NO: 69699 - protein, 605 aa, Streptococcus pneumoniae; identical to SEQ ID NO: 64781

SEQ ID NO: 69700 - protein, 695 aa, Streptococcus pneumoniae; identical to SEQ ID NO: 64780

SEQ ID NO: 69701 - protein, 605 aa, Streptococcus pneumoniae; identical to SEQ ID NO: 64781

SEQ ID NO: 69702 - protein, 746 aa, Streptococcus agalactiae; identical to SEQ ID NO: 63142

SEQ ID NO: 69703 - protein, 672 aa, Streptococcus agalactiae; identical to SEQ ID NO: 63143

SEQ ID NO: 69704 - protein, 696 aa, Streptococcus agalactiae
MILKKMKVKNFRLLKDFELDFKDELSLVIGKNNCGKTSALVILDKMLNSSKVMWEDINLECQKELYKKIIDFDISEQARVASLETVNLQLFIEYDDNDSYANIQKFMMDLNPENNIIVLEFISLIAAKKIIELKNIISEKNIKDFKSFSKFMSKNFANFFETKKYSRGFDVEANKITQDRSEEIDNKDIQKVIKVAGIRADRAVSNDDRNHVLSGLTGKYFSSYKAAKDESESVFTRLEEKLEEADKELYKIYNGEENEGEEPIDGIFSDVIDVIKTYGGAENGIDIEIESSISEKNLLSDNTNLSYRQGGDCSLPETYNGLGYLNLIGILFEIETKIQELFEQPADINLLYIEEPEAHTHPQLQYIFIRNIKSHIKAHRKKLLEDKNKQLQILITSHSSHIVSECNFDDIIYLKKNGNTVIAKSFNSLKEEYGGDEQKGFKFVKQYLTMNRSELFFADKAICIEGDTERILMPMMMHKIDNKEKPEGDIIPLLSQNISIIEVGAHSHIFMPLFSFLGTKVLFVTDIDSVKAEKKIDKNGKERTVYTSCHPDEGTHTSNASIKEFFKDTGIDTSNNQFKELVGKNAEDKIKDNMRIAYQIPESDGEYQASSFEDAFIALNKDFILKNKEGFYQYGALKDFAADEIESGDYYKFALDNVKKKSAFASSLLYFNKEDGNEDEKWKVPHYIEEGLLWIQ

SEQ ID NO: 69705 - protein, 635 aa, Streptococcus agalactiae
MDTVTLEKEVLEALQCIKNGENFILEGGAGSGKTYSLISLINALTEELPDIKIVCITYTNNAVAEILSRIENENLWVSTIHEFIWALIRKYQNEIKDILVELINDDNEKNFKKPKDFSEDLISKEYFENLYVDYDEYYSVTPNDENRVKISHDHILIVAEKMFEKYKKIADILKDIADCIFVDEYQDTSPLVADILLKHLEQSDKKNVIGFFGDSMQSIYDDGVGNLNQYNLTKIVKTQNRRNPRVVIEVANKFRDDDIEQRPSEDTNAPNMENGTIREGSIKFLYGNETDDFISIKEKNIFESWNFSDGKQTKELRLTHKYNAEMAGFKDLYDLYNADLIITLISKIKEKIDKGNLDSDKTLGELALKVKPTYKKVELLDQINGNEIYKSIYSVLEGMSWEEACKKCRVTKESLMSYKLNGISGRYEANSYRDRILRRLDILEEIIELYEANKFNDFLRITKFSIRNRNDKICLKEAIDYLVSEDNPTIEDILKFAEVKGLLKEDELFSDYILNKGFYLWERIKNITFNQYRKSILYLKEFSPICTQHSVKGSEYDNVLLVLESDWNKYDFNTLFGKGSSNSNVQLRTKKLFYVCITRAKKNLIIYMPTNDSDILRKAKDFFGEENVMDISSIE

SEQ ID NO: 69706 - protein, 641 aa, Salmonella enterica; identical to SEQ ID NO: 62984
  subsp. enterica serovar Typhimurium str. DT104

SEQ ID NO: 69707 - protein, 553 aa, Salmonella enterica; identical to SEQ ID NO: 62985
  subsp. enterica serovar Typhimurium str. DT104

SEQ ID NO: 69708 - protein, 641 aa, Salmonella enterica; identical to SEQ ID NO: 62984
  subsp. enterica serovar Typhimurium str. DT104

SEQ ID NO: 69709 - protein, 553 aa, Salmonella enterica; identical to SEQ ID NO: 62985
  subsp. enterica serovar Typhimurium str. DT104

SEQ ID NO: 69710 - protein, 641 aa, Salmonella enterica; identical to SEQ ID NO: 62984
  subsp. enterica serovar Typhimurium str. DT104

SEQ ID NO: 69711 - protein, 553 aa, Salmonella enterica; identical to SEQ ID NO: 62985
  subsp. enterica serovar Typhimurium str. DT104

SEQ ID NO: 69712 - protein, 641 aa, Salmonella enterica; identical to SEQ ID NO: 62984
  subsp. enterica serovar Typhimurium str. DT104

SEQ ID NO: 69713 - protein, 553 aa, Salmonella enterica; identical to SEQ ID NO: 62985
  subsp. enterica serovar Typhimurium str. DT104

SEQ ID NO: 69714 - protein, 641 aa, Salmonella enterica; identical to SEQ ID NO: 62984
  subsp. enterica serovar Typhimurium str. DT104

SEQ ID NO: 69715 - protein, 553 aa, Salmonella enterica; identical to SEQ ID NO: 62985
  subsp. enterica serovar Typhimurium str. DT104

SEQ ID NO: 69716 - protein, 641 aa, Salmonella enterica; identical to SEQ ID NO: 62984
  subsp. enterica serovar Typhimurium str. DT104

SEQ ID NO: 69717 - protein, 553 aa, Salmonella enterica; identical to SEQ ID NO: 62985
  subsp. enterica serovar Typhimurium str. DT104

SEQ ID NO: 69718 - protein, 641 aa, Salmonella enterica; identical to SEQ ID NO: 62984
  subsp. enterica serovar Typhimurium str. DT104

SEQ ID NO: 69719 - protein, 553 aa, Salmonella enterica; identical to SEQ ID NO: 62985
  subsp. enterica serovar Typhimurium str. DT104

SEQ ID NO: 69720 - protein, 641 aa, Salmonella enterica; identical to SEQ ID NO: 62984
  subsp. enterica serovar Typhimurium str. DT104

SEQ ID NO: 69721 - protein, 553 aa, Salmonella enterica; identical to SEQ ID NO: 62985
  subsp. enterica serovar Typhimurium str. DT104

SEQ ID NO: 69722 - protein, 729 aa, Staphylococcus aureus; identical to SEQ ID NO: 62500

SEQ ID NO: 69723 - protein, 597 aa, Staphylococcus aureus; identical to SEQ ID NO: 66639

SEQ ID NO: 69724 - protein, 729 aa, Staphylococcus aureus; identical to SEQ ID NO: 62500

SEQ ID NO: 69725 - protein, 597 aa, Staphylococcus aureus; identical to SEQ ID NO: 66639

SEQ ID NO: 69726 - protein, 729 aa, Staphylococcus aureus; identical to SEQ ID NO: 62500

SEQ ID NO: 69727 - protein, 597 aa, Staphylococcus aureus; identical to SEQ ID NO: 66639

SEQ ID NO: 69728 - protein, 729 aa, Staphylococcus aureus; identical to SEQ ID NO: 62500

SEQ ID NO: 69729 - protein, 597 aa, Staphylococcus aureus; identical to SEQ ID NO: 66639

SEQ ID NO: 69730 - protein, 729 aa, Staphylococcus aureus; identical to SEQ ID NO: 62500

SEQ ID NO: 69731 - protein, 597 aa, Staphylococcus aureus; identical to SEQ ID NO: 66639

SEQ ID NO: 69732 - protein, 729 aa, Staphylococcus aureus; identical to SEQ ID NO: 62500

SEQ ID NO: 69733 - protein, 597 aa, Staphylococcus aureus; identical to SEQ ID NO: 66639

SEQ ID NO: 69734 - protein, 729 aa, Staphylococcus aureus; identical to SEQ ID NO: 62500

SEQ ID NO: 69735 - protein, 597 aa, Staphylococcus aureus; identical to SEQ ID NO: 66639

SEQ ID NO: 69736 - protein, 729 aa, Staphylococcus aureus; identical to SEQ ID NO: 62500

SEQ ID NO: 69737 - protein, 597 aa, Staphylococcus aureus; identical to SEQ ID NO: 66639

SEQ ID NO: 69738 - protein, 729 aa, Staphylococcus aureus; identical to SEQ ID NO: 62500

SEQ ID NO: 69739 - protein, 597 aa, Staphylococcus aureus; identical to SEQ ID NO: 66639

SEQ ID NO: 69740 - protein, 607 aa, Salmonella enterica subsp. enterica serovar Typhi; identical to SEQ ID NO: 62590

SEQ ID NO: 69741 - protein, 630 aa, Salmonella enterica subsp. enterica serovar Typhi; identical to SEQ ID NO: 62591

SEQ ID NO: 69742 - protein, 607 aa, Salmonella enterica subsp. enterica serovar Typhi; identical to SEQ ID NO: 66932

SEQ ID NO: 69743 - protein, 630 aa, Salmonella enterica subsp. enterica serovar Typhi; identical to SEQ ID NO: 66933

SEQ ID NO: 69744 - protein, 741 aa, Vibrio crassostreae; identical to SEQ ID NO: 66808

SEQ ID NO: 69745 - protein, 619 aa, Vibrio crassostreae; identical to SEQ ID NO: 66809

SEQ ID NO: 69746 - protein, 706 aa, Novosphingobium sp. KN65.2
MLIEKIQVQGFRLLEDVELLLEPTATVIVGRNNSGKTSLTEIFDRLAGEHGPKFRLEDFSAGTRGKFLEAKAKRDAGGNPEEVLALLPAIAVTLTFKYDPSVGELGPLAPFVIDLDLSCSTAVARIEYGASSASLATLFDVQEAEAGSDAVAHFYRQLRETLPRAYRISVTAIDPTDPTNFRVLDGTGALSALVQCGFVRAQRTLDSSKASDTAVIGRLLGTLFQTASSMTAAESDQALAAALKTSVSQIEQSIQNDFDTMVKDLLPALSAFGFPGLNDAELRPETSLNVETLLSDHTKIFYTGQHGVHLPEGYNGLGTRNLIYMLLQLETFHKAYRARSIRPGTHLVFIEEPEAHLHPQMQEVLIAQLNAAVAALSAKYVGEPVWQVQFVISTHSPHVANAASFEAVRYFLSSTQDATGVRRTKVKDFRKGSVAIPPQDREFLHQYMTLTQCDLYFADKAILVEGTTERILMPRIVRLVDEWLAPERKLGRQYITTIEVGGAYAHIFYPLLDFLELKSLIITDIDAVRIDKTKDKPRAVKCPCAEGEHSSNAAIRNWFSVPKGQQISIEALCAKTPADKLSRYRSIAYQVPEDGSSWCGRSYEDALILANPERFGLPEEGDRGLLAWEMAQDLSKSETALRFAIQEADWAVPKYIKQGLTWLSEPPPPPESPPSLAGVGAGAPTIAAGSNDSPAEPESSAPQYDL

SEQ ID NO: 69747 - protein, 571 aa, Novosphingobium sp. KN65.2
MTNPAVEAAKEAQKRVDACLDEGRNFRLEAGAGAGKTYSLVEVLKKLINERGRDLQRAGQKVACITYTEVAREEIAQEIEQHPAILVETIHAFCWGFMSKFQKDLRALVAGMEDKQDKIAEAGGIADQVVEYQLGFFGIDEKRITLHHDDVPRFMAQLLGKPKFRSLFAATYPVIFVDEYQDTDPHFMAALAEHFLATGTGPRIGFFGDHWQTIYRSDYGLANYPSLEPIDKGSNFRSVPAVVNVLNALRPELKQAVKDPDAKGEARFFHANSYTGERTSSSSSKNDTPPEVSRDFMAKLTERLKEDGWDLSSEKTKILMLTHNAIAAERGYPTIAKAYRYNDSFAKKEDPLIAFLVDTVEPMCRAFTEKRFGDMFKILGSRPKLSAHEDKVAWATDMAALADARANGSIGDVVDLLKGTGRPRLPDRIVRREQELAAAENGAELPRLLQEHGLVREAPYQELVRLAEFIEGQTPFATQHSVKGAEFDNVIVVLGGGWNHYNWPQLLELLSTGAITAKNEKGYYRARNLFYVAVSRPKRKLAVLATQTLSPTALQSAEKLFGAGNVVALTL

SEQ ID NO: 69748 - protein, 685 aa, Clostridium sordellii
MFLSQLKIWNFRKYGTKENGDAGMEVSFNNRLNLIVGENDSGKTAIIDAIKLVLGTQSYDNIRLEENDFYRKKDGIRTDSLKIECTFENLSDLEAGRFLEWIYIDDEGRAKLEVRLIARMKDNKITIRKTGGKEGVDINFEASENLRVTYLKPLRDAEHELNPGYRSRFAQVLKSHPIFKNNGDTHKIEEIMKGANENIEEYFKGSRPKENNKDAESDLSEENNVDINYKEDPSSIINSISYTLSKFLGNNKGQYDVNINISEMELNKILSRLMLKIDEDKVGLGTLNQLYMAMELLLLDIKEKNNEFGLALIEEIEAHIHPQAQLRVIKHLEENIKSQTILTTHSITLASIANLNSLILCRNNSSYSLNNKYTRLSSGDYEFLERFLDSTKANLFFAKGVIMVEGDAENILIPTIAKIIGKPLYMHGVSIVNVGNVAFLRYSNIFISKEEEKTIGIPTSIVTDLDVRPIQYYQDEDNKSSLKKYTVYRIKSSNEHFIKEDDSRKRVREILDKKQLRNDDFEENVEIIEDDYDKYKEVVKEEKEEKYNLDDIKVFTNNWTMEFDLALSCIREYVYAAVLIAKDIKSNEGIIDSIDIEKYINDSKEEINQFIADDKNDMDIAYQIYKPLLKGNASKAVCAQYLSKVLLNKSEEDKELDIKIKSDKYIKYILDAIYHVTNSKREVIE

SEQ ID NO: 69749 - protein, 645 aa, Clostridium sordellii
MSNIEITDNDIRYAEEILFGKTNIFDEERIPIIEDFNKSFDVNACPGSGKSTVLLAKLIILSRKMPLNNGQGICVLTHTNVAIDEIKSKLGDKSDILFKYPNYFGTIQNFVDKYLAMPYFKRKYNENIKSIDNDIYYDHLRKLSKNKYSDIDSSIQKSIERGYYADESHEKNFVTFIDSKHFDVDSEEIKGNNNRLLSDWDFYKDLKKVMMHESLEKGILRYEDAYFLAGVYLKRFPGLENYFSKRFRYVFIDEMQDVNEIQIKILEKIFNDDVIIQRFGDINQVINNFSSTNTWIFNKDIRAINSSKRYGNEIIKFLEPLRVKKLGNMKGNDEINTLNPHIIIFNSSTIHTVVPKYMEILSKYDIKEDENKKIKIIGKVGTKVSDKYISISSYIKGYNTKGNKHVALNKKIIKKLNEISNPKEFYEYLMSVILLAINDNNKKVSKEALIRLMEDKYMSEFITYRANILDWIKNFNEDTNSVLEDILIKTEELFDCVKELNYNSDILKTKISISDGTESTIHEEIKDNKEIINIDNVNTISGTKGETHKATLYLESKLIFNSGKDISDISRILDYMVNKKEEVDDSDKEALMNAYVAMSRAERLTCIAIQYDTIKGKIKDFKEYGYEIIGCNTDMDVLIDKELKK

SEQ ID NO: 69750 - protein, 587 aa, Clostridium sordellii
MKLKSLAIENFRNFDNIKINLTNQNVVFGMNDVGKTNLLFAIRFLLDRDIRKNGFKETDYFKNNTNRVIRITLGIDLSDRLESEDSQHIIAKVGGARSSKSLDDFFLQVEGIYDKSEEIGIPKIYWGSNLENLYEINQNGIYSNLDNLFKIVYVDPTIDLEKTFSKNRNKLFNQNKLDENDIQISNDIKTLGIEMNKKISNMGVIQSFQKTITDEYKKLKKEKINIEMKSEITINGYFGNLIPYIKKENDDNIYPTAGDGRKKILAYSLINHLIQEQEGNKIIIYLVEEPENSLHRSMQIALSKQLFSSEVYKYFFLSTHSSELLYEMDNASLIRIYSDSKINCNSYIYNVSEEYKNVKKELNSSLATALFAEKVLLVEGPSEKVLFEKVLEKVYPTYELEGGYILEVSGIKFKPYVDVLKGLNITPIVKTDNDLKAKKGNQIKFDLIGITRCLNIMGIKEHELVEPVEIDYFYINDKGNRVYKNKVKNNMIIKKKIEIFNNFKDHIESFKHNNIYLSKIDLEHDLYEAIGKRMEEILGSNPVNYLQEHKLINMIELTNSLTENDCNDIINHYLFEPLRKLVPNDTN

SEQ ID NO: 69751 - protein, 508 aa, Clostridium sordellii
MILIDQEQRDGIIETDGNIVVSASAGSGKTTIMIKKLGIELEKITNHKTIAAITFTVKATDEIKKKAEKNIKKPFITMTNDSFIESEIIRPFIKDALGKDFRNDYIVDYGEEYKFENYPGGLIQLKEKNILGSLKNKKLNFNFKLAYDILEKSIAAREYIKSKYSWIFIDEYQDSDEDMHRFFMKIKNELNIKLFIVGDSKQAIYLWRGAVSNIFELLKNEKFNFYELITNFRCDREIENYANLFHNPQYFVSSNNNSNNVILKKYSKGISGIKYFIDEFKIIVSDKIIDLNKEITIIANYNNDAKKITKLLNEEGFDFIFIPKTPIDEGIPNGYLLKELAKFYKNSTYTIYDFLEKVKIDERTSTRKEINSIIGKLKGNEHLNENMVEGIVFQLAKYLGVSIDKCEIDKFCESIFNSEYDLAFRLIDSKHKVMTVFASKGLEFDQVISFTRYYEIYKNENLQNHYVCITRAKEKLIMFIDNEEYYTYVKNIAHSNGVKDMRNIIRYE

SEQ ID NO: 69752 - protein, 694 aa, Clostridium sordellii
MQLTKIILSNYRCFGKEPTTIEINNLTGFIGHNSSGKTALLSALIKLFGEKSSDRIIERSDFHIPESTDPDSVDINELYIETQFEFPELEKDEDNMSIPVFFKNMVVSEPGGKPYLRIRLEASWEKSSNPEGSIDSNIYYITSATEDIKPEDKRNIKRHDLDQIKIIYVPAIRKPDEQLRNVSGTIISRLLNGISWSEQTKTKIKTKANETEKIFFEEKGVESLKKSLETQWNSYHKDIRYSNPKINFNSTDLETILKKVEVTFSPTETHRDYRVEELGDGLRSLFYLSLVNTFLEIEEEILKSINDNKEEEIFTLIPPVLTIVAVEEPENHISPHLLGRVVEKLNLISKKENSQTILTSHSPAIVKRIEPTDIRYFRICKEHECTKVNSIILPNEERESEQFKFVKEAVLAYPELYFAKLVVLGEGDSEEIIIKKMIELKAESVDSSEISIVPLGGRHVNHFWRLLNDLEIPFITLLDLDRERDGGGWGRIKYAIQQLIKIGRDKNSLLKIDTGILSDEEFEKMHTWSVSETEIMSGWIKMLKDYDVYFSSPLDIDFVMLQSFKDKYISTLESGQGPIIKGYGKIQNIEINEDTEDKLKTDYQDRIVSDIKSTLKQEGGDGSTYTKEEKELMIWYSYFFLGRGKPTTHLSLFSNNTDLDFESFPECLKEFVNRVIEKMIDDLGDEEDEEELDW

SEQ ID NO: 69753 - protein, 621 aa, Clostridium sordellii
MKRNWIGKEEWHPAAGFKLEFEAMNTVINDENTLVVAGPGAGKTELLAQRACFLLETNTCRYPKKILAISFKKDAAANLKERVELRCGKELASRFESKTYDAFAKEIVDRFRNSLDEAYRPLNNYKIAKDSDVRRAFEISGLNFRGKQTEFNKVYGNKLSINKLPLHTDFIDKVFIDAWNVLLKGNKDNNFESSLTFEMISRLAEYLIRTNIYIKKAIQMTYSHVFLDEFQDTTSIQYDLVKSCFFKTETIITAVGDGKQRIMPWAGARKSIFEDFQNDFLSQKRKLIMNHRSAPRLVEIQKTMYNKLNEDAIDLKTNEKWNHEDGEAYLRLFEDYLKEADVLSEEIVSLVENGVNINEICILVKQSVEIYSEEIINKLSKLNIKARNEAVYQDLLKEDIIKILVSLFRLASNDRRPDDWDYIYDILGELYGVDESYNQKTLNDFITKVELMINDIKANLNITDEKQFLDLVDSKIEYISYEKFASKFQQYKSKDYFDDLVDKFKKLVWTEYNETKDWIKAIDNFEGKNSIPIMTIHKSKGLEYDTIFFVGLEDSAFWNFKNQPDEDRCAFFVALSRAKRRIDFTFSSNRPTKFSDLQKHDCINEFYELFDDTEIVKKIEY

SEQ ID NO: 69754 - protein, 698 aa, Clostridium sordellii
MEITKIKINNFRKLKDNVEFEFKKDILIVGKNNTGKTSISEIFYKFLSPNSKFGIEDFNYKSINKSKLNIIPEKFNSKLSPEEILEIENLFPEITLELEMEISKDTNLYKIREMIYELKNNDNLILVCKFKVENAIKVIEDFKNYIEKLKKESDKELEKESNNISIDFYNYIKRNLNEYYKCFYYTTKKGCSYKNHVSSTFIQSIFNIGIISAQRNVDDTSDQNTQTISNAIWNYYQRITCDKNDISKEDKFSDSISNIKLELDGSYNDLFKGLVERLESVALNNEIGQKIDIISEFKVEELLKKNSKFRYSLEGLSLPESYNGLGYSNILYMFIQLVTYYYDIDNKNAIFNILFIEEPESHLHPQMQSVFMEKLYMMFNDEVDVYKVITSHSSYILQKQDLDNIRYFLCKNNNIYVKSLDNFLNHEEYIGFKEFLKKYFMVSTCDLFFADKAILIEGTVERMLMPLFIQKLCTDENPHKDLIKQHISTIEVGGAYAHIFNNLLKFLEIKTLIITDIDSVDENGKKCRCDISDEGDDISNWKIRTSNGTIKDWYGKKNEKLYIKEIVSKSSKKYRIKNIEDNENFLMLSTQLPLKDETYWGRTFEEQFIIENSEILIEKLKDGIRYKEIESLYLSINKVKDEDGNKLNATSISKVELEKYAHEIVSKIDKTNFAFDLLVLENWNTPSYIEEGLNWLSM

SEQ ID NO: 69755 - protein, 569 aa, Clostridium sordellii
MAIDVNLKIEDCIKQNKNFILEAGAGAGKTYTLIKTLNFLSKSDVCIKNKKDKNILCITYTNSAKDEINSRLKNKKNISIMTLHEFLWSFIASFQLDMKSIILNMIEDKKQDITKKVQSCNKILSSPKKNTNIEKKKQELANYTKKLSKLENHKLDKNIIQYQNYTSIENGIISHDEIIYISKELFRNEYFCNLFIDTFSHVFIDEYQDTDQSIMKIFLDSINSNKKEKYFVLGLFGDRMQQIYDKGISTVEADKYNFEKIEKPDNYRSCKEIINLSNLLRSDGFRQIKKATDIELEKLEFIYNLSLDKYLKLNEEYKGYTKLFLTHSEISKEVGFETISNIFSSEYHQNANDKLLKLEDMFIQFVIDEIIYLIETYKNNEFKPILNSIRLKEFKQNDLEMLDKEINYIIDNTSLSLRLFIEKFIELNVLDYKAYKKLYKIYEDKEKISFIERLLEVQVKEYINLYSQIKNNQGLYTLHKVKGEEFDHVIVNIRSEQPWTKYNFKNLIEGIESTTKEKTQRLLYVACTRAKKSLVINYITDDNNKEKIKDIESRVNILMGKEIIFRINE

SEQ ID NO: 69756 - protein, 649 aa, Mycobacterium lentiflavum; identical to SEQ ID NO: 65320

SEQ ID NO: 69757 - protein, 630 aa, Mycobacterium lentiflavum
MSLVAPDSWRPSGIDDLEPAAWQALRDDRSTCVTAGPGAGKSEFLAQRASYLLLTGLCPAPRRILAISFKRDAASNLERRVGLRAPEHAHRFTSMTFDAFTKHIVDRFGTLLPGRWKMAGDYKIQFSSDRQVEDVLTEASANAPAGLKTAIDAIPRGTFMTSILGTYALPIKPVSPPKAVDYAVEEWWRRSYLELPTPVVEFVMLNRLAELIIRTSPQLQRAINLTYPYVFVDEFQDTTFAQYTFLRSLFRRTATVTAVGDRKQRIMGWAGALTDAFSEFQRDFAAAPYALRWNFRSTEALVDLQHRFARLLDSNATTAAAQAISDIDGEAATMWSFGTARLEARTIAAYIAADTESTGRSPADYALIARQRVADFEPEFRDALSEYDIVVRNDDASVGKMKLQDLLKDNLAQLLLGVLKLAATSRGEEGSPQAWAGVSSSIANLRSGDDQSVFGSVRTDDELAARLRIVRQWMRDHACNQDAVDAVVDLVTEMISVITDGRIYNLADTADDFQVRQDAFRMRLKTACADAGSWRAAVTAYEARDAVPLLTIHRSKGLEYHTVFFLGLDDDQWWAHQRDLEASIATFFVGLSRAAQRVVFTQCDTRGGRRNIADLYEILDQAGVPVTRFG

SEQ ID NO: 69758 - protein, 559 aa, Sporomusa sp. An4
MNFVSISIKNFRNFEEIQIELANKNVFFGLNDIGKTNFLYALRYVFDKDIRKLNLLDSDYHNKKIDNPVEIIITLDISDAICIDNQKLRARLGGALLSSHNKVYIKLVAEYDKKELIGIPILYWGGDSNNLREMKQRGYLYEIDYVVNVLYIDSYVDLNSLFKKNVNSLIKNESDVDKKVLERIQQTIIKLNSHISSLSGIKEFEKKVTPEYKKFRNENVSISIKSEIAVKGLYSNIVPYIKQDSDSNLYPTAGEGRKKLLAYSIFDIISDEYAETKINLFLVEEPENHLHKSMQIALSQILFTDEKYKYLFVTTHSPFVLYEMESVNLVRIYNETKINSASTFYKVPKEYKKNRKMLNRGLSEAIFADRVLLVEGPSELMLFEKVLSCINPFYEADGTYILAVGGIGFEKYFVILDKLNIDNVIKTDNDLRYVKSTKTYSLLGFSRCNKIIDERLLPTKRIKENSIAAKKKLYAHNITQLNEIRDDYKVFLSKCDLENDLDEVLHSELVKYLNTEDAVAYLQDAKHYNMVKLVEKLTDTDCRKIYNHYNFACLKAVML

SEQ ID NO: 69759 - protein, 502 aa, Sporomusa sp. An4; identical to SEQ ID NO: 64395

SEQ ID NO: 69760 - protein, 556 aa, Acinetobacter baumannii; identical to SEQ ID NO: 62630

SEQ ID NO: 69761 - protein, 593 aa, Acinetobacter baumannii; identical to SEQ ID NO: 62631

SEQ ID NO: 69762 - protein, 556 aa, Acinetobacter baumannii; identical to SEQ ID NO: 62630

SEQ ID NO: 69763 - protein, 593 aa, Acinetobacter baumannii; identical to SEQ ID NO: 62631

SEQ ID NO: 69764 - protein, 532 aa, Chlamydia trachomatis
MKVKSITINNHSRISNCTIDVRDNLILVGANGSGKSSIIRCVDLVLGKTTQQLYYSIDNSDFENEGQPFAVEVKLEGLSEDELSFFPDDYDVIDNSLTVRMEAALDKDDLTIRRYFPKGVGDNNLRREQLESIGWSMIPADFSTTQLDPGRKTIVDDYLKEVDASGDESKLAEAIKSLSDAIDSSDAFNEALSTLAGQLDPVLDGGITSSKLHFVPEAAINGDLLNNVRLQIEGKSGTARQATEQSDGTKALIAFSIFELLNSGGMIAIDEPETHLHPSAQRNLIRILKSAGKQLVIATHSGVVAGEFEPDNITVTREGIPPVQPSRGFLTGKKDQATLARWWISSKIELLTAKQIIAVEGQSDRMVLEEAAVKIGRHLERDGIEILEAGGCQEMPHVLDIFGESGFDLKVSILIDEDDGRNLAKLAKSLGVTVDNLAEKSVFVSRKDLEDEYVSAIGADRLWNAMCNSSLFTKNMLKCCKIAPGAATPNEQDLAKYCRSNKIICAVVACGTFDKGTAEKVSSVAKVLQNAS

SEQ ID NO: 69765 - protein, 573 aa, Chlamydia trachomatis
MQASAPGPTKEQQEIFDYEPYSMMITAPAGCGKTEALAYRAKGLLERYDFSGNGRRLLITSFTNQAKDNISERLKKYIGVQTLREHVIVCNFHGLASRIIKAHGQLIGIGSDWTLANVDWVGRELRAGRYGWNDSDRARQVLRDVKLKCLTDDNVMKQLEGTVGQAGEIARTIEKKRINEKMISYDDQIRVALWLLSDHRVADLYRNYFFAALVDEFQDLTPQQLRFVKALCGENITFAGDVAQSIYSFAGADVAYVQQEIAKDSGRQIKLLKSFRSAPAVLNAVNSLSPVTGSEHLRAAFPNRWGSGGVAGLASFDDEDCEAAWVAGMSKSILRHFPHQRIGIITRTVNRAIVAKRTLTQSGIEYTDWGRGIFRPEVAGVLKRICSDIQTHSFANNLEALQYIQQKAATYYHVGQTEEFEEGCDWLFDQFFQRGFDLSKAHEIEENIAVKRGNETIATHEGVHCLTGHAGKGQQFDWVFVLGLEDGTIPDFRAKDPESKREEARVLSVMISRARIGVFGTYTKGKVDRWGKYRENTPSEFIEYLKKAPGFLCGKDAIETWCGKADYPAIALM

SEQ ID NO: 69766 - protein, 691 aa, Ketogulonicigenium vulgare; identical to SEQ ID NO: 63252

SEQ ID NO: 69767 - protein, 586 aa, Ketogulonicigenium vulgare; identical to SEQ ID NO: 62945

SEQ ID NO: 69768 - protein, 673 aa, Alicyclobacillus ferrooxydans
MQITKLKIRNFRSFGDVETTIPLKDLSALIGSNSSGKTAALQALLKLFGTTSKERTIQRSDFHVPDGVDPITIASASLYIEAVIEFPELAEGTTVENSTVPPHFMQMVVDNEGEPPYVRMRLTSTWQRTNTPEGETEQQLHYILASESEDISDTDLIPVSSTERSRIQMLYVPASRDPSVQLKNASGTILWRLLNGINWPGDMEAKLSDQMKVVNDLFDTVEGVNVTQSVLQSEWGSMHKDARYSRTGISFHTNNVESILKKVEVNFEPTELPTKYTVDELGDGLRSIFYLSLVSTLLKIENDILERSSDSETDQPFNIIPPALTILGVEEPENHVAPHLLGRIVKNLTAIAQRANSQVLISTHTPAMVKRVDPEHILHLRIDSGTDSTVVKTIQLPPNRGEAFKYVKNAVQAFPELYFARLVILGEGDSEEIVISRLLEAFDSEVDLSALSVVPLGGRHVNHFWRLLNQLEIPYITLLDLDRERDGGGWGRIKYVIQQLLANQVDHNSLLTVSTEDGGTSVLSAEDLDEMHEWDVTNTESMEEWITSLEEYGVFFSKPLDLDFMMLKAFEQAYRSTVPSGGGPRIPDIKKEPKEYSSKRQASVRATLKDQGGDGTTYEDSELDLMIWYNYLFLTRGKPATHILALTNITDEALKKNVPESLRKLMTAIRERL

SEQ ID NO: 69769 - protein, 627 aa, Alicyclobacillus ferrooxydans
MPRYITSTSWIPSDNMELEAAALLAVKSTKNSYVIAGPGAGKTELLAQRASYLLETNTSPLPKKILAISFKKDAAKNLQDRVLKRCGKALATRFESLTFDAFGKRLFENFRKAIPESYRPSKEYELLAQFGRDALEQVFIQLSPPKQLGKYGLAGVNKGQFLMQYTASQLPHVNPETDSILNWAIRNTWTYMLNSNGKKSQCTFPMISRIVEYMLRKNPLITRALRSTYSHVFLDEFQDTTDIQYDLLKTAFKDSSVVITAVGDDKQRIMGWAGAMHNAFETYKTDFDADEFVLLRNFRSAPNLVKMQQVLATSLTDNSVVAVPSERWNEDEGTCEIWNFNDEHRESVYVANQIRNWIASEGINPRDICILSKVKPERYCGSIISELSKFSIKARIEANLQDILSEPCVGVIVDFLRLACYKQAPMSWGNIVKLLFHINGINEEARYSQVYNLENELKRFISGLSDQMLDMDKLSLAQVQALLWSTVEFLNEDILRRIFPVYQVGDYLQKVVYAMADYLYQYLVHDGSWTSAIEDFIGINTIPIMTIHKSKGLEYDTVLFVGLEDSAFFKFQEQTDEDTAAFFVAFSRAKRRVVFTYSQNRQRSQSRSNIKSLYDLLSDAGVKEITI

SEQ ID NO: 69770 - protein, 673 aa, Alicyclobacillus ferrooxydans; identical to SEQ ID NO: 69768

SEQ ID NO: 69771 - protein, 729 aa, Alicyclobacillus ferrooxydans
MDAWIRATIGGRKVRLTYDDLMQGDAKTQELLHELYEEGADVECMCCDKPVPMHIRRIRIRPPTYCLVTNKYYQHANTCFRSSQSLTMPPPDQTQPVLRNDSPKAHNNQTEMIYETHASQRELTINRSSADPPAQERRTLMPSVAELNVAQREAAKHKDGPCIVVAAAGSGKTAMLITRMKLLVENGVQPERILACTFTRKAADEMKERLVASLGSRGSQITIGTIHSIAYRMVMPQLGHGWSVVTEPSWLIEQILEPAHSHNPFGVGKILGPTEAILGVHRAKADALWPMQVDGKLGKVYKAYENLKSEKKKLDFEDLLLHAVRLFQTRPDVAQLWRERFDYVLVDEFQDVNQIQWLFLCELVKETRNICVVGDDWQSIYGFRGARPSLMQDFLRQFPDAKKVVLSMNYRSHDLIVELGNRVITLNHGHQIEKRVQANRGISESANVQIVTVQSDVEEARFVSNEIHQLKARFPEVPYSEYAVLYRTNIQSRVYEEALAEHGIAYQIVGDTHFYESRDVKMILDYLRTVCDKSDPGLWGPLINRPKRFVPNTVVREVQQGGWTAVENHAKCHAFLTTITELEKRASPADAIRWLVEAEPEIVRSQDDLEPIRWVDSLIQSAARFETIHEFLRFVDWVTEWSQKPKRDAVQLMSIHRSKGLEFETVFVTGLVEGLLPHKKSLTEESLREETRLCYVAITRAKENLYLLSSETYGNTAFERSRYIKVLQE

SEQ ID NO: 69772 - protein, 687 aa, Paenibacillus sp. A3
MNITELRIKNFRSFGSDDRPIKIDRLTTVIGANSSGKTALIHALLKLFGVNPKDRQLLRSDFHVPYNKKPEELSEDKKLSIEVKIEFPELKKAGIGDNTVPSFFKQMMVGEPKEIPYLRIRLEATWSQVEIPEGEVETKLFYVTVPYGDEENEESLKPVPAHDKSLIQMIYVPAVREPASQLKNASGTILWRLLKYIAWPENTNTEIQKNVLPLEQFLESVGGLKEVREEMQKAWNKYHRDPRYRTTDIQFSETSLDTLLKNINIRFSPTEDVTNYSIDQLGDGLRSLFYISLVSTLLEIEQKIINETTGKYKKKKGPNALTILAVEEPENHISPHLLGRITANLRKISTTDNAQVIITSHSASIVRRIEPEEIRHTKIITSGSKKGTTSISEIKLPPEKDEAHKYVKEAVRAYPELYFAQLVILGEGDSEELIIPRLLEVEDIILDDETILVVPLGGRYVNHFWRLLKQLDIPYITLLDLDRERGGGDWTRIKYAIKQLLENGADPKKLLLMGGKMVSKDIIEVMHKRTMTKQTGCNSIKNMENWIKKLESYNVFFSSPLDIDFLMLQSFTEEYKAVAPQGPDLPEKTIDLDGYNEAVSNGVRATLKKKKDATGFGYTFSDEEKELMVWYNTLFLGRSKPSTHIEALVKIEPTQFSANCPKPLKNAINAIKKILEEKNAINNKEKI

SEQ ID NO: 69773 - protein, 632 aa, Paenibacillus sp. A3
MSNTSGVKKWLPADNIRLEKAAERAVFSETNLLVTAGPGAGKTELLAQRACYLLQTGVCRSPKKILAISFKVDSASNLEKRVLKRVGKELSKRFESRTYDSFAKNLLDHFRKGLEEDYCPDQDYAIITTKEELKELVVTIFRDRYPVQKINYGDLLGMLANDQLPLKNINNNNNVYDMLVNELWAVMPKGSGNFISTLTFPMITRLTEYLVKTNSYIKNALRTTYSHVFLDEFQDTTYFQYDLLREIFLNSNAVITAVGDNKQRIMGWAGALENAFEDFKNDFNASEEQLIRNHRSVPYLIDIQNYLAKDLDPNAAKVETPVKSKNDKGECQVWKFTDHYTEAIYLSDQIQVWLKNDSIKPRDICILVKQQEEIYADAMMSELKKRNIKARVEKEYQDLLSEDCVTLLIHMMKLTVTHRSPESWQYVFDTLMHLNSFNEEDSNKVYELDELLSRFIDKLKSDLIKVNSPKALDIFFFDMFNFIGIDRYSSFYPQYKGGKYLSKLVKSFSKKISNSYRLLRDWEQALNDFIGENTIPIMTIHKSKGLEYKTVIFIGLEDAAFWNFVNQSEEDKRAFFVAFSRAKERVIFTYSNKRIVKRYDELRNLPQNSTNISEIYNNLKQAGVDIIDMVNV

SEQ ID NO: 69774 - protein, 690 aa, Listeria monocytogenes; identical to SEQ ID NO: 62956

SEQ ID NO: 69775 - protein, 577 aa, Listeria monocytogenes; identical to SEQ ID NO: 62969

SEQ ID NO: 69776 - protein, 598 aa, Pseudoalteromonas sp. P1-8
MFLSKLTIKNFRRLDEITFNFVDGLNVIVGENNIGKTALVDALRVILASHEDPYLRITEDDIFQPQDGREASGDITFHFVFSDLNESDEADFLHALVPIDKENFEAHIHARFSLIDASGRMRLKRWCGEHEEVGMTSDMLENLRGVYLQPLRDASKGLKPGRNSQLARLMRLIGEEDTLGRQSVDGLVSAFEKLLKRKPPLVSTGNSIVEKHKDMLGKQLSQELSLGLSGADFKELSSKLSITANGMEIDTNGLGYNNLIFMAVVLSEMIKDPSAAYRGLIIEEPEAHLHPQLQVVLLDYFQAIAASKVEKSIQLFVTTHSSNFASLANLENLTCMVDRNSSVKVFNPREATFDPSPTKAEKKRKKLERYLDVTKAELFFARKLILVEGTAELMLIGVLAKQLDYDLQKYAVSIISVDGLNFDCFLPLMGQEKLAIPVSVITDADPTKEDSSGNKKTVPLYPSANDNVIASDNTRVLKGQECELVKVFFGVKTLEYDLALYEDNRSVMLDALSEIHPLIAKSIKDEVNDKTTDQEKAKALFCGMFERGDGLKNVQKGQFAQELAYQVSNTSANFVVPGYIRDAIKHVIEGEDILDEAF

SEQ ID NO: 69777 - protein, 579 aa, Pseudoalteromonas sp. P1-8
MKLSDEQHKVVFSPLKPLSVIACAGSGKTTTAVHRLSHVRHSLNNERGYIALLSFSNVAVNTFKKDFMQHASNQTNKHPYSDRVVIETLDSFIVGNVIRPHGSRVMGCSGVPFLLSGGELFLKNRKFNFEIETQTGRKTIGSDKVVELTCRVVDISVECFLNKNKVAEGRDLILTLGKTGGYTHEFGGYWACKILKEQKSLAKAIAKRYPHIIVDEAQDIGSMHAYFLSMLIKGGSKVSLIGDPNQAIYEFAGADGAFLNTHNNKPSTLKCPLSLNRRSIKDIVDAASLVSGFQNQHIRSKENNDFGLFYCTYKEKNYTEVIDSFLSRLKDLSINKNKSAILVRGSELKKTLLGSNGKSGQGKTNIFAQAAIKRDLYGHPFEAFKLVLRCIANLIEDAPKEFFTDVLSAAKDKREYSESKKVIWQFVRSESAGLPSAKLHAKKEWHPKLKENLAKVLKKICELHGFNNVSKLGNKLASTNLPDSALLPSEYAKSDDSRRLIRIDTVHQLKGETLDAAMYIATNDQVVKMVEGTSTETGRIGYVALTRARDFFVLAIPRSKEIELSKLIMPMGFKKLACD

SEQ ID NO: 69778 - protein, 565 aa, Pseudoalteromonas sp. P1-30
MKISKVHLEGFRNFSNSNINFNKNTLIIGANDVGKSNLLHALRILLDKSLSEVDIEPSELDFHINPTGVSDEISITVKFSDITEDAVISVLKGSVSENNETFLRYTAVHSSLSYKLFVGPSVDDLQEVNSRFYLKHMHLKYIESQRDLERFIRKEKRQLLKIAQESLSDDEKQEDDDLLGEISSDLENLNDKVSQLVYVDNAMNNVNDELKKLAHHYANYEVQLDTGAIQVNDFIEKLQLGANTNGSNVMLGGDGRNNQILLALWKAKSAQEHDLENEVIFYVIEEPEAHLHPHQQRKLATYLIDELPGQTIISSHSPQITVNFSPDSIIRLLPQNSSTVAASEGCSDCIESGWEDMSYRMSILPAEAFFSDGIFLVEGPSEMLFYQSLSKALNIDLDFENLSILSVDGISFKVFISILDALQIPWIMRTDNDVSKISSKNEWQHAGINRCLSLIGEDPFDRGYTEFSPQDTVDNGEWQTASDMLNDQGIFLSKVDLETDLVEELSDEIQTAVGKSDDDSAIKYLQGKKALRMRNLLKSISRDLHKLNRGELAKPLHKLVEMRRS

SEQ ID NO: 69779 - protein, 536 aa, Pseudoalteromonas sp. P1-30
MSTFNPTLQQQAAIDCEDSIVITACPGSGKTTVIKEKIRGITPNLSSHKGVIAITFTKKASEELKKRCKENAHDTKLSFYGTIDSFCLKELILPFLGRIWDGKPSDCKIVKKLDSHQQLYLSGEYNSPTCDELSSDAGFKALYDAGILWMNSFAALSLLILNNSVTAQRYIRARYSHVFIDEYQDSSQSQHELFIKIKELGLIATAVGDIDQSIYQFRGSQPKFLLALIEDNANFQHFELDLNHRCHPSIVNYASRVLDPEYKLIAHEDDIYVFRRLINGSLKNAAEHISPWIDDWLEKNTINNASDVAILAKKEISLREFATGLNHNHRLYTDSPLNDIGTECADVYSDLLLYKYGAIPTAQDVIEKYFFQLPARNMANIRRQLKGIRAEAILEAFIEKSNDLLELIGFDEFEEENDAVRLIWSKDTWVKLFKPIAKDEVQLMTLHKSKGLEFKIILHLDMEEWSFPHRIPGVNWDDINYPSLAEDTNLHYVGVTRAELCCILIRTSLRRNAQGNYGNSRPSYFLGLPQLEGLYQ

SEQ ID NO: 69780 - protein, 682 aa, Pseudomonas cannabina
MPTLCQPAINPYPSRHRGRDPVLIESAVLSGFRCFAPRPISVTISPKITTIVGPNAAGKTALLHALAKLFGVTRAQRTVRRSDFHLGPDDDPTSLESKHLYIEVLIALPELIDGTATPETIAPSFRHMLIERPDDAPVCRLRLDAQWEDDGTVEGEVSQTLHWVDTLDDAPPEDKCHPVSVADRGLIQLYYTPASRDAAAQTRATAGALAARLLRAIEWSSDTEEAVHDATENLASAFEEEAAIAAITEALQTRWSALHDDVVDTNPRLSLVSRRFEEVVNKIAVMFEQGPDGQERGIEALSDGQQSLFYFALAAAVFDLEREVVAGSIEGFRSDALRIPALTIFALEEPENHLSPYFLARIIRQVRSLTTDGSAQAIVTSHSPAVLSRVNPTEVRYCRCDPKTRVSTVKRIKLPVNDVEASKFVRGAMLAYPELYFARFVLLVEGDSERIVLPRLAEALNLLIDPAFVAIVPLGGRHVQHFWRLLKHLGIPHATLLDLDLGRDGGGFRRVKTAIEKLIEFGAPKAEVLRITTGILSDADLANMHNWPDSVDHSGLLSWINNNLKAHGVYFSSPLDLDLAMLEAFPAAYAAIVPERGGSRMAADKAAEVVLGTAGPGLKAYTGPFVGYPPQFPSYRYHFLTNSKPATHLAALTHITKAQLVAHMPVVLASVLKHISASLRRD

SEQ ID NO: 69781 - protein, 636 aa, Pseudomonas cannabina
MNMTLSSRRVSSENWKPVGVKSLEKHAFEVVCSHVNRSVIAGPGAGKTELLAQRAAYLLQTGAAPAPRRILAISFKRDAASNLASRVRKRCHPDHAGRLDSMTFDAFAKSLVDRFGQSLPERWRPRPDYEITSYYERDYKDFLFQDVGLPPTTIGTRADLRAVGPKIFERNYVLGQPLPIDGWLCPTVGQWAADLFWRASLHGGEKSVLSFPMIGRLAELLLRVNSMARDALRLTYSHLFMDEFQDTTQVQYDLVSTIFRGTDTVLTAVGDNKQQIMRWAMAMDDPFSEFDADFSAKRTSLYNNYRSSPDLVRIQHILAQALDIAAVEPISQTAGTINEESCTVFDFPSPHAEAHNLAVSVASNIASGKLTPRDFVLLVRQKAGEYAEVLEPAFTAQGLSLRNEAGLVGAIMLQELLVEEVSVLLVSLLRLSMTLRAGRYWSECQKWMASLRGVEFDDEIGHSKLTRELDACAIWLGANRSSLPTTLKAARSLVDEVMGFVGLGHLKSRHPAYAQGEWLEKVLDAAATHLFNCAIKCADWPSALDTYEGVNAIPLMTIHKSKGLEYHTVIFVGLDDGAWWSFSNDEIEATAGFFVAFTRAKQRVIFTYCAKRGGRTKIATLYHLLQTAGVQITQIS

SEQ ID NO: 69782 - protein, 381 aa, Pseudomonas syringae pv. coriandricola
MPESYNGLGVRNLVYILLQLLKFFREFQATPAAASVHLIFIEEPEAHLHPQMQEVFIRQLHLIKGEFEKQLNDSRPWPVQFVISTHSPHMANEARFETMRYFLSATDEHGVRQSKIKDLRQGMGSVSLPDRDFLHQYLTLTRCDLFFADKAILIEGTSERLLLPTMIAKTDLAAAGESKLASQYVTVMEVGGAYAHRFHDLLSFLELRTLIVTDIDSVQPNEDKKRKACPVAEGQFTSNGCLKDWFEPDISPTQLLAKTSAEKTKGTRRLAYQVPEVAGGLSGRSFEDAFILANLGLFDLGHGDAALLAYRHAADQKKSEFALKYAIEDTNWAVPRYIAEGLRWLAVGAPVVDLQATVQAMAAVGEAAGQVIATERGNGDA

SEQ ID NO: 69783 - protein, 587 aa, Pseudomonas syringae pv. coriandricola; identical to SEQ ID NO: 69159

SEQ ID NO: 69784 - protein, 778 aa, Pseudomonas syringae pv. coryli
MHIETVWVRNFRRLKDTRIDLASDISIFVGANNSGKTSAAHALQLFTSASKDRFTLHDFSSECWDAINAFGEGADGVELPTISLDIWFCVTPADLHRVVDLLPSLDWQGNRVGIRVELAAADAGLLRSSFQEARASARHALLQPTEEGVAQRDVEPAIAQHGYNPRPRDLCDFIADTVGDRLRRDFELRYYILDSAGFDPEFRQLDGFVPLRLIPDKGRSGRDVLGSLVKVDCLHAQRHLSDSNAGSRSEDLSRCLSRFYERNLEKRGEDYDAQRALYQSESLLNDHLERVFGPTLERLADLGYPGVNNPRLLIKTALNPATILSSHEGARVHYALGALGAAEVTATLPDRYNGLGFKNLIYMVVELLDVHGRWLDIEENRPPLHLIFIEEPEAHLHAQLQQVFVRKVLDILAVPEEDSPYCTSQLVVSTHSPHVLYERGFKPIRYFRRVADAGIQQSKVLSMAAFYEAAVDPNDPNDRTRDFLERYLKLTHCDMFFADAAILVEGNVERLLMPQMIAKAAPRLQSNYLSVLEVGGAFGHRFKGLIDFLGLTSLIVTDIDSVSPPAAGALAANGELPVDEDPADAEPDDNEDAEEAEARRKGRKACMVHEAGALTSNQTLIKWLPGHTTIDDLLAATAEQRTQSRDEEGGALVRVAYQTPVAVVWGGATQVRTGRTLEEAFALQNLAWTQHLDRKDLGLRIKGSNNLEIAGIAERLYRKVKSSSFRKTDFALGLLAQEPSAWTVPNYISDGLRWLEDLVAPPPPAVAEAEAPLNGGEV

SEQ ID NO: 69785 - protein, 632 aa, Pseudomonas syringae pv. coryli
MTARIGQPDTQADIELRLCLDQRPQRSFVMVAGAGSGKTTSLVKALAHLGQTRRLKLNMRGQRVACITYTEVAVKEIWGDVGNDPLFHVSTIHSFLWTVIRPFQVNLKAWVIARIHEKIAEAQQHHDKPRTRAATRERLVKDIARYQRHLEAVRHLTHFNYGAGSDFGRGVLGHFDVISAAVELIEQSQLLRDVIASRYPVLFIDESQDTRPEVVAAFRRIAETTPVEFCLGFFGDPMQKIYLEGAGVIETAAGWEQITKPENFRCPQRVLQVVNAIREPDDGLSQTRGRMNWVDGNPEPVMGSVQFFLLRADDHRSMKLAKVREWMRRTNDDDHWVSGDLAADFRVLVVVHRMAAARLGFPNLYAALNDNDAPPSIKEGLKDGTAWPLRPFLDYLLPLATAVSENRKLDVMTFLRSECPLLQPTALVGSDPVAVLRALQASTTELARLIFSSDALLQDVLVHSQAAGLLQLDEAWTKYLGPDRTADDDDPEIPAVSAFLRCGVGELAGYRHYLEDLSPFATQQGVKGAEFERVLVLIDDEEGRGQRQFSYEKYFGIVEPSDTDLENLAQGKDSVMDRTRRLFYVCCSRATRDLAVVMFVQDIETAREKIAETGIFDSADIVDEETLEAALT

SEQ ID NO: 69786 - protein, 719 aa, Pseudomonas syringae pv. castaneae
MAKRGTLFVHISRLQLVNYRNFECANVVFNKGVNTIIGENGSGKTNLFRALRLLLNDTLLRAAYRLDEKDFHRGLGDWRGHWVVISLEFDEVSQDEAIQSLFLHGTGNIADGAIGKATYNLIFRPKAAVRRTLADLAVGDAVGLAEARSKITISDYETIFTGKSTANFLDPETYRQLVGDFDAVKFPQELTIPAIGGVIPGMLSISREVCFTFVQALRDVVTDFQNNRTNPLLTLLKCRSGEIDPQSFEPITALVKGLNDAIEGLPDVETIRTDIRDTITDAAGETYSPRSLSIRSDLSDEADRLFQSLKLFVGESEEEYEGAIHELSLGGANLIYLTLKLLEFKYQKQKESFANFLVIEEPEAHIHTHIQKTLFDRLNFDDTQIIYSTHSTHISEVNNVVNINILGRQDGRCEVFQPSTGLDAGQIGNIQRYLDAVRSNLLFAKSLVLVEGDAEEILIPILVKKVFGLSLDELGISLINIRSTGFENVAVLFHNERIRKRCAIITDLDSAFIDTTTDILDSDDKAAAKKKALGSQIAGLQREAALKELCAGNPWLTAHFADHTFEVDFVSAGNVGTVVSVLGDVYKDGGTIATSKMELESGDIARFGTRVLTMARYAGKGWFAIILGRMITPETSIPDYILDAIFQAHIPVSIQTWARVLDYRVSILAASQLHAPGDIDAMRAQIRRYHRGEIDFAGVRAEMLQAFPADGINTILASF

SEQ ID NO: 69787 - protein, 476 aa, Pseudomonas syringae pv. castaneae
MHEELCSAVQGTKLSSFDCAYYLKPNGCVLTCNKTDKHEAIRGVLQAYWKTLRAERQVDFELILFYAYQLIEKNPSISALLGSIFECVLLDEFQDTREIQYAILASILKASKGGASAFVVGDPNQAIYGSLGGYAITAADFGTQCGIAFKEMELSDNYRSSSRIVSYFGNYNVLPSKIEAVGRGKDYASVVSFDHQTHRDALEEELVRLIKFNVETLGIAQHEVCIVAPWWVHLASMTRRLVAALPAYSFDGPGMVPFARDVDNFWYKLARIILTEASPQLYVRRMRWAGEVIADLSVAGVEVQGLDRKTLLRVCNSVTETDGLVFLRVFFDQLCSTLGVDRHTYAALQEHHDAFFECSQKRIDKLIKEGAEAIAELEMFRKVFAGRTGITVSTIHGVKGAEYDAVIAYGLLEGMVPHFSDPNQAETAKKLMYVVSSRARKNLHLISERGRSRGWSGDYQPTDVLAGCAFGYDQLS

SEQ ID NO: 69788 - protein, 288 aa, Pseudomonas savastanoi pv. glycinea
MRYCRCEPKTRVSTVKKIRFPVNEVDASKFVRGAMLAYPELYFARFVLLVEGDSERIVLPILAEALDLLIDPAFVAIVPLGGHHVQYFWRLLKHLGIPHATLLDLDLGRDGGGFGRIKTAIQKLIEFDVPKTAVLEIDKGILSDTDLEKMHEWSTTGDHANLQAWISNNLRPHGVFFSAPLDLDLAMLQAFPDAYAGIIPKGGGPRMAEEKAADAVLGTAGPGLGAYTGPFEVYKALLPAYRYHFLTNSKPATHLAALSRLKQKDLREKMPAVLAEVLKHIEASLRRD

SEQ ID NO: 69789 - protein, 553 aa, Pseudomonas savastanoi pv. glycinea
MEARLVMAVSSLRVRPEDWTPIGVKSLEANALKVVRAGINQSVIAGPGAGKTELLAQRAAFLLQTEAAPTPRRILAISFKRDAASNLAARVRKRCHSSHASRFDSMTFDAFAKGLLDRFGQALPEFWRPRPGYEITTYYERDYRNFLDLIAGSPPGDIGTKASLRAIGAKSFERKHLLGAPLPVAAWPKPDVAQWAMARFWHYSLHEGKKSVLTFPMIGRLVELLLRINPMVRDALRLTYSHLFMDEFQDTTQVQYDLVHTIFCGTDTVVTAVGDNKQQIMRWALAMDDPFSEFDADFGGLRTTLFNNYRSSPDLVRIQHVLAQALDSGAMEPISQTEGTIDGESCVILDFPSPKTEARHLAKTISAAIADKKLLPRDFVVLVRQKAGDYADVLRPAFEAEGLSLRNEAGTAGQIMLQELMTEDLSKHLVSLLRLAMNPRAGRHWSNCQTWLALLRGVAADEPGVQQKLAIDLDAFARALSANYPTPPGDEATSRSLVTEVLNFLGRERLSSSYPSYAHGDWLDTVIDSALKHLLDCSLNSIDWCSTLGGCRQ

SEQ ID NO: 69790 - protein, 639 aa, Pseudomonas savastanoi pv. glycinea; identical to SEQ ID NO: 62732

SEQ ID NO: 69791 - protein, 560 aa, Pseudomonas savastanoi pv. glycinea; identical to SEQ ID NO: 62733

SEQ ID NO: 69792 - protein, 711 aa, Pseudomonas savastanoi pv. glycinea; identical to SEQ ID NO: 62734

SEQ ID NO: 69793 - protein, 603 aa, Pseudomonas savastanoi pv. glycinea; identical to SEQ ID NO: 69153

SEQ ID NO: 69794 - protein, 634 aa, Pseudomonas amygdali pv. hibisci; identical to SEQ ID NO: 63508

SEQ ID NO: 69795 - protein, 583 aa, Pseudomonas amygdali pv. hibisci; identical to SEQ ID NO: 63509

SEQ ID NO: 69796 - protein, 595 aa, Pseudomonas amygdali pv. hibisci
MRVSRVRLINFANFSDVDVETGESIVIVGENKVGKSNFIRGLQLILDPGLSERDRQLGLEHFWDGLGEDKVGATIEVSVDLTDFTNDPRLMAHLNDCVIDPGPPMVARLTYRFQPKAGLGRAPESLKDYEYVIFGGDDPDMRIGGAFRRMLPIDVQVALRDAEKDLASWRNSPLRPLIEDLAASLDDDAREEIQDQVDQAQRELAGHEEVVATAERISERLIAIAGGQHAVPVSLGLAPTRVDALLRSLRLLIDNGVRGVGDASLGTANLIFLALKSLELDRLVSDGERDHTFFVVEEPEAHLHPHVQRLIYRYFLGTGTEDGEEQPPLTTILTTHSPHIASVAPIRSIVLLRHDTAGDKTVAVSTANAPFTQRDEEDLQRYIDVTRGEIFFSRGVILVEGDAERFIVPAFAEVLDIPLDMLGITVCSVGGTNFTPYVKLLGPEGLNIPHVILTDRDPTDGNHPLVRRRLINVLDVIDGGVDHENLDADEVIELAEQYGYFVNENTLEPELFAGGLAQDMQEVIREELPRLRRETLNALQQWVDDPDQVDEDWLLRLIERIGKGRFAQALAPSVSQDVCPAYIRSALEHIRDAIA

SEQ ID NO: 69797 - protein, 604 aa, Pseudomonas amygdali pv. hibisci
MPSRSVSTAYLAQAAELAGNPGQLAAYNSQGHCVVLAGPGSGKTKTLVLKLARILAEDVEAPRGVACITYSQECARELARRIESLGLQRAPNLFIGTVHGFCLRHLLMPYGRLAGLPLAFPLSVATQRVSDRLLKQTGDALFGQNHPYKVIDLGRHRRSVLNRNGVAWRSEEELAAWAEAYEAALRDEGLIDYDDMVVFGQRLIAEHDWVLPLVQAKFPVLAVDEYQDLGVALHRIVKRLAFDGGVRLFAVGDADQSIYGFTGADGALLMELAARRDIEPVQLQLNYRSGAGIVTASEMALGEARGYQASDPARQTTIEFVLRPGGMADQAAHAIAQIIPAALASKAGRTLGDIAILYKDYRSGDIVAEAVAAGGLDYIRVDTAAPYRKVALTSWVEDCAAWCAGGWRVGRPQLRGLLDRYRAFHRASLDDSQAKREEQELTALLWELRADQQPAREFVASLRNGAMDHLLATELALADQKEQLDRMTAALAEGGALASLDITSLGGRDGSPDHLNLLTLHSAKGCEYDVVIMVGLDLGNLPWRNETPEKLRESRRLFYVGLTRARDEVHMLYSGFVDGRYGPMRYGRSPFLDELEARMRAAGI

SEQ ID NO: 69798 - protein, 651 aa, Pseudomonas amygdali pv. lachrymans; identical to SEQ ID NO: 63506

SEQ ID NO: 69799 - protein, 556 aa, Pseudomonas amygdali pv. lachrymans; identical to SEQ ID NO: 63507

SEQ ID NO: 69800 - protein, 634 aa, Pseudomonas amygdali pv. lachrymans; identical to SEQ ID NO: 63508

SEQ ID NO: 69801 - protein, 583 aa, Pseudomonas amygdali pv. lachrymans; identical to SEQ ID NO: 63509

SEQ ID NO: 69802 - protein, 653 aa, Pseudomonas syringae pv. aceris
MFVQHDSAASMVATDALNETHDTSRVGETVCLHTPMAKVRRYRPFCNGITIKDVEMQLTRVAIRNFRNFKDLDVPLSGNIVVVGENRVGKSNLLYALRLLLDPSLADSARQLGQGDFWDGLGEPLEDEKITILIEIQGFEEDVDLLAMLTDYRLDDDADTVRLTYELRPLPNLGRFPASDEDYEFICFGGETERKRFGHDLRRRITMDTLPALRDAEGDLAMWRRSPLRPLIERAFSEVSRDELGEVQEAIRTATNDLTQFDPVRTLEENLGAMYASMSGPNQYIEPRLGFSTIDITRLYRNVKLLIDGGLRTISEASLGSANVVFLSLKTLELKQLMNENRRDHTLLGIEEPEAHLHPHLQRSVYRHLFEEFGGAGDERLSILLTTHSPHIASVAPLRSIMLLRETRHEGTVGRSTAELNLTDEDEEDLTRYLDVTRAEMLFARGIILVEGDAEKFLLPVFAKSLGYDLDHLGITICSVSGTNFQPYVKFLTALEIPFSVITDWDPRAAARPLGFNRALELVRTILRIRNRRNPRRIIAELEALNFKDFEARCDGYGVFTNVDTLEVDLFEDGDFVAPILATLRDEDLSDERSAWVDGWEDDPDTLDIVNYIKVIEAIGKGRFAQRLASRVAGVEPPLYIQSAIDFVVRRVR

SEQ ID NO: 69803 - protein, 548 aa, Pseudomonas syringae pv. aceris
MARLLAEDVAEPRGVACITFNTECARELESRLSDLGVEPGRRIFIGTVHSFSLTQIILPYARVARLGLPDDFHVATKSERDRALRAALDDMAKYPEPLREWEAKMNGYRQSILDRGRPEWLEINPELARLAELYEGRLRRMNLIDYEDMPLLALRALRENEWLRKALLAKFPVLVVDEYQDLGKALHKMVLGLCFTTGMRLFAVGDPDQSIYGFNGARPDRLRRLSERRGVETVRLRLNYRCATRIVAASGALLDEERDYDAVAGAPSGEVFFHPLRGRYEAQASVLINELLPQALARHPHLRLGDVAILYPAAWLGDTMVPAIQQAGVPFIRTDTNALYSRSSRLMHWLEQCAIWCCGGWQSGSPLFSQLTNTGKHLFSNAIRSDTQAAEFHRGLITKLWASREVALPLLGWLTDFRDRLLAPLGAECPDLADELTILADFIDRISPEGDSHGMCLGSLAGQSKGKDSLNLSSLHSAKGREFPVVFMFGADVGRMPRDGSTDPEVAEARRVFYVGLTRAEVEIHMIYTQGRASPFVSEVQRRIENGD

SEQ ID NO: 69804 - protein, 778 aa, Pseudomonas amygdali pv. aesculi; identical to SEQ ID NO: 62754

SEQ ID NO: 69805 - protein, 632 aa, Pseudomonas amygdali pv. aesculi; identical to SEQ ID NO: 62755

SEQ ID NO: 69806 - protein, 711 aa, Pseudomonas amygdali pv. aesculi; identical to SEQ ID NO: 62752

SEQ ID NO: 69807 - protein, 599 aa, Pseudomonas amygdali pv. aesculi; identical to SEQ ID NO: 62753

SEQ ID NO: 69808 - protein, 643 aa, Pseudomonas coronafaciens pv. atropurpurea
MKLCKLRISGFQSFGPDVTDITFEDVTYLLGPNGAGKTATLQALARMFGFEPGLRRLRRSDFHVPLEELEAPPQRILWLEADFTFDETQDDEDDDTVPPFFSQMALQSADESPRLRFRLEGVLHPDGDVEERFLYVTRMDEHELPTTVKPVAKGERDEIHLHYLPARRDPADHVAYGATALLGRLLRAVNWSDDRDSIKVLTTQITECLSGNESIKALSTSLSSAWQRLHRGNFFASPSLTFANSEIEAILRHLSISFSPGHGETQVDYARLSDGQKSMLYLSLVLTSLSIGREVRSAENTSFDPLKLKPAAFTILAVEEPENSLSPHYLGRIVSSLKSSVGVDAQALIATQAPSMLRRVEPEHIRYLRLNVKRETDVSTIVLPEKQSDAYKFVREAVQAFPEVYFARLVVLGEGDSEEIVLPRILQAKGAPVDEFAVAIAPLGGRHVNHFWRLLTALGTPHITLLDLDVGRHQGGWGRVNYVRDQLDKFDPARNIPGGWTRYAWDDAEIPVRTHHWFENGTDNRVDLFDELEKRDVFFSEPLDLDFAMLKSFPNAFGATPSAPTLHDHVAVLGKSHFNPDQYGDGEQQLFAAYHKLFKLSSKPAAHLDALGRLTDAELLASLPSSLNRLADRVIAKLEESPE

SEQ ID NO: 69809 - protein, 560 aa, Pseudomonas coronafaciens pv. atropurpurea
MISHDQWAPSPGVRLEKNAWSVVRGLDRSILLTAGPGAGKTEVLAQRADYLLRTNSCRYPKRILAVSFKTDASRNLKERIQLRCGWDFASRFDSVTFHGFAKRIIDKFLPILAEERLSPDYAIGPEAIPGKQITFKQLLPLAIKIIQRSEVARNTIRKTYAHVFLDEFQDCTADQYELIKLLFLGTGICLTAVGDQKQMIMGWAGALEGIFKTYAVDFNALPLHLYANFRSKPNLLRVQNEIIREIDPIAVTPTELIIGQGGEILAANFPNSAQEAIVLADNIRKWIEAGLPPNEIAVLVPRQVEDYGSVLMAELGSRGIPSRNDSELQDLLKEPAARLVIDYLTCLYGKGESEAWSRLMDLFTPYEEGSRDHLHRLFETTYRAHIRQVKTASKTASPYEDWWTLTGGFLKDVGYPILTTLSGDYDSKPRLHEVVRDIRDRICALLASETTIGRALARLSDDRAVRFLTMHKSKGLEFHTVILLGVETQAFWGRLAEERCVYFVGVSRAKERLLITTAEYRPKPKGASGRWVEYRTPHGEFVAHVTRHMTGRLSGRGQPL

SEQ ID NO: 69810 - protein, 671 aa, Pseudomonas syringae pv. broussonetiae
MYLSKTTLVNYRNFERARFVFGKGVNTIIGENGSGKSNLFRAIRLLLDANIYRSAYAMEETDFFRRKECWKGHWIIISLEFDEIDQNEAIQSLFLHRGAVVDGSKVGKATYNLIFRPNQSIRMRLSELAPGDNDSLRELQAQISITDYESYFTGRSIADFADVAVYRNIVGDFKKVTFPAVSSHLIGSPIPNQLSVAKEVSFTFVKALRDVVSDFSGNRQNPLLNLLKRKSEEINIEKYKLITDKVKALNSDIEILPDVQDVRFDIIDTIAETAGEAYAPAALHIKSDLPTEAEKLFQSLKLFVGENDESYSGDISELSLGGANLIYLTLKLLEFKYQRKKEAVANFLIIEEPEAHIHTHIQKTLFGNIQYENTQIIYSTHSTHISEASNIEKVNVLARKGRLCESYQPATGLDPKEIRNLQRYLDATRSSLLFAKGVILIEGDAEEIMIPALVREVLGISLDELGISLINIRSTGFENVACVFHKSRIRRYCSIITDLDAAIANTDKDDLDSPALVRYKKKMAASQKAGMARKVRLDNFCKGNIYLSVHYASHTFEVDFIKSGNEEEVHDVVDEIYQDDDTKVLSREEIMSGRVSVYGKRALTMATYAGKGWFAIQLADKVSPCTTIPDYILNAIFDAQPSISDSLRLRILQYRISTFKRFNYFQDFGSR

SEQ ID NO: 69811 - protein, 385 aa, Pseudomonas syringae pv. broussonetiae
MDQFSLLKLNDEQILAANYPGSVFLTACPGSGKTRTLTYKIAVELQKISSHREFLVAITYTHRAADEIMERVENLGLETKQLWVGTIHSFCLEWILKPYSIYVPRLQSGFNLINQPDADAILDDICKDFNGPKITSLDCGYFFQNDKPVPISSDKEKHENIKLVLKKYFRTLRKTRKIDFELILYFAAKLLREHPPIASALSALFRLVLIDEYQDTKEIQYQIVCSIFRAGLGKTKAFIVGDPNQAIFKTLGGYPIEVQHFRELSGLAITELSLVQNYRSSSKIIDYYAHFSLSNVNVVAASDDKDYPSLITYNTTISAKFVEDEIVRLVRYSMDDLNIQQSQICIVGPQWQSLAQLTRRLMARLPQCDFDGPGMVPFGRELGRR

SEQ ID NO: 69812 - protein, 770 aa, Pseudomonas caricapapayae
MRIQHLELANFRKLKSVRIDLAAETTLLVGANNSGKSSAMLALRKFLVKPTTFRLQDLTLCHIATLDAIGQEWEQADDSFAIPASNAWADWLPTLDVWIQAAQGELHHIRDLIPNFSWSGGMVGMRFRLEPDDLPTLYADYRKERARVATLLQEIQNQAEQGQQRPTLKLWPQSLHDYLNRRLVKSFKVHWYRLNPDMLSAPCTENRTAILQALADTAVPLERNPLLSLIRVHEINAQRGFGDSADEGQDDSKTGSGRKLSEQLRTYYRRHLDPGDSPDVSDLEALRAIEAAQSAFDTRLTTSFAPALREVAGLGYPNNSDPSIKVATRLGPTDGLDHEAAVLFELDSVAGAPGEPRLTLPETSNGLGYQNLISMIFRLMAFRDNWLRKSRIPEERTTANVEPIHLVLVEEPEAHLHVQVQQAFIKHAYHVLCNDPVLEEFPNLKTQLVVSSHSSHVAHEIEYEHLRYFRRLPSGMAGIPIPVSTVSNLSTVFGQTGKTKEFVTRYLRAHHADLFFADAVILVEGAAERMILPHFLRQHFKFLDQCYITILDIGGSHAHRLRPLVDALGIATLVITDLDAGKDKAAQPVARGAEQITNNPTVRHWMRVKGLGHDVDTLLDLEDAHKVEEIDSLYSIRIAYQTPISVQLPKTGAQGEALPNTFEDSLALTNIQCFSGNRRRGLMRAFSQAIQESETGQALASALFDTLRTGDKAEFALEVLGDPAFGQLAVPAYIHEGLTWLQSKLELKRKDLLVVPAAIVEVTEIVEVAE

SEQ ID NO: 69813 - protein, 624 aa, Pseudomonas caricapapayae
MSPATTEYAEGARDADEVIRECLDLDHPKSFFLYAGAGSGKTHSLVTAVSELKSREHKRLTFEGRQVAIITYTNAACEEIARRLESDPLVVVSTIHAFSWRMIRGFNDDIREWLRIKLGESIEELNAKLLKARDLNNKTARANRASLDSKTRRLAALNEVVSFTYSPTGENRGRQALNHAEVIQMAAAFIQRPPLLDVMADQYPVLLIDESQDTNGALMDAFLTAQSLIPARFCLGLLGDTMQRIYNDGKEHLERAIPDDWAIPEKPVNRRCPTRVVELINVIRSAADDHQQTPKPDAFRGAVRLFCTHQAAGTGFELESRVAERMAQITGDQQWAAGTSERKTLILEHKMAGRRLGFEGVFTPLYAVEHLRTGLLDGTLPVLKMFFEGVMPILAAANESEFALMEAVRLISPLLESDRMKAAPDQLALLQQAGMGCQTLCGLFADNNPSLADVVWALVETGLLEIPERLLMAVAQGVTDEEPPDTIDREALEVHAYRVLLGRPYSEMAAFAGYAEGLSPFDTHQGVKGLEFPRVMVILNDEEAGGFLFSYDKLLGVKAPSDNDIKNQQAGKDDALSRTRRLLYVTCSRAEESLAIVVYTSQPRTAIQRAIEAGWFTAEEVEIT

SEQ ID NO: 69814 - protein, 664 aa, Pseudomonas syringae pv. cunninghamiae
MNLVRIESVSLSGFRCFGPNPITVDVSAEITTIVGPNAAGKTALLHAMLKLFGVTRAQRTILRSDFHLGPDDDPENRDSKYLFIEVSIAFPELKNGTATAETIAPSFKHMLIDRAEKPPICRMRLEAQWDDDGTVEGEVSQELFWVDTLDEQPENDKRHPVAVADRGLIQLYYTPASRDAAAQTRATTGALAARLLRAIEWSSDTEDAVQETTESLTAAFEDESAIAAITKALQTRWSDLHDEVVDTNPRLSLVSRRFEDVVNKIAVVFEQGADGRERGIEALSDGQQSLFYFALAAAVFDLEREVVAGSVEGFRDNALRIPALSIFALEEPENHLSPYFLARIIRQVRSLTDQSRAQAIITSHSPAVLSRVNPREVRYCRCEPKTRVSTVKKIRFPVNEVDASKFVRGAMLAYPELYFARFVLLVEGDSERIVLPILAEALDLLIDPAFVAIVPLGGRHVQYFWRLLKHLGIPHATLLDLDLGRDGGGFGRIKTAIQKLIEFDVPKTAVLGIDKGILSDTDLEKMHEWSTTGDHANLQAWISNNLRPHGVFFSAPLDLDLAMLQAFPDAYAGIIPKGGGPRMAEEKAADAVLGTAGPGLGAYTGPFEVYKALLPAYRYHFLTNSKPATHLAALSRLKQKDLREKMPAVLAEVLKHIEASLRRD

SEQ ID NO: 69815 - protein, 426 aa, Pseudomonas syringae pv. cunninghamiae
MAVSSLRVRPEDWTPIGVKSLEANALKVVRAGINQSVIAGPGAGKTELLAQRAAFLLQTEAAPTPRRILAISFKRDAASNLAARVRKRCHSSHASRFDSMTFDAFAKGLLDRFGQALPEFWRPRPGYEITTYYERDYRNFLDLIAGSPPGDIGTKASLRAIGAKSFERKHLLGAPLPVAAWPKPDVAQWAMARFWHYSLHEGKKSVLTFPMIGRLVELLLRINPMVRDALRLTYSHLFMDEFQDTTQVQYDLVHTIFCGTDTVVTAVGDNKQQIMRWALAMDDPFSEFDADFGGLRTTLFNNYRSSPDLVRIQHVLAQALDSGAMEPISQTEGTIDGESCVILDFPSPKTEARHLAKTISAAIADKKLLPRDFVVLVRQKAGDYADVLRPAFEAEGLSLRNEAGTAGQIMLQELMTEDLSKHLGRR

SEQ ID NO: 69816 - protein, 661 aa, Pseudomonas syringae pv. maculicola; identical to SEQ ID NO: 62490

SEQ ID NO: 69817 - protein, 634 aa, Pseudomonas syringae pv. maculicola; identical to SEQ ID NO: 62491

SEQ ID NO: 69818 - protein, 652 aa, Pseudomonas syringae pv. maculicola; identical to SEQ ID NO: 69170

SEQ ID NO: 69819 - protein, 631 aa, Pseudomonas syringae pv. maculicola; identical to SEQ ID NO: 69171

SEQ ID NO: 69820 - protein, 789 aa, Pseudomonas syringae pv. ribicola; identical to SEQ ID NO: 63754

SEQ ID NO: 69821 - protein, 660 aa, Pseudomonas syringae pv. ribicola; identical to SEQ ID NO: 63755

SEQ ID NO: 69822 - protein, 231 aa, Pseudomonas syringae pv. solidagae
MAQAADDNVDDEEVEEFEVPADAEDDAAGQVRDNVQDPAGEPMVPAPKKKYGKACLPSEPGAATSNQTLIKWLPGKLTIEDLRNASEADKTHVLEDDAKVRVAYQTERAITWNGASETLCGRTLEEDFGLENPDWSQAIARKPLGLIVKGEAAGPAALAKGLHQKVSRKSFDKTKFALAVLTEDEKAWHVPTYIRDGLVWLKDEIRIELETVLPDAILIEEEDLAIGGKHE

SEQ ID NO: 69823 - protein, 651 aa, Pseudomonas syringae pv. solidagae
MSSRANKPDTQADIDLRNCLGNVPPRSFIMKAGAGSGKTTSLIKGLSSVIQMHGDKLKKTRQRVACITYTEIAAGEIWRDVGSDPLVHVSTIHSFMWLLAKPFQNDIRVWVSGRIVEKIEALEEKRATYGPRVQQRTKDKDTRDLERLHRQSGRIAAVKGFRYGTGSNYAKGILGHDDILKLVPCLIAERPLFRTLIARQFPFVFVDESQDTTSEVVEALKTVEREPGVTLCLGFFGDPMQRIYATGTGQVEAEPTWADIPKPENFRCSTKVLNLANAIRSDGDDLVQTPGQRLGNDGIVPTPEGSAHLFILPADDTRDANLVRVREWMAAQTGDDHWRSDDDDSAWVKLLVIVHQMAARRLGFGDLYTTLNSKAPSAFKDGFLDGSAWPISPCVKFLIPIAIAHTRGRQLEVMRLIREYSPLLDKDSLVEVSIAERLKELGHLVALIAAGIVGNSGVTIGDLLRQVHVSELLILDPRLVSYLDPNAVVPVQPKPDEGVDNDDDVQEDDESDKEMASMDAFLACPASQLLPYHTYISERSPFWTQQGIKGAEFDRVLVVLDDAESSHFQFSYEKYLGLKDFSDNDRKHIDAGEETTVDRTRRLFYVSCTRALKDLAVVLFTANPEQAEAHIRQLDLFEDNAIHTGAVFEVA

SEQ ID NO: 69824 - protein, 711 aa, Pseudomonas syringae pv. spinaceae
MHISRLQLVNYRNFKCANVVFNKGVNTIIGENGSGKTNLFRALRLLLDDTLLRAAYRLDEKDFHRGLGDWRGHWVVISLEFDEVSQDEAIQSLFLHGTGNIADGAIGKATYNLIFRPKAAVRRTLADVAVGDTVGLAEARSKITISDYETIFTGKSTANFLDPETYRQLVGDFDAVIFPQELTNPAIGGVIPGMLSISREVCFTFVQALRDVVADFQNNRTNPLLTLLKCRSGEIDPQSFEPITALVKGLNDAIEGLPDVETIRTDIRDTITDAAGETYSPRSLSIRSDLSDEADRLFQSLKLFVGESEEEYEGAIHELSLGGANLIYLTLKLLEFKYQKQKESFANFLVIEEPEAHIHTHIQKTLFDRLNFDDTQIIYSTHSTHISEVNNVVNINILGRQDGRCEVFQPSAGLDAGQIGNIQRYLDAVRSNLLFAKSVVLVEGDAEEILIPILVKKVFGLSLDELGISLINIRSTGFKNVAVLFHNERIRKRCAIITDLDRAFIDTTTDILDSDDKAAAKKKALGSQIAGLQREAALKELCAGNPWLTAHFADHTFEVDFVSVGNVGTVVSVLGDVYKDGGTIATSKMELESGDIALFGTRVLTMARYAGKGWFAIILGRMITPETSIPDYILDAIFQAHIPVSIQTWARVLDYRVSILAASQLHAPGDIDAMRAHIRRYHRAEIDFAGVRAEMLQAFPADGINTILADF

SEQ ID NO: 69825 - protein, 598 aa, Pseudomonas syringae pv. spinaceae
MFVWDRKDLNDAQVAAIEHPGSVFLVACPGSGKTRTLTYKIARLLSELKSDKKRVVAITYTHRAADEIQERIEQLGVDTSQLWIGTIHSFCLEWILKPYGIYHSELMHGFRVINAHDTERMHEELCSAAQGTKLSSFDCAHYFTPNGYVLTCNKTNKHEAIGEVLQAYWKALRAERQLDFELILFYAYQLIENNPSISVLLGSIFECVLLDEFQDTREIQYTILASILKASKGGTSAFVVGDPNQAIYGSLGGYAITASDFGTQCGIAFKEMELSHNYRSSSRIVSYFGNYKVLPSKIEAVGKDKDCASVVSFDHQTHRDALEEELVRLIRFNVETLGIAQHEVCIVAPWWVHLASMTRRLVAALPAYSFDGPGMVPFARDVDNFWYKLARIILTEASPQLYVRRMRWAGEVIADLSDAGVEVPGLDRKTLLRACNAIIITENDGLAFLRAFFDQLCSTFGIDRHTYAALQEHHDAFFESSQKRIDKLIKEGAEAIAELGMFRKVFADRTGVTVSTIHGVKGAEYDAVIAYGLLEGMVPHFSDPNQAETAKKLMYVVSSRARKNLHLISERGRSRGWSGDYQPTDVLTGCAFQYNQLS

SEQ ID NO: 69826 - protein, 774 aa, Pseudomonas syringae pv. spinaceae
MRGTTMPEAVVTTPVAGNITLRFVELCQFRRLGKVQLDVDKKTTILVGANNSGKTSVLAALRHFLSDGSPFGAFDISLSQWPKLRALGNAWEVLKEDPSTVTGSEEQWMEQLGIIQSAMPTLDLWFDAEAGMFHYVAPFLSKFSWKGGAVGVRLRLEPAASVDELKQLAWAYHTARLPVKDMGADSLAWPIDLLDFWLREPHKLGQVRAYKLDADNNPLEGLQTYATQTLPADSSPIERKNLQKLIRVDFVAAQRGLGSEEADSRSASGPHRVGMFSNQLLKFARQHLNVATTGHGHRADLIKAVAEAQQALDKKIHEAIAPSVEEVKELGYPGLHDPQEIRFRTRIQTADLLDHGTAVQYSMQKDSLEELLPEYSIGLGYQNLQSLSYQLVSFKAARLKPEKGAPVPVHLVLIEEPEAHLHVQVQRIFPDKAHKLISPNDKDASGLKSQLIISTHSSHLAHAESFDRLRYVRRIAKSAENLMPTTEVVNLGQIFDDDKKTRQFAERYFRVQHTDLLFANAAIFVEGVAERMLVPLFIERDFKMLNSRYLSFLDIGGSHAHRLKPLVEKLRIPTVIITDVDPVEERAGKPTKDGEPTTTLVAVANTGQAGLQCGNPTLRGWHPKLQQLEDFKNPAEVQLVWKEVAECLVRFAWQLPVAEAGDHWPSTFEDSLILKNIPWFKGLMDEKVDGDGNKIKPPKGALGSVARRVADHENISDLLAALHKLMHGSFKKGDFAASIFEMVATDEPIACPKYIADALEWLQTQLDPNPELMS

SEQ ID NO: 69827 - protein, 649 aa, Pseudomonas syringae pv. spinaceae
MTAVPILGDNDRDADVVEEICGYLTEEPRRSYFLFAGAGSGKTRTLVEVLRRLTGVIEHDKGEQLARRLRMYGRSIRVVTYTKNAVSVINGRLGDNDLVSVSTIHSFCWELINGFNDDIREALIAVKEAQLAKETAEAQAKPKGITPAKQRDLDEIKDDIEAFRATDVFIYHPDRNTYGPGALAHNYVLDATAWLLRNKPTLQTILKDRHPIVLIDESQDTMKGMLDALMGLAEQGGSDLTLGLLGDHRQRIYAHGHADLPSLVPQNWATPELQMNHRSQRRIVTLINKVWEAELEGRTQPTNGVEQHPRTEKAGGVVRLFVGDTSRSPEDKVLGERWCSDRMHEATGAAAWNQGQYQLLALEHKLVATRGSFLDVYEAMVLLDPDAAAPSGSGDNKGPSAVQVLLNELAQLEACVGIYGAVNEFKATEVFRRYGSLDNMPEECAARASRVEEMLKAITAFATACANPKSTVADVLAPVLSANLFEIDHRLSEAYADKSPHLPAPGRGEEESKQARMRRGWCALFAAPWKQLRLYRTYLAGDSVLATHQVVKGSEFIHVMVVMDDALAGGFLISYDKIFGGVELSKRDKENVALGKETTIDRTLRLLYVTCSRAQESLALVLWSSDPAAALARIKESNWFAKGEFQAIP

SEQ ID NO: 69828 - protein, 651 aa, Pseudomonas amygdali pv. tabaci; identical to SEQ ID NO: 63506

SEQ ID NO: 69829 - protein, 556 aa, Pseudomonas amygdali pv. tabaci; identical to SEQ ID NO: 63507

SEQ ID NO: 69830 - protein, 634 aa, Pseudomonas amygdali pv. tabaci; identical to SEQ ID NO: 63508

SEQ ID NO: 69831 - protein, 583 aa, Pseudomonas amygdali pv. tabaci; identical to SEQ ID NO: 63509

SEQ ID NO: 69832 - protein, 682 aa, Pseudomonas syringae pv. tomato
MPTLCQPAINPYPSRHRGRDPVLIESAVLSGFRCFAPRPISVTISPKITTIVGPNAAGKTALLHALAKLFGVTRAQRTVRRSDFHLGPDDDPTSLESKHLYIEVLIALPELIDGTATPETIAPSFRHMLIERPDDAPVCRLRLDAQWEDDGTVEGEVSQTLHWVDTLDDAPPEDKCHPVSVADRGLIQLYYTPASRDAAAQTRATAGALAARLLRAIEWSSDTEEAVHDATENLASAFEEEAAIAAITEALQTRWSALHDDVVDTNPRLSLVSRRFEEVVNKIAVMFEQGPDGQERGIEALSDGQQSLFYFALAAAVFDLEREVVAGSIEGFRSDALRIPALTIFALEEPENHLSPYFLARIIRQVRSLTTDGSAQAIVTSHSPAVLSRVNPTEVRYCRCDPKTRVSTVKRIKLPVNDVEASKFVRGAMLAYPELYFARFVLLVEGDSERIVLPRLAEALNLLIDPAFVAIVPLGGRHVQHFWRLLKHLGIPHATLLDLDLGRDGGGFGRVKTAIEKLIEFGAPKAEVLRITTGILSDADLANMHNWPDSVDHSGLLSWINNNLKAHGVYFSSPLDLDLAMLEAFPAAYAAIVPERGGSRMAADKAAEVVLGTAGPGLKAYTGPFVGYPPQFPSYRYHFLTNSKPATHLAALTHITKAQLVAHMPVVLASVLKHISASLRRD

SEQ ID NO: 69833 - protein, 634 aa, Pseudomonas syringae pv. tomato; identical to SEQ ID NO: 62491

SEQ ID NO: 69834 - protein, 769 aa, Pseudomonas tremae
MPEALVTTPIAGNITLRFVEICQFRRLGKVQLDVDKKTTILVGANNSGKTSVLAALRHFLSDGSPFGAFDISLSQWPKLRALGKSWEVLEEDPSTVTGSEEQWMQQLGIIHSAMPTLDLWFDAEAGMFHYVAPFLSKFSWKGGAVGLRLRLEPAASADELKQLAWAYHTARLPVKDMGADSLAWPIDLLDFWLREPHKLGQVRAYKLDADNNPLEGLQTYATQTLPADSSPIERKNLQKLIRADFVAAQRGLGSEEADSRSASGPHRVGMFSNQLLKFARQHLNVATTGHGHRADLIKAVAEAQQALDKKIHEAIAPSVEEVKELGYPGLHDPQEIRFRTRIQTADLLDHGTAVQYSMQKDSLEELLPEYSIGLGYQNLQSLSYQLVSFKAARLKPEKGAPVPVHLVLIEEPEAHLHVQVQRIFPDKAHKLISPNDKDASGLKSQLIISTHSSHLAHAESFDRLRYVRRIAKSAENLMPTTEVVNLGQIFGDDKKTRQFAERYFRVQHTDLLFANAAIFVEGVAERMLVPLFIERDFKMLNSRYLSFLDIGGSHAHRLKPLVEKLRIPTVIITDVDPVEERAGKPTKDGEPTTTLVAVANTGQAGLQCGNPTLRGWHPKLQQLEDFKNPAEVQLVWKEVAECLVRFAWQLPVAEAGDHWPSTFEDSLILKNIPWFKGLMDEKVDDDGNKTKPPKGTLGSVARRVAHHGNISDLLAALHKLMHGSFKKGDFAASIFEMVATDEPIACPKYIADALEWLQTQLDPNPELMS

SEQ ID NO: 69835 - protein, 649 aa, Pseudomonas tremae; identical to SEQ ID NO: 69069

SEQ ID NO: 69836 - protein, 778 aa, Pseudomonas amygdali pv. ulmi
MHIETVWVRNFRRLKDTRIDLASDISIFVGANNSGKTSAAHALQLFTSASKDRFTLHDFSSECWDVINAFGEGADGVELPTISLDIWFCVTPADLHRVVDLLPSLDWQGSRVGIRVELAAADAGLLRSSFQEARASARHAQLQPAGEGVAQGYVEPAIAQDGYNPRPRDLCDFIADTVGDRLRRDFELRYYILDSAGFDTEFKQLDGYVPLRLVPDKGRSGRDVLGSLVKVDCLHAQRHLSDSNAGSRSEDLSRCLSRFYERNLEKRGEDYDAQRALYQSESLLNDHLERVFGPTLERLADLGYPGVNNPRLLIKTALNPATILSSHEGARVHYALGALGAAEVTATLPDRYNGLGFKNLIYMVIELLDVHGRWLDIEENRPPLHLIFIEEPEAHLHAQLQQVFIRKVLDILAVPEEDSPYCTSQLVVSTHSPHVLYERGFKPIRYFRRVADAGIQQSQVLSMAAFYEAAVDPNDPNDRTRDFLERYLRLTHCDMFFADAAILVEGNVERLLMPQMIAKAAPRLQSNYLSVLEVGGAFGHRFKGLIDFLGLTSLIVTDIDSVSPPAAGALAANGELPVDEDPADAEPDDNEGAEEAEARRKGRKACMVHEAGALTSNQTLIKWLPGHTTIDDLLAATAEQRTQLRDEEGGALVRVAYQTPVAVVWGGATQVRTGRTLEEAFALQNLTWTQHLDRKDLGLRIKGSNNLEIAGIAERLYRKVKSSSFRKTDFALGLLAQEPSAWTVPNYISNGLRWLEDLVAPPPPAVAEAEAPLNGGEV

SEQ ID NO: 69837 - protein, 597 aa, Pseudomonas amygdali pv. ulmi
MTARIGQPDTQADIELRLCLDQRPQRSFVMVAGAGSGKTTSLVKALAHLGQTRRLKLNMRGHRVACITYTEVAVKEIWGDVGNDPLFHVSTIHSFLWTVIRPFQVNLKAWVIARIHEKIAEAQQHHDKPRTRAATRERLVKDIARHQRHLEAVRHLTHFNYGAGSDFGRGVLGHFDVISAAVELIEQSQLLRDVIASRYPVLFIDESQDTRPEVVAAFRRIAETTPVEFCLGFFGDPMQKIYLEGAGVIETAAGWEQITKPENFRCPQRVLQVVNAIREPDDGLSQTRGRMNWVDGNPEPVMGSVQFFLLRADDHRSMKLAKVREWMRRTNDDDHWVSDDPAADFRVLVVVHRMAAARLGFPNLYAALNDNDAPPSIKEGLKDGTAWPLRPFLNYLLPLATAVSENRKLDVMTFLRSECPLLQPTALVGSDPVAVLRALQASTTELARLIFSSDALLQDVLVHSQAAGLLRLDEAWTKYLGPDRTADDEDPEIPAVSAFLRCGVGELAGYRHYLEDLSPFATQQGVKGAEFERVLVLIDDEEGRGQRQFSYEKYFGIVEPSDTDLENLAQGKDSVMDRTRRLFYVCCSRATREPLIY

SEQ ID NO: 69838 - protein, 789 aa, Pseudomonas viridiflava; identical to SEQ ID NO: 63754

SEQ ID NO: 69839 - protein, 660 aa, Pseudomonas viridiflava; identical to SEQ ID NO: 63755

SEQ ID NO: 69840 - protein, 646 aa, Pseudomonas syringae pv. alisalensis
MRKGKRAMKLCSLQISNFQSFGPHPTPITFEDITYLLGPNGSGKTAVLQSLCRLFAFEPGLRRVRPSDFHVPVGLSNAEGGTTLWLEAEFSFPETADDEDNDTVAPHFDHMRLQAAGDVPRVRYRLTATVDDEGDVEETLVYVTQADADGNPIVSSIVPKHQRNQIHLHYIPARRDPSDHIAYGATALLGRLLRATQWGGDRDTVKDLTDQITSCLAGNASVTALGQSLNASWKGLHKGAFFAEPKLTFVNSDIEMLLRHMSVSFTPGHGENEVDFSRLSDGQKSMLYLSLVLAAHSINRDVRSGKNTAIDPAKLKPPAFTILAMEEPENSLSPHYLGRIVNALKGSIGVDAQALIATHAPSMLRRVDPENIRYLRLGPNRCSLVSGIVLPAKEDVAHKFVREAVQAFPEIYFSRLVVLGEGDSEEIVLPRILQAKGAPVDESAVTIAPLGGRHVNHFWRLLSQLGTPYITLLDLDLARYQGGWGRLKYVNDQLTEFESHKALPYGFPAWDDANTRIREKNVPTTGSSETVFDHLEARGIFFSAPLDLDFAMLTAFPKAFNAVPVAPTPESQKAVLGKSHEGADQYTPQEQAWFDAYHHYFKLNSKPAAHLTALSSLSDAELLAGLPPSLDRLADAVIAALEESPE

SEQ ID NO: 69841 - protein, 560 aa, Pseudomonas syringae pv. alisalensis
MIHPDRWTHSPGLTLEANAWHAIKDTEHSLVLLAGPGAGKTEILAQRADFLLRTGSCRYPKRILAISFKSDASRNLKERVSLRCGWEQATRFDSFTFHSFANRIVSRFRVLLTGPDALKPDYSIGKEAIPGEQITFMQLLPIALKILRTSKIARNTIRQTYAHVFLDEFQDCTSDQYQLIKLLFEGTPALMTAVGDTKQTIMGWAGALHGIFKLYADDFAARPLRLYRNFRSKPRLLRMQNSVIRDIDPSALMPDEMIGGDDGVIRAGNFSSSAAEAFSLANLIQKWIEVEDLRPAEIAVLFRGEIDLYGEELMEQLTLRNIPFRNENTLQDLLKEPAARLMIDYLTCLYTRGSNKAWSRLMDLFAPFDDEGNSDRTHKSFELCYKQHQKKVKAAAKTTTPYADWWELAKAFFDTLGHAVMTTLSSDYETKRRLKEIIRDTRDHISTLLQTEPDLPRALARFSDDNAVRFLSMHKSKGLEFHSVIISGVEQQTFRGKIGEERQVFFVAVSRAMERLIITTANQRQRPVRISAGKRWDVARQPHVAFVTYVTEHLSPKQPQ

SEQ ID NO: 69842 - protein, 800 aa, Pseudomonas syringae pv. alisalensis
MKLQAYRLQNYRRLRDVVIELDDEISIFVGANNSGKTSAVQGLYSMLRGEAKKFELFDFSAALWAEIDAIGRTPPGDEDAPKQLPSILLDLWFRVGEDDLATAMSLLPSTEWDGKCVGIRVAFEPQDAHALVRKFHELHEKSNNAASALVARRSVGAEADAENAAAVVADPGEYKPWPESLTKYLTKELSKEYTFRYYVLDERAFVGYQPKEVDYAPLPLGKEPGGAAIIKSLVRVDFLRAQRHLDDPDAGSSDRAESLSRRLSRFYHRNLEKRGDDHAALKALDTSEKELNFHLKEVFSDTLKRLAKLGYPGVNNPEIVIRAALDPTTVLGQDSKVHYVVPGAITAQLPDSYNGLGFKNLVYMVVELLDLHEQWKAEEDKRAPLHLVFIEEPEAHLHAQIQQVFIRNVLRLLEDANDHATFFHTQLVVTTHSPHILYERGFSPIRYFRRVSEQLDHNTEVRNLSLFKTCAADAPAREFLQRYLKLTHCDLFFSDAVILVEGNVERLLLPAMIETAAKRLRSSALTILEVGGAFAHRFQELIAFVGLTTLVITDLDSVAVKTDAENAAEQDAGAGAVDGNNEEDDLKPFELEDDDEAAPGGKKKSKKRGSTCHAHVEGAYTSNQTLISWIPKKRLVAELWEVTAEQKTLSLAEGTSAEVRVAYQTKVLVTVGATTSQLCGRTLEEAFGLENSDWCQAEANRSVGLKLKRAPNSPEELAEKLHERVIGKNFDKTRFALEVLASGPLNCWKVPTYIAEGLAWLETKVAHEIEADAAIANEVATIEPTAAGVVAVIAGAGQTT

SEQ ID NO: 69843 - protein, 643 aa, Pseudomonas syringae pv. alisalensis
MSRRIDSPDTDADREIHACIAETPPQPFVVRAGAGSGKTTSLIKALDWVISEHGASMRAKKQKVACITYTDLAAKEILADVNDDPLVHVSTIHSFYWSITKTFQADIKVWLQNDLRRRITELEEEFKNYSSRVRQTTRDRNKADQQRYARSLETIAGVKTFNYGVGSDYAKGVLGHEDILQLADFLLQNRPLFRRVVALNFPFVFIDESQDTFPSVVKSFKEVEAQMRRKFCLGFFGDPMQAIFMRGSGDIPLEDHWRAITKPENFRCAKQILDVANAVRAQGDGMEQVRGLHERVDGELKPVEGSARMFVLPNTLNRIEALARIRAWSAATNNDEGWTTPDIALKILVIVHRMAANRLGFGGIYSALNDKTSEGMKQGMQDGTGWPVRPLLSFALPIVAAVKAGNEFAAMNLLRKFSPRLAPVALTGRRAAAVLRELHAAMSRLVAMLDEAGTTIGDIALHLCDTGLFEFDDRYVRVLGFVRDVADAAQEPEAADAVPAEGLSSDAAMAKFFKCSAQELWPYERYVSEGSPYATQHGVKGAQFERVMVVMDEEESDYRTYNYERVFASAEARAADRARALGGDENTWSRTLRLLYVCCTRAQRGLVLTFFVADPTTTLENVVASGILPRSAVFTHEVLAGWP

SEQ ID NO: 69844 - protein, 647 aa, Pseudomonas syringae pv. apii
MIRKGKRAMKLCSLRISNFQSFGPHPTPITFEDITYLLGPNGAGKTAVLQSLCRLFAFEPGLRRVRPSDFHVPVGLTNAEGGTTLWLEAEFSFPETADDEDNDTVAPHFDHMRLQAAGDVPRVRYRLTATVDDEGDVEETLVYVTQADADGNPIVSSIVPKHQRNQIHLHYIPARRDPSDHIAYGATALLGRLLRATQWGGDRNTVKDLTDQITSCLAGNASVTALGQSLNASWKGLHKGAFFAEPKLTFVNSDIEMLLRHMSVSFTPGHGENEVDFSRLSDGQKSMLYLSLVLAAHSINRDVRSGKNTAIDPAKLKPPAFTILAMEEPENSLSPHYLGRIVNALKGSIGVDAQALIATHAPSMLRRVDPENIRYLRLGPNRCSLVSGIVLPAKEDVAHKFVREAVQAFPEIYFSRLVVLGEGDSEEIVLPRILQAKGAPVDESAVTIAPLGGRHVNHFWRLLSQLGTPYITLLDLDLARYQGGWGRLKYVNDQLTEFQTHKALPYGFPAWDDANTRIREKNIPTTGSSETVFDHLEARGIFFSAPLDLDFAMLTAFPKAFNAIPVAPTPESQKAVLGKSHEGADQYTPQEQAWFDAYHHYFKLNSKPAAHLSALSNLSDGELLAGLPPSLDQLADAVIAALEESPE

SEQ ID NO: 69845 - protein, 560 aa, Pseudomonas syringae pv. apii
MIHPDRWMHSPGLTLEANAWHAIKDTEHSLVLLAGPGAGKTEILAQRADFLLRTGSCRYPKRILAISFKSDASRNLKERVSLRCGWEQATRFDSFTFHSFANRIVSRFRVLLTGPDALKPDYSIGKEAIPGEQITFMQLLPIALKILRTSKIARNAIRQTYAHVFLDEFQDCTSDQYQLIKLLFEGTPALLTAVGDTKQTIMGWAGALDGIFKLYADDFAARPLRLYRNFRSKPRLLRMQNSVIRDIDPSALMPDEMIGGDDGVIRAGNFSSSATEAVSLANLIQKWIEVEDLRPANIAVLFRGEIDLYGEELMEQLTLRNIPYRNENTLQDLLKEPAARLMIDYLTCLYTRGSNKAWSRLMDLFAPFDDEGNSDRTHKSFQLCYKQHQKTVKAAAKTTTPYADWWELAKAFFDTLGHAVMTTLSSDYETKRRLKEIIRDTRDHITTLLLTEPELPRALARFSDDNAVRFLSMHKSKGLEFHSVIIFGVEQQSFRGKIGEERQVFFVAVSRAMERLIITTANQRPRPVGISASKRWDVARQPHVTFVTYVTEHLSPKQPQ

SEQ ID NO: 69846 - protein, 764 aa, Pseudomonas syringae pv. antirrhini
MRIQHVEISNFRKLLSVRIDFANETTLLVGANNSGKSSAMLALRRFLVSKGSSFRLQDLTLCHFAKLDEIGKEWETPPANFEIPTAKDWADWLPSLDIWVSADQGEFHFIRDLIPSFAWRGGLVGMRFLLEPDDMNMLYTDYRKERARVAELEDALGKEDPLGSPLTLWPQSLHDYLNRRLGDKFKVRWYRLDPQQLKKPHKSTRMAQMQQLSPTSLPLESNPLSGLIRVHEINAQRGFGDHSDDNQGDNTRPSGARKLSEQLRSYYSRHLDPGDSPDISDLEALRAIEAAQSAFDTRLSSSFESAIKEVEGLGYPGRNDPRIKVASRLAATDGMNHEAAVLFELDSIQGAPGAPPLHLPETANGLGYQNLISMIFRLMGFRDEWLRKTRAASAEVIDRIEPIHLVLIEEPEAHLHVQVQQVFVRHAYQVLCRDALLERYPNLKTQLLVSTHSSHVTHEVEYQNLRYFRRLPAGMYGIGVPVSTVSNLSNVFGDGTKTKEFVTRYLRAQHADIFFADAVILVEGSAERMMLPHFLRNKFPFLDRCYITTLDIGGSHAHRLRPLIDALGILTLVITDLDAGLNKAAKPVQRNADQITNNPTLRSWMKLMHLGSTVDELLELPANQKEHQIDDLYSVRIAYQTPISTHLPATGKAIQTLPNTFEDSFVLSNAGHFAEKTNGTGMMKAFVKVLNEAQTSEAVGEGFFNELREGKKAEFVLLVLGDKNFPNLEIPEYISEGLNWLESKLRSKQIELLVIPPECAEVTP

SEQ ID NO: 69847 - protein, 615 aa, Pseudomonas syringae pv. antirrhini
MSEAVIADADDTMQACLNLADPKSFFLYAGAGSGKTHSLVEAIRELKGRERERLTFEGRRIAVITYTNAACDEILRRLEFDPLVEVSTIHAFAWRLIQGFDNEIREWLRIKLPQDIEKIEGELARSRGDNKTSRANRRKLQSKRRRLENLDEITKFIYSPIGDNRERQALNHDEIIKLTAAFVPERPLLDVLVDRYPVVLIDESQDTHAPVMEAFLKVQQLAKTRFCLGLLGDTMQQIYGHGVTRLDKAIPDDWLKPEKVVNRRCPRRVVDLINVIRSTADTHQQTPKPDAIEGVVRMYCISQSQEQAPNLEEGIAQSMAAITDDGEWATGSAGRKTLILEHKMAGRRMGFEKLFTPLYGVEHLQTGLLDGTLPALRVFSEGVLPILTAKDDHFLVLEAVRSRSPLLSKDAMQSTGDQSAHMQRVEDATHALLSLFEKNDPTLSEVATLLLQTQLLDVPDNLVGAMVLGAPSEAPDPEDTNAMTNYAYQLFLERPFSELAAFASYADGLSPYGTHQGVKGLEFPRVMVVINDEEAGGFLFSYDKLLGVKEPTKTDRDNERDGKDNALARTRRLLYVTCSRAEKSLAIVLYTPHPALAKRNVVAAGWLQESEVEIL

SEQ ID NO: 69848 - protein, 711 aa, Pseudomonas syringae pv. berberidis; identical to SEQ ID NO: 69824

SEQ ID NO: 69849 - protein, 598 aa, Pseudomonas syringae pv. berberidis; identical to SEQ ID NO: 69071

SEQ ID NO: 69850 - protein, 682 aa, Pseudomonas syringae pv. berberidis
MPTLCQHAINPYPSRHRGRDPVLIESVVLSGFRCFAPTPISVMISPKITTIVGPNAAGKTALLHALAKLFGVTRAQRTVRRSDFHLGPDDDPTSLESKYLYIEVLITLPELIDGTATPETIAPSFRHMLIERPDDAPVCRLRLDAHWEDDGTVEGEVSQTLHWVDTLDDEPQEDKYHPVSVADRGLIQLYYTPASRDAAAQTRATAGALAARLLRAIEWSSDTEEAVHDATENLASAFEGEAAIAAITQALQARWSALHDDVVDTNPRLSLVSRRFEEVVNKIAVMFEQGPDGQERGIEALSDGQQSLFYFALAAAVFDLEREVVAGSIEGFRSDALRIPALTIFALEEPENHLSPYFLARIIRQVRSLTTDGSAQAIVTSHSPAVLSRVNPTEVRYCRCDPKTRVSTVKRIKLPVNDEEASKFVRGAMLAYPELYFARFVLLVEGDSERIVLPRLAEALNLLIDPAFVAIVPLGGRHVQHFWRLLKHLGIPHATLLDLDLGRDGGGFGRVKTAIEKLIEFGAPKAEVLRITTGILSDADLANMHNWSDSVDHSSLLSWINNNLKAHGVYFSSPLDLDLAMLEAFPAAYAAIVPERGGSRMAADKAAEVVLGTAGPGLKVYTGPFVGYPPQFPSYRYHFLTNSKPATHLAALTHITKAQLVAHMPVVLASVLKHISASLRRD

SEQ ID NO: 69851 - protein, 636 aa, Pseudomonas syringae pv. berberidis
MNMTLSSRRVSSENWKPVGVKSLEKHALEVVCSHVNRSVIAGPGAGKTELLAQRAAYLLQTGAAPAPRRILAISFKRDAASNLASRVRKRCHPDHAGRLDSMTFDAFAKSLVDRFGQSLPERWRPRPDYEITSYYERDYKDFLFQDVGLPPTTIGTRADLRAVGPKIFERNYVLGQPLPIDGWLCPTVGQWAADLFWRASLHGGEKSVLSFPMIGRLAELLLRVNSMARDALRLTYSHLFMDEFQDTTQVQYDLMSTIFRGTDTVLTAVGDNKQQIMRWAMAMDDPFSEFDADFSAKRTSLYNNYRSSPDLVRIQHILAQALDIAAVEPISQTAGTISEESCTVFDFPSPHAEAHNLAVSVASNIASGKLTPRDFVLLVRQKAGEYAEVLEPAFTAQGLSLRNEAGLVGAIMLQELLVEEVSVLLVSLLRLSMTPRAGRYWSECQKWLASLRGVEFDDEIGHSKLTRELDACAIWLGANRSSLPTTLKAARSLVDEVMGFVGLDHLKSQHPAYAQGEWLEKVLDAAATHLFNCAIKCADWPSALDTYEGVNAIPLMTIHKSKGLEYHTVIFVGLDDGAWWSFSNDEIEATAGFFVAFTRAKQRVIFTYCAKRGGRTKIATLYRLLQTAGVQIKQIS

SEQ ID NO: 69852 - protein, 626 aa, Xanthomonas axonopodis pv. dieffenbachiae; identical to SEQ ID NO: 65862

SEQ ID NO: 69853 - protein, 570 aa, Xanthomonas axonopodis pv. dieffenbachiae
MTKVWSDQKRDFLECARHALALGGPGAGKTHVALVKARNEIRSGILKPGQKVLFLSFARPTVARVIEKASELISREDLKQLEVSTYHGFAWSILRSHAYLLNGRPNLQLLPPPEAAAHLADIDKAQHENEKRRLFEQEGRLHFDLFASLASELLTRSDRLSAIFSDTYPIIILDEFQDTNSDEWALIQQLGKRSRLIALADPEQRIYEFRGADPRRVGDFLENFGAAHFDFAGENHRSSGTDITSYGNDLLTGANKGKVYQQVKITRYDFMYGKSLHFTAKAAVFSALDRLKKVPDKSIAILVPSRRLMLEFSDYLSSAADGLPALNHDVAMDAEPPALAAGVIATLLAGGTAGDVASRMLGALHSHIRGRRGGRPTPQTELDLAGALSGFISSGKIRGSKRLLIVSEVQRISELRRQLQLTGDPAEDWLHLRGLLASSTAEALKQVATDARYLRLLHRGSVLRTNLGALWRAQGEYMGAEEAVRSALMQEHFAAAQKDWRGIHLMTIHKSKGKEFDEVIIYDGLYQRVAKAPQDPKICAQDLLVLRVGVTRAIRRTTIVTPKRDPCPLL

SEQ ID NO: 69854 - protein, 679 aa, Pseudoalteromonas sp. P1-25
MAITNVRVEGFRLLKDVNLSLEKETTVIVGRNNSGKTSLTSIFERFLRDQGKSVRLEDFSSENQSRFFDAKKALDNQAEVAEVLSILPRITLTCTLEYDTEALDIGPLSPFVIDVDEASHEAIVCMVYKPKLDSISKLLTPLDTSEKVDTTVHFVKHLKENINSCYDLSVLALDPTDNSNTRAFSGSVEFNPLIMCNVIRAQRTLEHAKDGETNVIGKLLNNMFQTASSPNAINSDQVLASQLRASVEGVEHDIQKSFDMMLQKLMPAMGLLGFPGMDGTVIQPQTLLNVESLLSEHTKICYKGEGNVHLPEGYNGLGTRHLIYMLLHLESYHKEYRSLEVRPATHVIFVEEPEAHLHPQMQEVFISQLQKIVKKLSEAYPDDPEWNVQFVITTHSSHIANTANFDAIRYFLKYPNISNPYTIIKDLKKGLKKISPNDKKFLHKYMTLTKCDLYFADKAILVEGTTERILMPKLIQLVEEEIEENSKLSSQYVSTIEVGGAYAHLFYPLLDFLEVKSLIITDLDSVKQVKRKTRLVRVKCPVAEGEWTSNVSIKNWFKEEECAFLQLLMNKTDTEKVIENRRIAYQVPEEDNQAACGRSFEDALILANMKMFKMRKSGNYANRAWLEAKKLAKSDTAFRFAILEENWNVPRYIVEGLTWLSAPKLTVETVTSEVEKNCL

SEQ ID NO: 69855 - protein, 577 aa, Pseudoalteromonas sp. P1-25
MSDKAILAAEKAQQEVNDCIKQGVSFRLEAGAGAGKTYSLVKALQAIIFDRGARLIKANQRIACITYTEVAKNEIIQEIDSHEAIVVETIHSFCWSFMRHFQSSMRDIINEFEGYKEEIEAQGGIEGKLIEYKRGYFKAYSDKISIKHDDVPLLMARILKLPKVQRLFFQQYPILFIDEYQDTNVQFMDALNEVFISTKFGPLIGFFGDHWQTIHSTDFELKNYDLHAIDKGSNFRSTKKIVDVLNKLRPNLTQSERQQSFMGEACFYHTNSFKGARRTDSHNKGDLPIESVIALKDTLLEDLKKNGWDLKETKVLMLTHNLIASQQGYGQLAKVFGRYKDSFTKKEDPVVQYLADTIEPMCEAFKMKKYGEMFRILGKWPTITCHMDKLKWKNEINQLNELRETKDIGSVISFLLSSEKLPKSKKVLKLEKELKEGLANIENTPLSNSLVKYQRLLKIPYSELINLVFFLGGGTPLATQHGVKGAEYDNVLVILSGGWNHYNWPRFLDLLKTKKINKDHHDGFYRSRNLFYVSISRPKQRLAVLTTQALSANAILAAEELFGVDNVVDIEVPVIDS

SEQ ID NO: 69856 - protein, 591 aa, Pseudoalteromonas sp. P1-13-1a
MNILVDQVRIAGFRGIANLEISLPRVAVLIGTNNSGKTSIIKALQLALGDYSRSLTEEDFHIDGEDHGSESIIVDVRIVATDEHGNRVQAFEAEWIEEFEDIIQSEADGHQFVIIRTKCERDKVKGGFLTSRFWMGTWPDFEGWADVKVISKRQIRKRYDALPFISIDAQRDIHQELREKTSYIGKVLSSIEYDEKDVEELEKMVADINEKAVAKSEPLSELKTHLDSLSQSFEGNGQTEITPFPKKIRDLSKRFTVHFGEHASNSFSMEYHGMGTRSWASMLTVKAFTELSAKKHAEEVEPFFPIIAAEEPEAHLHPNAQRTLYQQLADSRGQVLVSTHSPFLAAMANLPDLRSMVKVDGKNCVKQLSNAFDPEDLLILQREVMRFRGEVLFARAIVLFEGVTEEQIVPAMFEHYFGFSSFVAGVTCISVAGKNYAPFIKLGCSLGIPVCVVSDNDGNTKSSVESQIANIKKDTGLELNAQEFQIYFLSDGNDVEAELVNILKINPELIEALVLSETKGSNNPRYVEAKQKELSTLDSEALLEKLRGAKASYAGFLADVIFRNPQKREKDTLVPNAFKAAFEQVKGWISV

SEQ ID NO: 69857 - protein, 630 aa, Pseudoalteromonas sp. P1-13-1a
MISLSPAQANIVKSPIGTPIQILASAGSGKTRVLTERIRFILENTKKDRVIALTFTNKAAEEMQERLVEVDDIEDRTWISTVHSVAQRILEQYGHTLGLPSELHIYDRDKDRMEVFLQSLRDEGVDIDTYLNIEDSKEKKNRQQVMQNYMDTFSIIKRELLSQGEADERFGVESGVWKIYQDYQNALLASGGIDYDDILIYAHKLLLTQEWIADLYRTKYKHICVDEAQDLNKAQYEFINAFCGEKIKSILMVGDPNQMIYGFNGSSEKYLLTRFVEDYQPTQYQLTENYRSTKAVINVANKIKPLSQTEHEMALNGVFHKQSCDDEYVEALWVVNQINELLKLGIHPEIEGKISLKNMVVIARNRFVFKAITEELEQKNIPYHFKKGERQTEPTSLFGKVLDFALRLKLNPKDWVDGKKLCAILKVTPPEDWGNENYLSVWANDVLNSEILFSDLQSKLLTQIQNLDADEPNIPKFHKELVAELNVLANDEALEDKKPEIERSLAELEEFRNSWTRFKSKGLGNSLQAFRNALALGQLAETAQGEGITLSTVHTMKGLEKDIVFLIGMVEGVFPDYRAKTAQEIEEEKNSAFVAVTRAKRWLYITYPQKRTMPWGDIKFQSPSRFIREL

SEQ ID NO: 69858 - protein, 648 aa, Vibrio cholerae
MYLSNLKAEGFRCFGKEFNIQLTDGLNVIVGENGAGKTAVISAIRQLFHDSESGIYSVTSDDFFSPFVARGKSAPSFSISAEFDGLDVGDKVAFLPWVGASSTALLNLQAENKEIRGRFKKVIWGGKCKSSLFDPELLDLIQCIYLPPLRDAESKLSNGRQSRLSKLLKALNRKQLKQCKKDNELHPLESKLKEFNESLAGDEKLGIKDANKLITKNLTNAIGHYFGQNTSIQFAESDFTKIAESLTLLFFPDLSVEDQELFRELSQNSLGYNNLLYIASILAELTLDDKDEEQPHFKLLLIEEPEAHLHPQLQIRLLNHLKSVANENKSVQVIVTTHSTVLASSVELESIIHLSKSPEPIATPLRTCGLPTASSQFINRWLDVTKSNLLFAGGVILVEGIAEQMIIPTLARIALKGQKEGRKSLEDLGISTINLNGIYFKHFMQLYCNIHNVDDAKGELVSNSIPIRCAGLTDLDPPKVTKKHVPDPENKGVTKEIEENFIPYEGNMKAGTNHAINLVDSINKSTNARLYVSKYKTLEYDLAMEGNNAALMSKIIASLWPEPTKGESPIIKDFTAMSKVDWTKKTPQEIAEAAHKILTRIDDDNIGKGMFAQVLTDEIQCDGSNFTVPEYIKNAIFWASSIDVAKEE

SEQ ID NO: 69859 - protein, 585 aa, Vibrio cholerae
MKVEFTHEQLDYVNSSIDEHTFLEACPGSGKTEVVAAKVAKEIDSWKKCPGGLAALSFANSATDELTSRVSKHLPNGREMFPHFLGTFDSFIYKNIVSPLSIELTGYAGEGGDASIRIIEHTAHMGYRTKYSYAKRGKVKAHHYSFDLIKHSVVFDTGDSILNRTLSSISLKDWQLDDLIATKSKMLEGGFATYRDIEYLAIKAIADKKYEHFVHLLVKRYPLIIIDECQDLSEEQLAILQALADKGTKLHFVGDLHQAIYGFRDVEPAKVKQFVEDNNFTTLQLTRNFRSCQNIVSLCGKLTGRTGIVGNVSWLEPRCIVLQYNNCPTELTDTLEDKCDGFSNNVVVSRGHSILRKLQTSVTEPNNIQKLALAVKLFTPKDMEALNQSLQYFSEFLRYHLKESYKPNSFNSPQSITTNLSWRKFLYESLNYLICNDLQKIDIKWSDWTKIAKSLIRALPKQSFCSEDISSILAPLEVVNLTSPSGSAKLEVALSLGDTTTSLLSYKKSTIHGAKGETHDVTIVISSASAGNDSHWQSWLKDPDSEAARFAYVASSRPKERLIWAVKTLKLPERKQLEAIGFTII

SEQ ID NO: 69860 - protein, 770 aa, Vibrio cholerae
MHLESLTIKNYRKFRASHNTVCFVEPEIIELGTEETRPASVIAPSTTLIIGKNNVGKTTIANALKLLCNNEQPSASDFNLTYLNELFNQYKSAFEIDETTNFPSLDTPSIEFCLSIKVNFNDEDLMTHLAPFIAISEDGNEGPVCVKIKVRIELAEEPKFKEEVSRIFKEADTEEKKKQRFEKFYSLLSKTTSSVSKEGNLYQTSFIDRLGDATESFSLKKLIKIKEIKANRHLKEGVLSDVFNKIVAFQLTNDISSREALEKNIEDINALITGNVSPKSSDISKVLGQIESSDKVDLNLSGNVTYDDIVRRLIKYNFMDGEDYIPEDQFGLGYINLLNIIGEIIHFVDSYEDKSHFSRINLLFIEEPEAFMHPQMQEFFIKRIDDAVKKALEIANTSSEISKTLQCQIAITTHSSHIVNSKIHSSNTFNNINYLTSIDKCTKSINLSDEAIVSSTEDDNGKILNFIKKHIKYKVSELFFSDAIIFVEGVTEETLLNYFLEIHPKLSHHYISVFNINGAHGKLYLPLAKKLSIPSLIVTDLDIKREKCEKGEKHKETESCSVCGQIAKSDDAECVKGTPPSFVQITSLADRTTTNTTLKELNKQLRGKSDSEADKLDCIEYFEDENLYVVFQKDSIESQHASSLEEALILTNYDNDLINNVIEICKPNIYNSIIKLGADPGGSRSNLIDHSYKLQKKLSDSKSDFSNNLIFELLALEEGDALPKLPNYLEHGFAWLEAKLELNDISVAPEDGNESSDNVVFQEEVLDDAE

SEQ ID NO: 69861 - protein, 708 aa, Vibrio cholerae
MTPNEIREKEIQQSIFEQVDNFRSFRFNAGAGSGKTYALIETLKYVSVHKILAKKSPQKIACVTYTNVAVNEIKARLGNSDLVHVSTIHERVWDVIKRSQPELLKCHKEKIEETLEHIDQELQNSDKSRFFNGLSEGDQRSLVEFVFENKDIYYRVKNLNAAGFRGAYIQHSSGEVQNILRGCLSNIANFKYVIALLYKKDNLQKCFERIIEGREKRVTYDSKTNTDRLHYMKFSHDTLLEYGLKLVTNHKTLCRIIIDTYPYFFIDEYQDTNENVVNLLRTIHEYAEQKSKNWMVGYFGDAAQNIYEDGVGERIIDLHGGLFDIYKEFNRRSHVQIIEIANKIRDDLIVQEPIYEDKNHGSVSFFHHNSENKIETAKQFLSFYSDELEGSPDLDNHSSCKINCFVLTNQLMAELNEFKDVYDAFKASTIYYDQLSTLVLSQQLEKLHPTVLNIYHLVKLYHEVTKSEASYYDIFGAHSKNMTFSEASLIIREIKGEKIETLDDWCNLIITKLENEDLRKNIFRALDNCTNFDRSAIETSEAFRATLIDSIHSLMLDGAEQQDEVEQKTKMILELRIRSLVCWLNFIDGFENDKFSYHTYHGTKGEEYDNVAIILEHNFGSRNRNKFKNYFDLLQKTGEERNTLLSDQDFKNRHTNTKNLLYVACSRAVKNLKVLYLDDISEIKNGIEHIFGVVNPWLYDDIENITST

SEQ ID NO: 69862 - protein, 648 aa, Vibrio cholerae; identical to SEQ ID NO: 69858

SEQ ID NO: 69863 - protein, 585 aa, Vibrio cholerae; identical to SEQ ID NO: 69859

SEQ ID NO: 69864 - protein, 671 aa, Vibrio cholerae
MHISNIRIQNFRLLKDTTLDLEDELNNELSLLIGKNNSGKTSFIVLFEKFLKSRKFYYDDFPLSLREDILKLSEKTDEYSLAIRLSLSIKYGEEDNLQNLSEFIVDLDPKCNTARISFEATINKSKLLKDLDTVTKRKNEFIKKNLSDYIQVSYYIFNEYSDFEPQHRSNLIPKDASDVHNLINLKIIQANRNVTSSDAKPQERKILSHLTTLFYNSKVKISHDELDGINSSIIEADSQLSSNYKTFFEPFLHNAKSFLGLTDLNVVSDLQSKEIMASHSKITYGKNDTELPEYQNGLGYMNILYLLLNIEIEKADFEEAGRDINLLFIEEPEAHTHPQLQYVFIDQITKTLKGIKGLQTFISTHSAHIVKKCNFKDIRYFQAQKDKANTEIRNFYIELQARYADEKNVEVDKVEKENFKFLNQYLTIESSELFFAEKIIFIEGTSEKLLLPYFINQFDKDGIGDEGDVALTSQNISILEVGANAKAFKHFLDFLEIKTLIITDLDTTEKRIKKEKGKKDSISYPACPAKVGTHTSNATLRHYYKSPDFNDQNFSEWMDKLKAHNHGDPSPLIKVAYQDVQDGYQGRSFEEAFVSVNMDAIGINLDDVDGLKNKDRFDDCKSDPDKFVEEMLDSKGKSSFASSILYLALSKDNLKWNPPSYIKEGLKWLAK

SEQ ID NO: 69865 - protein, 674 aa, Vibrio cholerae
MARQVTPQQRIQECIADKSSFVLQGGAGCGKTETLKQTLQYLSKDYPKKRIACITHTNLAVNEIINRVGEGYNVSTIHSFLGSLIKNHTKAIHKVIHEIFIVANAEVETEESSGLTGNDLKKANHENYKRAYKKYAKLKYIVKAETSPKELGKREYDKAPDEYSQTLNEKIAELNTEVRQIIDDKDHRRIKYNDSRFDRFNDLSFGHDSLLKITTLLFRLYPKLGRILSDKYDFILIDEYQDTHEDVVEVFLKHLPKGRKTTIGLFGDAMQSIYSDGIGDVRAYIDSGDIVEIPKEDNFRCSEQVINFVNSLREDALKQEPAFKIKEDGNQETLKDRQGQVRLLYAIWDNSKPHSRSSTEEKQAYLDFVDKLIDLADGEELSHKKLMLTNKSIAGKVGFASLYKVFADRYTEVKDEIEKVLSSIQALDLAELCDAYSGSKKRYNFILSELKKSGFVLNNLKAKEKVVAAFEKITTGELSIAKTLEVAFEENVISKSDSYLAYVDRKDAFLAELKGDKEYQNFKAIFNSGANSLTAMAKEIPELTEETFNEFRSNFNRERFYELLFSESTPFSEVIRYYRYLNEECDYITMHKTKGSGIENVLVVLDEYFWNQYNFQFSHDSTEPSCAFTSPNMKLFYVACSRTIKNLTVVKVVTSDEEEYLLAAFPEFKRVVID

SEQ ID NO: 69866 - protein, 770 aa, Vibrio cholerae; identical to SEQ ID NO: 69860

SEQ ID NO: 69867 - protein, 708 aa, Vibrio cholerae; identical to SEQ ID NO: 69861

SEQ ID NO: 69868 - protein, 648 aa, Vibrio cholerae; identical to SEQ ID NO: 69858

SEQ ID NO: 69869 - protein, 585 aa, Vibrio cholerae; identical to SEQ ID NO: 69859

SEQ ID NO: 69870 - protein, 770 aa, Vibrio cholerae; identical to SEQ ID NO: 69860

SEQ ID NO: 69871 - protein, 708 aa, Vibrio cholerae; identical to SEQ ID NO: 69861

SEQ ID NO: 69872 - protein, 770 aa, Vibrio cholerae; identical to SEQ ID NO: 69860

SEQ ID NO: 69873 - protein, 708 aa, Vibrio cholerae; identical to SEQ ID NO: 69861

SEQ ID NO: 69874 - protein, 770 aa, Vibrio cholerae; identical to SEQ ID NO: 69860

SEQ ID NO: 69875 - protein, 708 aa, Vibrio cholerae; identical to SEQ ID NO: 69861

SEQ ID NO: 69876 - protein, 671 aa, Vibrio cholerae; identical to SEQ ID NO: 69864

SEQ ID NO: 69877 - protein, 674 aa, Vibrio cholerae; identical to SEQ ID NO: 69865

SEQ ID NO: 69878 - protein, 648 aa, Vibrio cholerae; identical to SEQ ID NO: 69858

SEQ ID NO: 69879 - protein, 585 aa, Vibrio cholerae; identical to SEQ ID NO: 69859

SEQ ID NO: 69880 - protein, 770 aa, Vibrio cholerae; identical to SEQ ID NO: 69860

SEQ ID NO: 69881 - protein, 708 aa, Vibrio cholerae; identical to SEQ ID NO: 69861

SEQ ID NO: 69882 - protein, 671 aa, Vibrio cholerae; identical to SEQ ID NO: 69864

SEQ ID NO: 69883 - protein, 674 aa, Vibrio cholerae; identical to SEQ ID NO: 69865

SEQ ID NO: 69884 - protein, 541 aa, Streptococcus pneumoniae
MDKIRVLYVPASRTPEKELGNASGSMLSRLVNSINWTEDEIKEIKDKIDELNNTFLSENGALTQINNEIQKSWELYHEDNRFSQAELIINSSEMAAALRQIALKFSPTTTEEAFTVSDLGDGLRSIFYFSLVDSILDIELEITKDREENPDNPRFKLVPPILTILAIEEPENHIAPHHIGKLIKRFKQLGNNDNSQLILTSHSPVIVKRIDPEDLRYLRIENNDSVLQTIVSDIQLPQSNDESYKYIKGAIQAYPELYFAKLVVLGEGDSEELLLPKFFDLLGLEIDSSQISVVPLGGRHVNYFWKLLNALRIPHITLLDFDNERYGGGWGRIQYAIKQLILNGVAKEKLVTVTAESQKSRVLDDDEIDKIKDWKIDRPDNQLLEGWIKMLEKFNVFFSAPLDIDFLMLQYYKEHYLETLSTNEGPVVSYTDENSDNKKIKLTKMDRTNDYQLIGFKNRISEAIQATLKDKSGPGDSFTEEEKELMIWYQYFFLGRGKPTTHMQFLSSISDDELTRNLPPVFKKIVNRAEELLGDIEHGKE

SEQ ID NO: 69885 - protein, 605 aa, Streptococcus pneumoniae; identical to SEQ ID NO: 64133

SEQ ID NO: 69886 - protein, 665 aa, Labrenzia aggregata
MRLENVSIRNFRLLRRVSIDLAEDKTTTIFVGPNNSGKTSVMEALRLFIGPGGEAPKISFHDLSQFRHRDLKRIEVLLTAEADPEKRIALLKRFAPRMRLDLTFAYSEDQADLVAATQLLMDLSPGTNKVRMRIDYTLENAKKLLDDFEARPRKDLSLCDFLKDTFRNHFKRMFFKVSPDGKEVEKLDDGGLLKSLLRIDLVPAQRHVDDDEGSRSAKLSKLLHDHYERFYQVDDAAGYQAIEDALAQSAGDLTGKYGKAFGRLTKRLQNFGYPPGQKAPDLRVRAELSAETIYRDNARIYYASEHAGKGGAMEEFELPEKYNGLGYKNLIYIVLQLESFRAAIDAVKGDKPRVHIIAIEEPEAHLHPQMQTVFISEISKALETDGVTTAQVLLSTHSSHMIAQSEFEPVRYFRRVGRQVVMQDLSKLPLPENDPDLLDFLRRYIRLTHCDLFFADKAIFVEGQVERLLLPMMMEEQAKVEGCETLGSQYISISEVGGAYAHKFKPIIEFLGIPSLIITDLDSVDDNNEKCPVAEGIGTSNVCLRTWIPAKANIDELMVCDEAAKTQGCIRIAYQVSQNGRCGRSFEEAFIYANVPWLTANHAKLSTTKAAVKKAVDAGLVAQAWALSAKLAKVDFALDLINAPGWGIPLYIQQGLKWLAEHPAK

SEQ ID NO: 69887 - protein, 566 aa, Labrenzia aggregata
MAGGTSGKMMTEADEKILECLKARQSFLIDAGAGSGKTSSLIRALDFIRGPDRTSIMGEGQRVACITFTNVAKNEIIERTEHDPLFVVSTIHDFLWASIKQFQKELKPALLAFNDSLPATSRRKHSQAELEVALETVPTIIYSDRGANFPEGRIFHDDLLGVAYFMFRDHPLLSKVVAARFPFIFVDEYQDTDPLVVTTLLDHLLKTDQPPLIGFFGDKMQSIYQGGVGELSAGHKALLVQIKKEENYRCSRAVIELLNKIRTDIQQQPAGANLPGAAGYVSLVGVDPDLDLSALAVQKARDAFGWDIEGELKVLFLTHRLIARKAGYADLWAAYNSRGGFTQDRFQSGEDPIASFFVNKVEPFILAWREGKVGRAISYLKERPIQIAGAAEKARVKEALNGLLALIDAGGTIEAVLKHLRDAQLVTLLDDLESAIAGPVAPADPGSPEAAHQAFMALLLAVPYVEVSRYRAVLENSMPFSTKHGVKGDEFKNVIVILDDAGANWNQYSFGKLLAGTDTSQSREKRTRNLLYVCCSRAKDKLIVVDLGAGAQAKIEELFGVGAVAM

SEQ ID NO: 69888 - protein, 680 aa, Flavobacterium daejeonense
MKIKDIAISNFRLLEEVKLNIEDDLTLIVGKNNTGKTSLFEVINMFFSEKNNFSFHDFSQTTYSKFEDSFKIYEASVKETDEEKKEALEISLISSMPNIQLQIQIEYDKAKDSLINLSEFISDLDDSKNIATIKLQYQSKDSLRLFGAFEARKEKSQKLIEWLNENITSYYDIKCYGGDNVIEENFKRKLFTVLYFETIQASRKLDDTKSDKNKTLAVGFSDYYRETNKDNNEDVENLEKQLKLTSSDLEKKYEKILNELLEKLKLFGVEPHLTIPEIVLQAGFDPENILKNNIKYFYKQDGVQLPENFNGLGYSNLIYLVLKVVSFIEKFKKAAPLNKSETLTILIEEPEAHLHPQMQQVFISQIKRTLKETKEKENLSVQVIISTHSSHIVTEAGIDVDRSFERIRYFSKLYDNKEKRYKVEVKDFNEFRKESDKETFRFLKQYMTLHRCDIFFADKIILVEGTTERILLPLMINKAAKSLNNEYVSIIEVGGAYTVKFKELLKFINAKCLVITDIDSVNPSNSRKACQTDTANAETSNSTLLNWLPQKKLISELISCPDKDKFDTDLIRVAYQCKEDSSTYVARSLEEAIINRNKDFFASKYKIEEDEKLVQDYFYLLKGKDIAKSLPYSLAPASGEKTDFTFDLMTFSETETKLEWKIPKYIEEGLVWLANNEIAK

SEQ ID NO: 69889 - protein, 615 aa, Flavobacterium daejeonense
MTAFEQIQKLIEEGKSFVLEAGAGSGKTYTLIQTLNYLILNKGDELIKSNQKIVCITYTNVAKNEIIDRIEHNELVLVSTIHEFLWNSIKQYQKQLKIELCKLNEINLEKDKEKAKEKGKEVNSRYIENLAERIELVDKVEYNDTSFNDFEKGIIQHDDVIEIAKMMYENYPLLTDIVSTKYPYIFVDEYQDTASETIFCLIDCLLKRNINKCVIGFYGDSHQKIYDYGIGDLEKYYTSNGGIIELVKKEENYRSSKSVVELLNNFRKNIQQKPQREIQGSAKFLYWSKHPIEPAKDKLKFRAGLLGIKNKFYDDVIKKLSESGWIFEGDANAKVLVLANSRVAQRAGFGSLYSIFSTRFHQSTKERLLDRTHHLITFFVGSIDKKTSQERKTGVEHLIGFWNNGNQNEVIRFIKKNGSIFNDEFKHNHKKQVAELLETLSTNRKDWKIKDVYEFASKNGLISNRKIIEFIERISVDPEKLNDEEKERQVRDKKLFDSFMDLSYSELLTFWKHVQNNTVFSTKHGTKGDEFDNVLTVIDDTEWVQEYNFKNFFNNTEEKPERKLRTRNLFYVECSRVIDNLMVLCLSELDSTALANIKTWFGNDNVIDIEEYLKN

SEQ ID NO: 69890 - protein, 733 aa, Flavobacterium aquidurense
MKIESVLIRNFRLLKDLKLDLEKDLSLVLGKNNSGKTSILSALDKFINQSENKKISADDFNLSYKEEIKNLIESSNELSEEDFNKDIQGITLRIIASYSDEDDFENISKLMMDLDPNNNYLILGYDYSMHFNEYQIFRSDFKAFKIDEKRKLNESIKKEKGKPENERKLYKEKGFDIFFKLYQDKYFRYKRKSIACDYTSRVILENKFIDLDNSSTKVNLKNVINFKYISARRNVTNKEADKTLSSQTSQIYERSEKNEEDSKSIEEFKETLIETDETLTNVYTTLFEKIVDKVGQFGGIKKGESVIKVISSLERRELLKGNTTVVYEHDASNSLPEFYNGLGYMNLISMIFEIEILLQEFKRAKDEKPADINLLFIEEPEAHTHPQMQYVFITNIQSLLEEGIIKGGCTNKKLQYIISTHSSHIVSNCKDFNAIKYLKKESQNSIKAKNLKDLEKDYLKAGEEKNYRFLKQYLTLNRSELFFADKAIFIEGDTERILLPAMMKKLDLEEALLADELELLSQNISIVEVGNYANIFERFINFIEVKSLVITDLDSVKRDFIRDNKGEIKKTKNGIDRQADFSCRVIEGQKTTNPTLNFFFPSLLFSDLLSKSVEEKRFLKESTWTNNKNGFLQIAFQIKDVKDYCPRSFEDAFFNIDENINFIKKNRSKFNGLKNMKLFYDTSKDAYDLGEKCIESKGSFAIDILLNSDENYTEWKIPAYIKQGLLWLRKEQI

SEQ ID NO: 69891 - protein, 716 aa, Flavobacterium aquidurense
MVTKRADLELEVQKIFEHIDNGNNFLLSGGAGSGKTYSLVQVIRQIIEENPFVKVACMTYTNSAVKEIEERVNHKNLNVTTIHDFLWDCISNYQKDLKENLIELINESSSKISTINNEKVGLDYYDNLEKIKYDNFLRIADGIISHDEVILLAEKMFKNSIKLCSIVKDKFPFIFIDEYQDTQKEVIEIFLHHLKNSKKKSIVGFFGDAMQSIYEGGIGNIDEYIGEHDKVREVQKTQNRRNPKRVYDLANELRTDGLVQTHSNDKNAPNMDKNSGEVKEGKVIFYYSQDEKNDIVKQNLIEDFLWDFKDNKETKELNLTHNLIAKKAGFPNLIEIYDKDPIVKFLQSIRKYIRLTNFSHDEMITVDNLVISLKSDIDSKVKSLGLRSFTVQKFIENLIIKYPLHALTTQNLLDKIKPIDNNTIKQEDRSVIFKFKEQTGIIDIDFIYQIKVMKEIEKGIDPRFAHLYDTIKKEKYQKVRSLFFDKDNLIDDKKQNEEDESKKGSKRDILIKFLYKIQFSIDLYEENKFNEFLQIIDLKKKEGEGIITFKNRLKKIIDDLKSKSTEKIENILDFVNESGLLNLNKDDRFNKFKIEKKYLYDKVKEVGFTEFINLYNYLEGKTPFSTQHKTKGDEFDNVLVVLDNGKWNDYNFKYLFEKKGSENVLERTQKIFYVCCTRAKEDLAIYYYGINKTENALIFETAKEWFGDNLIDVDKL

SEQ ID NO: 69892 - protein, 665 aa, Flavobacterium aquidurense
MAQHKNPYISRVQIKNFRNFLNVDVELDHKQVIIGENNVGKTNFLRAIQLILDKDYSDSDRQLTPEDFHDSIDKPMENGEEIEINLEIKGYEHNSKLKAQFVDAVISADPPTLRFTYKFVANRDEFGKIINYKYIIFKGSSEDNRFTNEDRSYINIYVIKALRDVERELKSNKNSPLYKLVKQYEVSTQDLEEISEALKEAAEGILELDEIVHIKEILSNRFASLSGIQTDHKITLRTFDIDTERLLYTLQVYMGLKERPVSELSLGLANILYISLMLILLKDKTILPIIKAEQFELLLTEDEKGILSKLYELSDKGNHVLKKEIEESDIESLYDFMDEHNYRHQAFTILAVEEPEAHLHPTLQRLIYREVLHSSNTSVIFTSHSTYITSVTPLNYIVHIRKIDDSSKVFSTVNLSLSRKEKKDIERYIDAKRGEIYFGKGIILAEGITEEYFISAAAELIEKNLDNFGIVVCNIDSTNFKPYIQLLEALYIPWVLFTDGDYYEVEEYVDEKGNYKTKRIYHIMDKNTGREFGYKGNENVLKILSTLGIIAEDDELDEDEIRAKGCFIGEYTLEVDMMNDADDTGIEILKKVYKELKSGGDEMQENFEEAIDAEDYWLALKKIEGNISKGRFAQRLADNLTTELVPSYIIEGIEAIVEKVKDSYE

SEQ ID NO: 69893 - protein, 615 aa, Flavobacterium aquidurense
MNNLFFEDLELIKKDDKQYEAYQSMSNSVIIAGPGSGKTRVLTLKAVTLAKSHIHKPCGLACISYSRESVRELKKRLKSYGYTASNKDFIGTVHSFSLLHVIQPFAHLYPEYNVIYPIKILPNDIENKLYHSTLKDLSIEDPYKLSLSDINKHRSLSLQGRSLVNMESSELIIKAAKIYEAKISETEYIDFTNIINLSAKIINEQEYVRETLRSQFPWLLVDEYQDLGKALHEMVLELVFYAGIKLYAVGDTNQSIYGFNGGYPDFLLELTDNDNLKTIELVSNYRSSQHIIDASIEALKPVPPYPKYVAGKRKDDIADFTFISCDNGMEPQYEVIAKKIIPNLLAREIALNEIGIIASSNSQIQHMAIFMKQEEIPSFIVKWSFENSAVVVWLQDCAQWCIDKETQSFEKLFIFWRNLINIHNDSRKNNVDIYLKTIFHKVLTNSLESNDCYEWLRHITDELKLRDTLINSEIYPNEIDNLDKLLSEAKLRNLKDSKIKRFANLGSPENEVTITTRHSSKGLEFEVVILLGMEEGNFPYYLNLNDEIALSEDQRLCYVCISRAKKACILLRSESFTKQTRWGEKTFSYPPSRFWVSLHEKFGNDQNTFTQNNYE

SEQ ID NO: 69894 - protein, 733 aa, Labrenzia alexandrii
MHLSKIRIRNYRRLADVKIDLDREISIFVGANNSGKTSVAHAIHFFISGARDRVSFHDLSACRWSNIDAFEADQADSALPVLSLDLWFGVDQADLHRVIDLLPNLEWQGAMVGVRIAFAPRNEVETLTRFQERHAQAQEAVASLEHPEGEEPYVAPPRTLREYLEDELQREYEFKYFILDEAQFNEDFEPNGGYEPQELLRDQGRTGKDIINSLITVDFLHAQRHLSDNEGGSRAEELSRHLSRYYQRNLERHGDDYNAIRALADSEILLNQHLEQVFADTLQRLAQLGYPGLTNPRLMIKSALNPATVMNSQDGAHVHYALNDEGLTLPDKYNGLGFKNLIYMVVELLDLHAQWLAIEEKRPPLHLVFVEEPEAHLHAQLQQVFVNKVLEILAAEDDAPDGFHTQLALTTHSPHILYERGFQPIRYFRREGTGTAQASKVLNLSEFYRTTANPSRDFLERYLKLTHCDLFFADAAVLVEGNVERLVMPLMIAKAAPGLRSCYLSVLEIGGAYAHLFRTLIEFLGLTTLVVTDLDSVNGAADEEEDADAEPVDGDDQEDEVVGGSTCTPETPDAVTSNQMLAQWLPGRNRIDELLGADAAAKTIAADDFGLGAIRITYPCTVNLARGDEQIERAGRTLEVAFAFDNLEWTQDAANRELRLRVRAPQNLEHLAQRLHEKVHSKRYKKTDFALALLAKDPDAWNVPQYIAEGLEWLEATLGVAVEEVEQQEGDAA

SEQ ID NO: 69895 - protein, 627 aa, Labrenzia alexandrii
MTSRIGKPNTDTDTALHERLAGEGNRHFVMVAGAGSGKTTSLVKALAQIERTQRPALRRNGQQVACITYTEVAVEEIRGDVGNDELFHVSTIHSFLWTVIKPFQNNLREWVSNRLREKIGEEQEKIDKPRTREATKARAADNIERYNRQLTDVNAVKSFRYGTGSDYANGVLGHSDILKIGPEFIGEHALMQTLLTRRFPVIFVDESQDTDPAFVDALREVARAVPLGFCLGFFGDPVQKIYLQGAGPIPPEEGWETFEKPENFRCPQAVLRVINRIRAEDDQLQQTRGRHIVVNGEDAPVEGSARVLILPADDRRQERLEEARRWLADQDGDEGWLEEEDEEALRLLVLVHRMAAARLGFRNLYGALNDKAPEELKSGLIDGTAWVVRPFLSYVLPVVLSRHEGREFEIMRLLRKHCPRLQPDALAGVDTAGLLNGLQGQIGELVAKLEAGGDARVGDIVRFMRDNSLLAFDDRYVELIDLYAGTAEPVAEPAIDNAALRFMQCDASELWGYRKYIEKMSPFATQQGIKGAEFDKVIVVVDDQEGQTNTFSYGKYFGVAPPSDTDSANIAAGKDSVIDRTRRLFYVCCSRALSDLAVVIFTEETAQMREALLAKGFFEAEGVHVLA

SEQ ID NO: 69896 - protein, 648 aa, Vibrio cholerae; identical to SEQ ID NO: 69858

SEQ ID NO: 69897 - protein, 585 aa, Vibrio cholerae; identical to SEQ ID NO: 69859

SEQ ID NO: 69898 - protein, 687 aa, Staphylococcus aureus; identical to SEQ ID NO: 63306

SEQ ID NO: 69899 - protein, 582 aa, Staphylococcus aureus; identical to SEQ ID NO: 63307

SEQ ID NO: 69900 - protein, 447 aa, Bacteroides vulgatus
MQEIFYTYLSPLRDAVSCLRPYSYDNKTSQLFNQLTKYDKGDESIPLNEEKKKSLAKNLYQIFEDDAYDWKHILTTGKSKVNEHLEGTGITLKHPDIEMRYVGREFSDVVRGIELKCPVYKTVEAGQEQKYFTLSQNGLGENNLIFTSVVLGDLINRCEDHALEIYNALLVEEPEAHLHPQYQNTFFEYLNELQSKGLQVFVTSHSPTITAKSDVNNISILQRKQSIIQSFSFDELSEDDYPKESKRHLRKFLDTTKAQLFFANGVLLVEGVAEAIIIPILAKKFLTEKIDLCKSGIELVNIGGVAFNHFGLLFNNDDERKRLLSKCAIITDSDPEEDKDKSDRAQKAKDLEKHNLKVCLATHTLEHDLFEQSERNKAIMRDVYRKMHAQTDDLRGAFNASTLMKKLKSNKDKAEFALQLCDRLETEVAFDVPDYIKDAILFVSPSE

SEQ ID NO: 69901 - protein, 584 aa, Bacteroides vulgatus
MDIQLSAQQQAVVDCNEPRIVVKACPGSGKTFSVAARMSKLLRDNKLSRHQGIAVISFTNTACEVIQKELKETFDCRNIGYPSFIGTIDSFINTYIFLPYAHLVMGCDCRPEIVGTEFNKWYDYDASKRGYKGKITDPNYFIDKVSFDINGEPISLVPEKEFNFSWRKMRNKNGQYRKDVAGIIEAKRIHFAQGKANQADATYFAFRILDEYPSVAQNIVRRFPILIIDEAQDTTELQMAIIDKLSQYEAESIMLIGDPDQAIFEWNTANPHLFMKKYNSSDWHSLDLSENRRSSEKICQLANRFSGNEMCSIASDKDYIDEPCIKGHLDTPESVNQITNHFIEKCNEMGLDESEYAVVFRGQSFGATYFGLANNDNSDAVRQNSPWKNGYYSVRDIVYGKYLIDQGKYSDGLALIEKGCYKTKKQVRYVSASTIRSRIAEIGFRIHRENLLKFIQKLPPTNKTLSEWITELQQKGINLTVELDKANVSIELLFRTSNNQLQRVRPYLKTIHSVKGMTLEAILVFLSKKAVSTNYATILNNPAKYSVNNNEELRIVYVACTRPKKLLWIAVPSDDIDCWRNKLF

SEQ ID NO: 69902 - protein, 738 aa, Escherichia coli
MFIKKLTLVNYRNFKKANFYFDKGINTIIGENASGKTNIFRAIRLLLDSSMPRYSLKLNEGDFNRSIGNWRGHWIIISVEFDDIAADETSQSLFLHGIGNAEDEIVSRATYSLIFRPKSFIRQDLSKINPGDINALNEVLNNITIDDYETILVGKGALDLSDSSNYKKIVGDFDGVSFPKILNHPELGVKLPNILNIPNEVSLTFIKALRDVVSDFHNNKTNPLLTLLKRKSGEISSTDFKPIADLVRSLNSEIEQFPDICTVSSDIATTIKDAVGDTYSPKGMSIKSSLSDESDELFQSLKLFVAESVDGYEGAIHEMSLGGANLLYLTLKLLEFKYQHANQSIANFLLIEEPEAHIHTHIQKSLFENIKYDNTQIIYSTHSSNISEISNIKNMNIIGFVNGNCEVFQPSTGLADEQCEFIQRYLDAIRSNLLFARSVVLVEGDAEELLIPTLIKKVTGLSLDEIGISLINIRSTGFENVALLFSDERIKKKCSIITDLDEAFFDITIPEDADNNDVEIKTKKKAAASQKSGAERKKRLQDFCNNNDWVEVFFADHTFEVDFIKSGNSNYLANIVRDIYKQEAIITNSINELNSGDIKISGVRALAMANYQGKGWFALTLGKVIDFKTAIPDYILNAIQFAHGDFNRQLKYKVLEHRYNSVIKHVAYAQLQISKLNEAKDLVLKNSWIKYIKAYEDGLSVFSPKWDLFDISKDDIDILKAEMMKDLPIENNDILGRL

SEQ ID NO: 69903 - protein, 595 aa, Escherichia coli
MFVWEKEEINKDQEDAINAQGSVLLIACPGSGKTRTLTYKIALELSKLNDDKKFVLAITYTHKAADEIKERIELLGVDTSRLWIGTIHSFCYEWLLKPYSIYHENLRDGFKILNTYDSEALITTICSNYKTEKVNYYDCNHYYTSKGLKLSGYIKKHGAIKNILDEYHIQLRKNNQIDFEQMLYFSYQLISKDAISKILSGVFSYIFIDEFQDTKEIQYAIVAKIIQSSEGTINAFVVGDPNQAIYGSLGGYAISQAELEKITNSRFSYMTLDKNYRSSKRIIDFYINFNVLASKTTSESKFQNYQSVVTYNQKVYKDNLVEHISKYIEYNVNQLGIEQKEICILAPWWMHLAALTRTLVTRLPNFSFDGPGLVPFSRDIDNFWYKITQVILTEPSPNMYVKRMRWVSDIFSEMHFCHVDIQRLNPRLFLNIINDIKIDEVDGLIYLRKFFDELFRRINVDISSYPQLQEHYDSFFKSSQDRIHRLKKDNEHFATDINAFRNAFKPRTGIKVSTIHGVKGGEYDTVISFGLLQDMVPNFNDSSDESAKKLLYVIGSRARKNLHLISERGRRSKYKDYESTKVLSGTKFNYDADPF

SEQ ID NO: 69904 - protein, 699 aa, Acinetobacter pittii; identical to SEQ ID NO: 64082

SEQ ID NO: 69905 - protein, 577 aa, Acinetobacter pittii
MSEILDNPAIIAAQLAEAKINAAIKAGRSFRLEAGAGAGKTFSLVHALKSIIKERGRSLTQTGKKVACITYTEVARNEIAQEIEDHPAILVDTIHGFSWAFMRQFQKAIREILIEDDSRKEKVEQGGGIGSKSVEYELGFFGVNDQKITLSHDDIPTMMAKLLSKEKFRKIFSNQFPVVFIDEYQDTNRQFMEAITEYFLKPKVGPLFGLFGDHWQTIYGSEYELAEYPIEEIAKGSNFRSVPAIVDILNNLRLDLPQAVSSPDAKGEARFFHTNSYKGKRTDERSSKDDLPIDIARSTRTSLIQRLQNEGWDIEKTKILMLSHNVLASEQGYPQLIKVFDGRNDQFAKKEDPVIKFFAEIVEPMSVSYSLSNYGEMFKIFGSRPAITKHEDKSCWRRDMDQLLKLRQEGTIGQVIDHLKQTKRPSPPDRVLRRDDELISLRNSPDTEMSSTLLRYNKLREIPYKEVIEVTKFIEKQTPFATQHSVKGAEFENVLVVLGGGWNNYKWPQLLELLETKKLTNANTKGFYRARNLFYVSISRPMTRLAVLATQTLSDTALVTVNNLFGSENVIELSLDT

SEQ ID NO: 69906 - protein, 641 aa, Acinetobacter baumannii; identical to SEQ ID NO: 63760

SEQ ID NO: 69907 - protein, 552 aa, Acinetobacter baumannii; identical to SEQ ID NO: 63761

SEQ ID NO: 69908 - protein, 641 aa, Acinetobacter baumannii; identical to SEQ ID NO: 63760

SEQ ID NO: 69909 - protein, 552 aa, Acinetobacter baumannii; identical to SEQ ID NO: 63761

SEQ ID NO: 69910 - protein, 605 aa, Acinetobacter pittii
MHIVSIEIQNFRGIRKTKLLLPEHAVLIGDNNTGKTTLLEALDLVLGPDRLGRQPVIDEHDFFRGIYTGVINSSSPIEQGENESSQPDVSSENEAPKIIIEVVVINLTAEQKREFNDVIEFWDSITNQIVQDADIARIDNKNITEALRVTFHGWYDVEEDDFKGATYFSRSLIEDPKPMLFTKKHKYLCGFLFLRTIRTGSRALSLERGSLLDIILRLKEVRPQMWESTLQTLMEVSVADDPSLGISPILESINTALNKYVPKEWGVRPHLKVSNLTREHLRKVITAFIATGDGTHAAPFYRQGTGTINMLVLAMLSQIAESRQNVIFAMEEPETAIPPYAQKRIVHELCKLASQTIFTSHSPYVLEEFDASQTIVLTNDPEGTLLQRPIELPSSIKLKRYRQEFRTRFCEGLLARRVLIAEGATEYTAFSVVCRRLAELDPENYSSLEALGICIIDADGETNIPSVAELYKSLGKKTFAICDRQNSNNKDLIEAQVEMLLMHEEVGIEDLILNGAKEEALNRFAKQLDIPQHLQRFNLETQTKDLLKEYFCWSKANWGIADFLAQCSKDEIPLWLCQAASRLKEACMPSISDENLTSINTEHGR

SEQ ID NO: 69911 - protein, 604 aa, Acinetobacter pittii
MMDLTDGQLDVIKAEGHLLVIGGPGSGKTTISIIKAAQIIESSLEPSQKILFLSFARATVSRVVEAIEYEQRIPLSIKNRIIVDTYHAFFWRILKTHGYLLGLPRKLEILTPSHEAIALSTIRSKFPNKNLSNEQKENKKKDELEEKNRLAIEEGKVCFDMFGSFVVSLIQGSERIRNLIASTYPVIILDEFQDTNHIQWEIVKALGLSSRLIALADPEQRIYDWIGADPARLTHFQENFSSVMVDLTTDNHRSSGTEIAIFGNDLLVGKFRQEAYIGMDFDCFESFPSPAMTKLVTTIYSARKRLMDANIDNWSLAILVPTKKLMRLVSDTLRQPPSGMAEIPHIAAIDMDAAILGAEIISFLMHPIKNNQHFSYFIDLLCNYFQGKNGDAPTQSGLQEAESIRKAYFDFLEKKAQGKEIRRSSILVKILDTYNEVNAVVLMGNPDEDWKNIRSILESSACKRLKEIATEVRNIRILNRGSQLRQQLTEDWQDNRYSNALAIIRQAFVQEHFSRNSKPETGVVVMNMHKAKGKQFDEVIIFEGWPNYVKGEIVANPNRIVRSNLKENIDSQARQNMRVSVTRAKSRTTILTPKPDICVLLRDI

SEQ ID NO: 69912 - protein, 699 aa, Acinetobacter baumannii; identical to SEQ ID NO: 64082

SEQ ID NO: 69913 - protein, 577 aa, Acinetobacter baumannii; identical to SEQ ID NO: 64083

SEQ ID NO: 69914 - protein, 616 aa, Mycobacterium gordonae
MVVCFAEDLTVLVGENASGKSAVIDAIRLATTAATEGPGVSFSAETDPTRGTDDTTEVRIAAAYDELSTAEKAIFLAQLVDSDDVLTYNVTYSRDVDLPQWRSARHSTGRSSVEDPEPINRKRIAHVYLPPLRDAIRELDSGSGERIADVLKVLTSADNDKPKREEFRSAANAALRSIATLPLPETARNRISEHMEQITPPSRRHDLQLVGKDQDLRRLAGLLRIQLADEHIDPIRLASSGLGYANLAYIATIIVQLVNAKNYDLTLLLVEEPEAHLHPQLQSVLLKYLEDQAAQSRRKAATDDSLNPAGRVQVVVSTHSPNLASSVSVDKLVVSSRTKRAVAGTGGASDRAGWRTEVTALRKLGLTPAEVRKLDRYLSVTRSAVLFARHVVLIEGIAEAIVLPELARLACDGDEIRLRHLAAASFVAIDGVDFEPYVKLLLNGPAHRVDKVIVVTDGDPVTKPTPRRLGDQRRKRYLELFPDEPRLEVFVGGTTLEAELFSMVANEELLKRAYLKMHPQSEDKWDELFSNLAKDIPTRATAFAKAIKRETGDIDLGKGDFAQLVCEAIAERREQDDSASFDIPAYLKGAINSLMADVAYLVADPENADADAHEPQ

SEQ ID NO: 69915 - protein, 595 aa, Mycobacterium gordonae
MRMHTNLSEEQEAVLAADVRLVEACPGAGKTHAIAARYIAAATSKGQAAALLSFTNAAVDEAARRCANVPQALDAPNFVGTFDRFLHRYLVTPILVRAKGKPPRYVDSYNDLPATFDTKVRHGSVVGAGLALGHFHADASGDLYYPSDDPADAPAADRPYVAQLNKVGITPSALTNLAQRRINELTASGIYDCEQSRLKALSILRDADSAWLHQRLTARFAEIIVDEFQDCSAIEHEILRSLQSVGIHIVVVADPDQAIYEFRQAEPSSYLGYRSALQTDQVVYLDDNWRSSPAICAIASSLRSISTRPILSRRDSSQSPHADVVYVAGGTPAYARREFDRLATELNIDPAERIVLAATRKAAHDLSGRVPRLAESTTNTSRLIRSIATLRYSPDPTERKAAIIVVEEVLLGTIKFPAELRRVPRDEQLDAAGMDRSQLRIMVARLVDASETWTDVDSATASIRTTVAGLLSVIDFGYTPTGQRFQKAKSADWSAWSRAGEATDHSQGLASAHIHAVKGGEWDAVLLDIEDDPRGARPHIIELWAAPETHEARRVLYVGASRARRLLVLAVAPHRLEALRAVLDMSSVTVEYLVE

SEQ ID NO: 69916 - protein, 569 aa, Vibrio furnissii
MYIRTVEIENYRAFKNFEIKFSPLSVIIGENEAGKTNLFDALALPLNNNDISFNKKRLSVSDINREAIKEFYQAIINGKDDDEIKLLIPKVRVEVEFTEPKNIIEEGVIGKWIIGEEADDSYKIRYDFKPKDTEQFVKAAKKLLDGIGDIKDTRWFNLPIELYDYDITQSNNGLRVSYSDLRLIGINSINAERDDFAESNTQKSNDILTKMLISALEDSDKAKINSAYTSFFDAIENTETFTKIVTPDPDFENFFDEIVDKLECIPNLPNLKSILSNITLKSGESYLYQRGLGYRNLVYIYLLFEFFRGNKNALNLCCIEEPEAHLSVNNLRFATDFIYKSTQKGGSSLQTLISSHSPLVINKLELTNVIVLSGNNAIHLIDSKQHLTNYLRKRPNFDILKLLLSNKTVLVEGTTEEMLINAILYRNNENVSSLEVISIEQTGFTTFMDVWLQVNKGNTKKKLSIIRDYDDNDSTKDKHQKYDTDNDNIRVRTTTKYTLEDDLAEADGNLGRLNTLFKKKYKTSADMAKFLKKSKAERMLRIADSILDEENKDPISLPKHIQEALDFMK

SEQ ID NO: 69917 - protein, 480 aa, Vibrio furnissii
MIEIQIAGAGAGKTHGLAEKIIAHYDSTSHKKIFAITYTNNATQNISQAIIRQLGYLPDNIVVCTVHTFLLNEVIYPYSPFVLNEVHTTSSQCKTFSNFPAGKSAEKKQREAKSTISRLKKIGVIHVDETYSAAWRVVDENYSKHNSQKKKSKVRKVHKLLSSAIDKIFLDEAQDLDETALKAFQKIGENSADIYMVGDPKQAIDYPQDFKGWLAKNKANKKVKVLPNITTSRRVPQRILDLSNTFCPKGQEQISLSEVEGRLTYITTEDDHYDAVLSHHIENGSLVSIFRKEGNYSTKQAGALPEFDPEVEELLTVKFPEYEEGVVIYSLQRFFASLLSKNDNNSSIRKFLAKLEIPYEKELFKNLCRSAEQYSSSKDNSAKYTISSIQRTKGLESKVCVLVLTPAIFKCLMQDAVTKFNKTWNMVYVALTRAESELVVAVDMDLLGNKYNHDDIVKSLESIGFEVLNPNHPNHKTKKN

SEQ ID NO: 69918 - protein, 566 aa, Escherichia coli
MEISYLKLKGFRNFKDAHINFNSNTLIIGANDVGKSNMLHSLRMLLDKSVSDSEIEPNELDFHLENGNSCEEFEIILHFKDINEDAVLSILKGNVSDSGESFIKYVAQKSDLSYKLFIGDSLESLQEINSRYYLKFVNLKYIQSQRDLERFIRKEKRQLLKIAQQSLNSDERKEDEDLLGEISTDLQLINDKISQLVYVERATKEVNDELKKLAHHYSEYSVQLDTGAIGINDFIDNLQLGANTNGSNVMLGGDGRNNQILLALWKAKSIKEHDIDNEVIFYVIEEPEAHLHPHQQRKLADYLIAELPGQTIISSHSPQIAVNFEPGSIIRLLDRGGHTVAASEGCSKGISDGWEDMSYRMSILPAESFFSNGVFLIEGPSEILFYHSLAKSLKIDLDYLNISLISVDGISFKIYAAILDALEIPWVMRTDNDVSKLKDKEKWHYAGINRCLDIAGIEKFEHSDKKISSQDTLANGDWQKVSDEVNRSGIYLSKIDLETDLVEELGASILDALDKKNNQSAIEYLQKKKAIRMRILLKKIKNDLDKLSMGDLVKPLHHLVKIVKGE

SEQ ID NO: 69919 - protein, 541 aa, Escherichia coli
MSVFSPTTQQASAIDYPKSMVITACPGSGKTTVIKEKIRNITGCLPEHKGVIAITFTRKASAELERRCKADGHDIKHSFFGTIDSFCLNEIIIPFLPKIWGGKPTECKVLKKLDSPYKYYLKEDFFGTPSIVNVNEDAGYKRLYDEGMLWMSSFAALSLKILNESPAAQRYIKARYSHIFIDEYQDSSLSQHQLFLKINEIGLCSIAVGDVWQSIYEFRGGNAELLLDLVRDKSIFEHFEINLNHRCHSSIINYASRLLDSNFVLLPSESINVYRKRLPGNLKDVSMTLSSWISKWLNVGQWGVEQASQIAIFARKEQSLLLLCSGLTSNFRVYIDTPLDKLGTECSDLYKDLLAYRYKAIGTAQELINKVFDGLIMNDNHQFLLRKKIKILRSNLTDEELINYFHEIAGMLNIQFTESNDNAVLEIISDGMYLKQFMPLDKNEVQVMTLHKSKGLEFKIVLHLDMDEWSFPYRLVNEVDRNIALYPSLPQETNLHYVGITRAEKCCVLINAELRQNSTGAFKKSEASYFFKLPQLEGLYR

SEQ ID NO: 69920 - protein, 594 aa, Escherichia coli
MYLAKLGIRNFRNFQDVDIPLAGNIVLLGENRVGKSNLLFAIRLVIDPTLPDSMRQLKLSDFWDGCDLTTNPQIEVHLDFADFDSDPLLSALLTDFRIAENPSVARLSYVFRKKDEIAGKPKSSEDCEFLVYGGGQESCSIASRVRRRIAIDMLDALRDAEAQLASWRNSPLRPLLEDAFASLSRDDLEMVATTLESATQTMETFPSVKSLEDSLRSGIIDLAGTAHDLNARLRFAPADPLRLMRSLSMFIDDGKRGITEASLGSANVALISLKLAEFSWRRAKNERNFSLLCIEEPEAHLHPQLQRAVFEKLFHTPEETQALIVTSHSPTLATIAPLRSVVRLCRGRDGGSRAFSLANLPVTSEELDDIERYLTATRSELLFAKGVIFVEGDAEEVLLPGFAEALGFNLNQLGITICNVAGVNFEPYVKLSASLGMPFAVITDWDPLDGTKQPLGKKRSINLWQAYSAVSTDIPKLTTENITWFNNSSYEDCKPVLEKIGVFLNAQTFEVAVADTPGLKEALLDILDEQGFGKLRSSRIKSWRSGQQIDPSQLLAMISDVGKGRLAAKLRKKVPGLIPPEYITAAIKYVVSNV

SEQ ID NO: 69921 - protein, 597 aa, Escherichia coli
MSYQMFNRYALSEALNELLPNKEQYNAAIETGHCVVIAGPGSGKTKTLTTAMARTLMDDVIDPRGVACITYNNECATELEDRLSKFGVISSDRSFIGTVHSFALNQVIIPYSRCIPGLLPNNFRIATKDECRLAVEIAYESIFSDNCDPHVRWRFAEEKRRRDVNRLLPSWLDKNPELAKFIEAYEAELRRSDLIDFDDMPLIAFRMINEHSWIRNAIKSRYPVLFVDEYQDLGHALHELVLLLCFEGGIRLFAVGDADQSIYGFNGANPRLLEKLISRKDVNVFRLRFNYRSGAKIIRASMGALGEDRDYRGPDGAVEGELRFHGVNGDYEVQARYIAEKLLPSLTKQGFQLERIGVLYRAAWMGNKVADALKAKNIALVRTDNNALIKRGSRLARFIESCSQWITGGWREATPPFNQLLAQALSIVYGRRVSQNEELALTIQLITFLRSSIEHDESAHQWLMRLNTELISQWKLLSQSSFQEWDICSELIKRTDPALGCDMALAVFSGKVNDAGRVTLSTLHSAKGREFEVAILYGVNKYDFPNKRDSASVSAMREARRLFYVGVTRPRKELHLVYEKGKHSPWLNEVYHRSLQK

SEQ ID NO: 69922 - protein, 712 aa, Pseudomonas aeruginosa; identical to SEQ ID NO: 63712

SEQ ID NO: 69923 - protein, 599 aa, Pseudomonas aeruginosa; identical to SEQ ID NO: 63713

SEQ ID NO: 69924 - protein, 805 aa, Pseudomonas aeruginosa
MKLQAYRLQNYRRLRDVVIELDDEISIFVGANNSGKTSAVQGLYSMLRGEAKKFELFDFSATLWAEIDAIGRTPPGDEDAPKMLPSILLDLWFRVGEDDLATAMSLLPSTEWDGKCVGIRVAFEPRDAHALVRRFHELHEKANNAAIALAARRVAARESAVEAGAEDAAAVVTDHGEYKPWPESLTKYLTKELSKEYTFRYYVLDERAFVGYQAKEADYEPLPLGKEPGGAAILKSLVRVDFLRAQRHLDDPDAGSSDRAESLSRRLSRFYHRNLEKRGDDHAALKALDTSEKELNFHLEEVFSDTLKRLAKLGYPGVNNPEIVIRAALDPTTVLGQDAKVHYVVPGAVTAQLPDSYNGLGFKNLVYMVVELLDLHEQWKAEEDKRAPLHLIFIEEPEAHLHAQIQQVFIRNVLRLLEDANDHATFFHTQLVVTTHSPHILYERGFSPIRYFRRASDQLNHHTEVRNLSLFKTGAADAPAREFLQRYLKLTHCDLFFSDAVILVEGNVERLLLPAMIESAAKRLRSSALTILEVGGAFAHRFQELIAFVGLTTLVITDLDSVAVKADAEDAAEQDAGAGGAVDGDNEDDDLKPFELEDDDEAEPGGKKKSKRRGSTCHAHVEGAVTSNQTLISWIPKKRSVAELWEVASEQKTLPLAEGSSAEVRVAYQTKVLVTVGTTTSQLCGRTLEEAFGLENSDWCQAEANRAVGLKLKRAPNTPEELAEKLHKRVIGKNFDKTRFALEVLASGPLNSWKVPAYIAEGLAWLEAKVAHEIEADVAIATEVATIEPTAAGVVAVVANVGQRA

SEQ ID NO: 69925 - protein, 640 aa, Pseudomonas aeruginosa
MSRRIDSPDTDADLEIHACIAAKPPQPFVVRAGAGSGKTTSLIKALDWVMSEHGASMRAKRQKVACITYTDLAVKEILADVNDDPLVHVSTIHSFYWSITKTFQADIKVWLQNDIRRRISELEEEFKNYSSRVRQTTRDRNKADQDRYARNLEAVAGVKTFNYGVGSDYAKGILGHEDILQLTDFLLQNRPLFRRLVALNYPFVFIDESQDTFPGVVKSFKEVETQMRDKFCLGFFGDPMQSIFMRGAGDIPLEDHWRSIMKPENFRCAKQILDVANAVRAQGDGMEQVRGLHERVDGALQPVEGSARMFVLPNTLNRTETLARVRAWSAATTSDEGWTTPDIAVKILVIVHRMAANRLGFGGIYSALNDKTSESMKQGMQDGTGWPVRPFLGFALPIVAAMKAGNEFAAMNLLREFSPRLAPYALTGRRAVDVLRELHAAVLKLVAMLDDPGNTIGDIALHLRDAGLFEFDERYGRALGFIGDVADAAQEAEAAPAEGRSSDAAMVKFFKCTAQELRPYERYVSEGSPYATQHGVKGAQFDRVIVVMDEEESDYRTYNYERVFASADARAADRARAQDGDENTWSRTLRLLYVCCTRAQRGLVLTFFVADPATTLENVVASGILPRSAVFTQEVLAGWP

SEQ ID NO: 69926 - protein, 704 aa, Pseudomonas aeruginosa; identical to SEQ ID NO: 63366

SEQ ID NO: 69927 - protein, 142 aa, Pseudomonas aeruginosa; identical to SEQ ID NO: 63365

SEQ ID NO: 69928 - protein, 693 aa, Chryseobacterium aquaticum
MKVYKIEVDNFRLLKKFSMDLEDELSLVIGKNNTGKTSLLTVLDKFLNEKSKFYYDDLNIDFKNQLEALILSDEVPAQFLDKGVKLRLFIEYNEADDLSNVSRVLMDLDPNNNKIVLGFEHLINYDDFLKLRSDFASFSASEKAKKVKKKEYKPRGLKDFLKQEMENYFSTHKMSFEYETATGKVNEMNFINLDSEGISIKDIISFKYISARRDVSNKEKENTLSKQTSSLYKKQEDNSDKTQATENFKDQLSETDSTLSEIYKDLFKDVIKKVQDFGGVKLNDTDIAIISTLQHRELLEGNTTVVYTHDDHKLPEHYNGLGYMNLISMIFEIEILVQDFKREKDKKPADINLLIIEEPEAHTHPQMQYVFIKNIKKLLGEGVIREDGINRPLQYIITTHSSHIVADSDFDDIKYLKVNGKNNVTAKNLNDLRKQYDADPSQYQFLKQYLTISRAEIFFADKAVLIEGDTERILIPTFMRKVDLEELARLKAENKEDNFLPLLSQNISIIEVGAYSQIFEKFIEFLGIKSLILTDIDALKVVRQDDNGQDVWGACPVDEGTKTSNSAINHFLKATTWDALKTLSAASRTITLDSSTVCICYQQEESAYHARSFEDAFIHINRTFVNGKKDEFHGLQNRKLFDVATNNAFVLADKCIKKKTHFALDILYHSDKEFTNWNIPAYIKNGLLWLKED

SEQ ID NO: 69929 - protein, 642 aa, Chryseobacterium aquaticum
MAEGRLNLEPEVQEIFQSIDEGRNFLLSGGAGSGKTYSLVSVIRQAILENPTAKVACMTYTNAAVKEIEERVNHKNLSVSTIHDFLWDNIKHFQKELKEAIISLANDEEVSRVSVDDINLIPDNYYDDLEDGIQYKEYVRVRDGIISHDELLLIANYLFDKYPKLSSIVKDKYQFIFIDEYQDTSKAVVDTFLIHFKKSERKNIIGFFGDAMQSIYEDGIGNLDEYKGQDADKVKEIPKKQNRRNPQLVINLANKLRTDGITQEPSVDINAPNMVGGVVKQGNVLFLYSTDGSIEQVEKFLGENYGWDFNNTKQTKELNLTHNLIAGKAGFRSLMDIYDNDPIIGLKTDILNKIKDNKKNNRTEIAIYEDDTFDVVVDKFQLKNIQRNLKKDILLADPIKAELYNQLKNKLFSDVRKIYINKDALTDDKKQDKDDENKKGSKRDNLIKHLFKIQNSISLYKNKRYNEFLRGTDYRIHIRNIANKRLLKENIDNLINVGEKTIEEVITDAHEKGISLIDDRLLAFVGKNEYLYNQVKDVKFNEFQKLYEYLEGQTPFSTQHKTKGAEFDNVLVILDNGGWNNYNFEKMFLGTATPSVIERTQKLFYVCCTRAKENLAVFFHNPNANVITKAKELFGNESVIKI

SEQ ID NO: 69930 - protein, 691 aa, Sphingomonas sp. Leaf11
MRIVKARIENFRLLRNVEFGFEARTTLIVGRNNSGKTSIAELFRRILSGGSLALRLEDFSLGCHESFWQALQAYRADPQSADAWEQLPSIRLVLDIEYDTDALDLGPLGNCIIDLNDDCHEARLEFRFGPKATAPETFFADHLVPLEDAANDRSRFFRDLGQRLPTAYVGTLEAVDPNDATNRKSLETKLLTTLVGVGFINAQRGLDDDTIRERDVLGKVVEVLFQSALTDDINPERRTTAEQLKEVVEAIQGDVHNSFNSGLTSLLPTFDLFGYPGLSDPGLVTETSFDVNKLLKDHTKVRYRGVNGMTLPETYSGLGTRNLVYMLLQLLSFFREYQAMPTSSGVHLIFIEEPEAHLHPQMQEVFIRQLERVTAAFVAQLNADQPWPVQFVVTTHSPHMANEARFESLRYFLSVADGEGVRRSLVKDLRQGMAGAEPAVREFLHQYLTLSRCDLFFADKAILIEGTSERLLLPSMIRKTDETAAGQPQLSSQYLTVMEVGGAYAHRFYDLLNFLELRTLVITDIDSVAPNANNKRVAVLVAQGAFTSNACIKDWFAPDVSPAQLLAKTADEKTSGGRRLAYQIPEQDGGPSARSFEDAFILANPDLFELGGGDRAALAYEHAAEQKKSSFALEHAIESTAWRTPRYIAEGLRWLAAGNPAPVLPPDVVAAELVAEVIGIEVADYGQPAHG

SEQ ID NO: 69931 - protein, 587 aa, Sphingomonas sp. Leaf11
MADGESPADAAGRAALEQVFACFDEGRSFRLEAGAGAGKTYSLEKALRRLLALRGSELMRNRQQIGCITFTNVAKDEIASRVQAHPAVRPETIHGFCWSLLQDFQPEIRALVPTLEGWADRLAEADVAEIGVRTIQYEFGYPRVTEAELTLRHEDVLTLMTALLARPKFRAVMTARFPVLLIDEYQDTDAGFVNALKQHFLDTGTGPVVGLFGDHWQKIYGDGCGAVEHAALQVIDKNANFRSVEPIVSVLNRMRPALPQIPSDADAPGEARLFHTNAWPGQRRTGQGGGHWTGDTSAEAARAYFDHLKGRLIGEGWDFAVERTKILMLSHSVLAREQGYPTIQQIYGQFNDPWLKKEDPHIKFLADQVEPACAAFQAQRYGEMFGCLDAGHPSIRRHKDKAAWSQSFQELIELRHSGTIGQVIDFMRAQEHMRVPEAVIDRENRLAAVGDVPTENEPRRVTQLRRLRDVSYAELMAVDAFIDGHTPFATKHGVKGAEFENVLVIVGRGWNKYNFGQMLEWLDQGPPGDKTASFESNRNLFYVACSRPKRRLALLFTQVLSQAALAKVLDLFGTENVIALPADPSVA

SEQ ID NO: 69932 - protein, 691 aa, Sphingomonas sp. Leaf9; identical to SEQ ID NO: 69930

SEQ ID NO: 69933 - protein, 587 aa, Sphingomonas sp. Leaf9; identical to SEQ ID NO: 69931

SEQ ID NO: 69934 - protein, 765 aa, Pseudomonas sp. Leaf15
MQIQHLEIANFRKLLSVRVDLAVETTLLVGANNSGKSSAMLALRKFLLSKASIFRLQDLTLSHLATIDSIGEAWEAADDSFPIPVANEWADWLPTLDIWLEAAQGELHHIRDLIPNFAWKGGHVGMRFRLEPDDMPTLFVDYRKERARVRELQQEIQKQAALGTQPPSLPLWPQSLHDYLNRRIGKTFKIRWYRLDPGQLRAPNPATRKANQQPLAATATPLERNPLTDLIRVHEINAQRGFGDSADEGVLEGGHGSGRRLSEQLRAYYSRHLDPGDSPDISDLEALRAIEAAQTAFDTRLSTSFAPALKEVAGLGYPNNSDPSIRVSTRLAPTDGMNHEAAVLFELDSVGGAPGAPPLRLPETSNGLGYQNLISMIFRLMAFRDEWLKKYRSPEEQSATGVEPIHLVLIEEPEAHLHVQVQQAFIKHAYHVLCSDPLLAKYPNLRTQLMVSSHSSHVAHEIDYENLRYFRRLPSGMAGISIPVSTVSNLSTVFGESNQTKEFVTRYLRAQHADLFFADAVILVEGAAERMMLPHFLRQHFRFLDQCYITILDIGGSHAHRLRPLIDALGIVTLVITDLDAGLLQVGKPVERNKGQTTNNPTVRHWMRAAGLGHDVDSLLDLPFDSKAQQIDDLFSIRIAYQTPITVRLPKTGLNVEALPNTFEDSLVLSNTEHFANKAGRGLMRSFAKALREAETSLELGTELFTKLKDGDKAEFALQVLGDSDFAKLKVPTYIHEGLAWLQSKLERKSKELLIIPSAILEVTP

SEQ ID NO: 69935 - protein, 615 aa, Pseudomonas sp. Leaf15
MDDVPDADQIIQDCLNLDHPKSFFLYAGAGSGKTHSLVEAVKTLKDRERQRLTFEGRQIAIITYTKAASEEITRRLEHDPLVVVSTIHAFSWRMIQGFNDDIREWLRVKLTQDIGELNERLGKARGQNKTFLANQASRDSKARRLDSLDEISTFIYSPTGDNRGRQSLNHSEVIQMAAAFIQQPPLLNVMADLHPVLLIDESQDTYGPLMDAFLQAQSLIPDRFCLGLLGDTMQRIYSDGKVRLEEAIPRDWAVPEKRMNRRCPTRVVDLINVIRASADSHQQKPKPDAIEGTVRMFCTQQIPGQGFELEEDIAHRMAAITGDAQWATGKDGRKSLILEHKMAGRRMGFEGVFTPLYGVEHLRTGLLDGTLPILRLFFDRVAPILRAAKANSFSLMEAVRLQSPLLDTKSIKDAPDQLALLDKARAATESLCELFNANDPLIGEVAHVLFETALLDLPDRLVTALLLGATSDNPPDTSDRDALETHAYQTLLARPFSEMAAFAGYTEGLSPFDTHQGVKGLEFPRVMVILNDEEAGGFLFSYDKLLGVKPASDSDVKNQREGKDDSLARTRRLLYVTCSRVEESLAIVVYTSQPATAKQRVIEAGWLQPEEIEIL

SEQ ID NO: 69936 - protein, 710 aa, Pedobacter sp. Leaf216
MYISKISLVNYRNFKNAAFYFNKGINTIIGENGSGKTNLFRAIRLMLDDDLLKFAYKFTEADFNRTLDKKWKGHWIIISLEFSEISADESIQAMFIHGLGNGEEETVDKATYNLFFRPKSDIRYRLSELAENDTEGLAAIVDQLTIANYESFFTGKSSVDFNDPEVYKELVGDFDAVKFNLNPDTSLFGARIPHQLSISKDISFTFIKALRDVVSDFNNNRTNPLMSLLKIKSELINDADYAPIAHQVKDLNAAIEQLPDVQDVRENIKETIKDTVGETYSPSSLSIKSSVPDDAEKLLQSLKLFIGEPDETYEGSIHELSLGGANLIFLTLKLLEFKYQRSADNFANFLLIEEPEAHIHTHIQKTLFDNLNYEDTQIIYSTHSTFISESSNISNINILSKKVNYAESFQPANNLPESKVHKLQRYLDAVRSNLLFAKGVMLIEGDAEAILIPLMVKKVFGISLDELGISLINIGSTGFENIAQIFHEDRVQRKCSIVTDLDQAIADTTEIDTDTEAVKTYKKKLAASEKSGKERQEALDLYITGNIYLKACYADYTFEVDFMNQENKIEILNTIPEVYKEEDTIELAATDIGDEDIAISGKRVLAMAKYAKKGWYALILGKHITFKTNIPPYILDAIVFSKTTLSRRTILSLLDYRLSQYRKDAVHPEFLALELEMEKYGKGDIALQALIASIHKALPNDQIKDFLERL

SEQ ID NO: 69937 - protein, 599 aa, Pedobacter sp. Leaf216
MFVWDRDELNGEQEAAILAPGNVLLIACPGSGKTRALTYKIALELSKLKSKKKFIIAITYTNNAAEEIKTRIEHLGEDTSQLWIGTIHSFCTEWILRPYGLYDDALKYGFKVLNSHESEALLDTFCAPYKVFKVSYYDCSYIFTKTGYALGNCAAVKRPYVEDVLKNYWAYLKANRFIDFELILKHTYELIQTRPVIAKTLSKLFSYILLDEFQDTKELQYEVLASIIASNPKEIGSFIVGDPNQSIFTGLGGYAIALEDLQNMTKSKFEPFELSNNFRSSERLIKYFQHYKTFPNTILAAGKNKDYTSIISLNQEVMKSVLEDEIVRLLAFNITEKGISPNEICIVGPQWVHLSALTRNLMVKMPDYNFNGPGMAPFARDIDNFFYKICRIVLTEPSPAMYITRMRWSREILKDLHEIGSDISGTSAKAFLRHSNLLRIDETDGLAYLKIAFSELLASLGVDKSMYKALTEDYNSFFASSEQRIKKLAEQGDLGVSTIVNFRKVFKQRDGITISTMHGVKGLEFDVVIAFGLLEDWVPHFSDVDGENSAKKLLYVIASRARLNLHMISERREKRFSRPPRNMFSTNQLSGYVFGYDNC

SEQ ID NO: 69938 - protein, 653 aa, Sphingomonas sp. Leaf20
MAVDTTVFIGRNGAGKSAMLQALLRLFGETRDERKIQPADFFVEPGERLESVAKRELFLEVEIAFPELDGGDADAERTVPSAFRHMIVTSPGAAPFARLRLEATWELGGTLDGVIEEKLFWILTPDDVPTGEGSALVKRKVSASERSHIVVRYIPASRDVTALTQLTVKSLGRSLMNAVVWQNKDEIAELVAKAAEKLDAEGALARVNAAINACWSELNTAETGTTAKLAVLAPDLQQIVRSATIQLSPSSQGRTMTVEDLSDGQRSLFHFALVKALLDLKLELEAEVRDAKTPPFEAAFARAPALTVFAFEEPENHLAPFFLARLLMQLSVLTKTARVQGVLTSHAPSIVGRIEPKAIRHIRRETKTGLSTVCALALPEDGTEAAKFVREAVRAHPEIYFARHAIFGEGASEEIVLPWLAEKIGVPMDRSFVAIVPVGGRHIQHFWRLVEQLGIPHSTLLDLDLGRSSGDYVQFSSVAKALTSGGHPRSAEQQKWLDAAIELKRPPAWGEGSATDKFLQDWMAWLEQFGVFFSAPLDLDMLMVEAFPDAYKTLPDRATGPRGADDADVIAKAAKEVVGADGFGVAPYEADKNWPLFSWYKYLFLGSRGKPAAHLFALATLEADEDADIQPEIPKVLARLVAHVKASLEAPIA

SEQ ID NO: 69939 - protein, 643 aa, Sphingomonas sp. Leaf20
MIKPDDWKPIEVAALEPAALGAVTATGSTLVVAGPGTGKTELLGQRAAFLLQTGRCAYPRRILAISFKRDAASNLRERVEKRCGRALARQLDSYTFDAFAKQLLDRFWRALPNHLALSGMYKIGRAQPPRQGYGQFQLSVVDALKTASGSVGWAAQMLGGQPQEHAVHAVGFDEYSRGVQALCLEPLTASSTAAFLQLVALREGLIASPPSLTFPQIGILAAAAITANPMIRTALRATYSHVFLDEFQDTTSVQYALVAAMFEGSETVLTAVGDTKQRIMGWAGARQDVFEAFEQDFLSVASAHGRLSLTKNYRSNERIVAILNILKARLAPEEPDFVAVRKAPDLPDEEICSVLVADHENAEAEAVAKLVAEAIADGTDPRVIGLLVRQRAPEWEERLRDAFDRESVTLRNEDRDVGGATIQELMTEAYSRFLLDLLEFCSRKYGGTLWSAAMDHFAAAEGIEIDDDETAERALATRVDKFHTENRIDPRVKPEPDEVRARIGAIEECVGLDRLRSLAPQYATGDFFESIRKASADFLIECAEATTSWSDAIDRFRGIGQVPLLTITKSKGLEYDLVVLLGLNDDQWWSFDRNTDEGHSVFFVAASRARERLLMTRTSRDRNRKIEEIFDLLRAANVPERRV

SEQ ID NO: 69940 - protein, 691 aa, Sphingomonas sp. Leaf62
MRIVRARIENFRLLRNVEFGFEARTTLIVGRNNSGKTSIAELFRRILSGGSLALRLEDFSLGCHESFWQALQAYRADPQSADAWEQLPSIRLVLDIEYDTDALDLGPLGNCIIDLNDDCHEARLEFRFGPKATAPETFFADHLVPLEDAANDRSRFFRDLGQRLPTAYVGTLEAVDPNDATNRKSLETKLLTTLVGVGFINAQRGLDDDTIRERDVLGKVVEVLFQSALTDDINPERRTTAEQLKEVVEAIQGDVHNSFNSGLTSLLPTFDLFGYPGLSDPGLVTETSFDVNKLLKDHTKVRYRGVNGMTLPETYSGLGTRNLVYMLLQLLSFFREYQAMPTSSGVHLIFIEEPEAHLHPQMQEVFIRQLERVTAAFVAQLNADQPWPVQFVVTTHSPHMANEARFESLRYFLSVADGEGVRRSLVKDLRQGMAGAEPAVREFLHQYLTLSRCDLFFADKAILIEGTSERLLLPSMIRKTDETAAGQPQLSSQYLTVMEVGGAYAHRFYDLLNFLELRTLVITDIDSVAPNANNKRVAVLVAQGAFTSNACIKDWFAPDVSPAQLLAKTADEKTSGGRRLAYQIPEQDGGPSARSFEDAFILANPDLFELGGGDRAALAYEHAAEQKKSSFALEHAIESTAWRTPRYIAEGLRWLAAGNPAPVLPPDVVAAELVAEVIGIEVADYGQPAHG

SEQ ID NO: 69941 - protein, 587 aa, Sphingomonas sp. Leaf62; identical to SEQ ID NO: 69931

SEQ ID NO: 69942 - protein, 646 aa, Curtobacterium sp. Leaf261
MQITHLRISGFQSFGPDRKEIALRDVTYVLGPNGSGKTAVLEALSRLFSPLPVQRRVRHSDFHIPNRQTAAEVQAAGPVMWIEVDIEFPESGASGDHASIPPNFAHMRIATEDGIPRIRVRLTATIAADNVIEEKLEYILEADAEGEPLQRADMSRFDRANVEVHYLPARRDPAEHISYTTASLVGRALRAADWTTERRTLEMLSKNLTEALADNDAVKSIGVQLAGEWKGLHSGSFFTDPSIAFGSGDLESVLRQLTISFAPSPADSSLPFERLSDGQKSLLYISLVLAWQALAREVLGGTETSFDQHRLRPPVHTVIALEEPENSLAPQYLGRIIRQLRKAAEPGDSQSLIATHSPALLRRVDPESICFLRLDSSRQSQVRRILLPTTSDETAKYVREAVLAFPELYFSRLVVFGEGDSEQIVLPRVLAAAGIAEDDASVSVVPLGGRHVNHFWRLLKELEIPHVTLLDLDSGRHQGGWGRVRNALKQFNKLNPDTFATALIDGLPKWNDTIDFPELVDPTIVGGVGPVNALEAKGVYFSHPVDLDLMMLEAFPDAYGVESVGTPDDQTIAAVLGKSHASEDRLPTHTLELFDDYHRLFDLKSKPASHLRAMAALTDEELLEDLPEVLERLVIDVRAKLGALPE

SEQ ID NO: 69943 - protein, 551 aa, Curtobacterium sp. Leaf261
MIHPDDWHPVGGLDLEPNALKAVRETGANLVVTAGPGAGKTELLAQRADFLFRTGASPYPKRILAISFKVDAARNLQSRVRLRSGSQYAARFDSFTFHAFAKRLVDNFRPVLTGQNALKPMYRLDASTRIQNEQITFDDLVPLALEILEKNEYARGALRQTYSHVFMDEFQDATTAQYAFLKKAFEGTGVHLIGVGDTKQRIMRFAGALEGVMATFATDFSAIDLQLYQNFRSKPRLRRMQNRMILEMDPGAASPDADLVGEEGEVQVLRFDNNEDEAAAVTAMIKGWLEAGVPPREIAVLARQQPHLITSVLSEHLSTAGIPYRNEQQSQDLTTEPVAALIFNYLRVVADDGRPAAYTELVRVVTHGGIEEVDGVLDSTLRALLRDARLTVRAAGFDAAKFSSWTPLITSFLKFVTRPSLNALSPSYQQGDRLNDVIKEAAGAFKRELTFDGDPIAALDRLSEEDSIRILTVYKCKGLEFEKVVVFGVEPQFFWGDDNDVKSEFFVAISRAKDELVLTTARRRTKPYGANAYWREDSPPYNALLKYADES

SEQ ID NO: 69944 - protein, 667 aa, Sphingomonas sp. Leaf30
MHLQSVRLGNFRSFDEARLELQSDLTVLVGENNGGKSNAIDAIRLLTAPLSGRREIYCEPTDVRFQSGSARFELEAHFAELSTGQQGRLISAATDASLTNACFGLRYDATAPNARPHLWAGRDGNVAEPNCHDMVRHVYLPTLRDAKRSLASGNPTRIMALLNHFLEGTSAADLAKELARQNRHNVLTKVDDAVGKGLAALTGGVRRQAATLGFASDEALIDIARDLRFKLADHGIDPEDLRYSGHGYANLLFMAIIAVELEKVRNTDLTLFLVEEPEAHLHPQLQAAVLSFLREQAEQSRKDAPADHGPAGELQVVVATHSPNLSAWVSSDRLVVFKSVIASADVGGRDDHPESASLDASLIEEVLTPESKPRNDAAAAESIAEAISMRSPRRSTRCLPLAKLPLEPLDRRKVDRYLDVTKAALLFGGRALLVEGIAEALLLPAIAKYHVLRDQPEKLRLFRSAVFIPIDGVDFAPYVSLLLTELDGTRIADRVVVMTDGDKGTKSKEDEEDVDLEYAAELDETSPNGADVPRGEDPTENEEEEEGEKLIPGERRKRSLDRLVGGMGASDQFAAVTSTYSLESELVEAGNADLLEKVFLELHKRSRTKWRNAMKKEGDERAQAIHKIFKNARKGDFAQILARRIEDGEKLKVPAYIKDAIDQLVIT

SEQ ID NO: 69945 - protein, 574 aa, Sphingomonas sp. Leaf30
MTVTYRPTLEQDAVIWHDGCAFVTACPGAGKTRTMVERARRLLSDRSDRRGVAFLSFTNTAVDELEARLRSFGVLPSPIFPSFIGTFDRFLWQFFVAPFGIDGCDTTPRLIPDKPDWPVQPHETMQAMPLRAFDRTTGVLDRAIATELRFNRDPGRHQARALRMLAAARTKGHVDFEDVRECVRGRLADKPFAARLGKALAARFREIIVDEAQDCNPADLDVVQWLRDSGITVKVICDPNQSIYKFRGGVTDELDRFAERFEESERLPMSGNFRSTPAICSAIVALRPPAARGAVDQALGPLKDELNPVHILSYGGTSVPKTIGAKFGEIAGSLGIQNADAPILASRLPTAGKAIGHPAPKESLHMTLVLARAVTDFHFSFGLGNRREALVALHRAVLQVQGHIHSPGEYHAHVAGANAEDGKWRPGIIEIASKLKFDPGDTAEGWLAKAQALLGPGLVASGSIGQRMRKSPDLPAALASAPLQTHPARTIHSAKGLEFAAVCVVMTSKKTGKVIDHLQTGGGNADDAEDARKIYVAASRAKRLLVLAVPRNSAARLEALLASTGCTTQRHDVV

SEQ ID NO: 69946 - protein, 687 aa, Serratia sp. Leaf51
MLVKNIEIENFRLLKNVSLGLEEKITLIVGRNNSGKTSIAELFRRLLSDKGPSFRLEDFSLGSHEGFWSAFEALRAGESREDIYHHLPSIIIKLDVEYDVESPDLGPISDCIIDLNPDCNFVRMVLTFGPNSVATESLFADITVLPEGMNIERSALFRAVETRLPQSYECKLEAVDPNDSTNRKNLDLKTIKILINGGFINAQRGLDDDTHRERDVLGKIIEVLFQSALTDPIDSNKRTTAAQLKMAVEQIQTELHVGFNEKLTSLLPTFDLFGYPGLADPGLVTETSFDVDKLLNNHTKVRYVGVNGITLPETYNGLGMRNLVYILLQLLRFFREYQATPTAAGVHLIFIEEPEAHMHPQMQEVFIRQLSKITKAFETQLNENRPWPVQFVISTHSPHMANEARFESMRYFLTREGNDGFRQSVVKDLRKGMGDAPVPERDFLYQYLTLTRCDLFFADKAVLIEGTSERLLLPAMIRKTDAAAPGEPQLGSQYLTVMEVGGAYAHRFFDLLSFLELRTLIITDIDSVKRNANNKRVATPVANGEFTSNGCIKAWFANNDITPTQLLTQSHANKIVDSRRLAYQIPEMDGGACARSFEDAFILANFESFGLGEGDRATLAYDHAADQKKSTFALTYAIENTTWNVPRYISEGLRWLAEGNPVVVIPQVTPSDIVAAVAGIEMSGEGA

SEQ ID NO: 69947 - protein, 587 aa, Serratia sp. Leaf51
MTTEIHESPADTAGRLALERMFDCLEQDRSFRLEAGAGAGKTFSLEKALRWLIDKRGGELIRKRQQVGCITYTNVAKDEIISRIKSHPAVCPETVHGFCWSILKDFQAMLREFVPLLPGWAERLEQVNGIGVRRVHYELGYPSVADHQVSIRHEDVLALMIKAMDLPKFRTVLCARYPILLIDEYQDTDAAFITALKDWFLDRREGPVIGLFGDHWQKIYGEGCGLVEHASLVIIDKNANFRSVDPIVRVLNRMRPALPQMVSDPDAPGEARVFHTNQWVGQRRTGRGGGHWTGDTTPEAAKAYFNYVKSHLISDGWAFSIEHTKILMLSHSVLAREQGYASIPTIYGQYNDPWLKKEDPHIKFLTDQLEPACSAFIDRRYSDMFESFGTSMPHIRRHQDKIAWTESMNSLIELRLRGSIGEVVDFIAAQPHMRLPRAVEERELKLAEIGAEPVDEEPRRVTQLRKLRNVSYTEIIALDCFIDGNSPFATKHGVKGAEFENVLVIVGRGWNKYNFVQMLEWIDAGPPAEKVEFFENNRNLFYVACSRPKRRLAVLFTQELTANATVKLTEWFGRENIVALPANPELH

SEQ ID NO: 69948 - protein, 703 aa, Erwinia sp. Leaf53
MYVSSLKINNYRKFGRNDNTIGFVEAKSNNAKHNIVASSTTLVIGKNNSGKTTVTKALELMVSDSEVINGHDFNYNYAKKILSRHFSGNYDETPKLKFEIEIIFDNSEGDFTGVLGAFVDIKTALMNENKKAKVTVEYKIKDMSSYHEKVEELISSRKGEDSDDHITFRRYLEIISALKFKRVITNNVGRVVDKVLPKNLIDLRVISSAKNIHDKKLLTRSFNKIIKFMYENNDVDYKNILGLVGSNNESLTLSIKNKHQTGVQSVLSKIISDKKIGLDLRSDLTFEKLMSDLVIYEHKDGAHMVPEGQFGLGYASLISILGEIIDYANQGLNKIKQSRIRILCIEEPEVFMHPQMQINFVRHIQEALLAIFELAEKSIDSIKTQLLVTTHSSHILNSIIHGSGTLDDINYIHLKNGDAASLLLKDDEISDTPIEKEQFTFIKKHIKHQVPELFFSDAIILVEGITEERVLNYYIESNTILSRMHISVFRIDGAHGKVYASLTSKLLIPTLIITDIDYCKDKSSIIENPLVDSGDNDESNQISEIKEGTITTNATLKHFFNSDIISNYHGYYQNNNVMVVFQKDSVSIRGGSDPISYYATSFEEAVILENYNNHLLHEVLNSVLGKSFRDILNNSTDGVVLAHNSSKIQNLLAKKKSDFSNLMIYLLVTKNTDKPELPAYIKAGLNWLAKELNNSGADDVFLP

SEQ ID NO: 69949 - protein, 623 aa, Erwinia sp. Leaf53
MGQTVLCITYTNNAANEIRKRVGDDNLTSISTIHSFIWETVNVHMDEMIEEHVIYLNEEITRINNDIYVYESDKKAIANIRDIGKDNISKVVEKIALKQNDFYDACNLGAKDFWDYLAREFGDEFSFKIKSNAQHVTHALKNLVRAKKYKICIDKILSKAEGFDSLKYFSSKNIESLNNNIIGHDTLLKYSSRMFCKYPALTRKVIDAHPIVFVDEFQDSEDSVLNIFLGLLEYSQGKKIDFCLGFFGDPVQAIYNNKMHAMNKKMAIVGKNINRRSHQTIVNCINKIRGSRDLIQQNPINIYSGKCDLSFEVRSKSEYSHSSIMLEIDKYKKKWGIDSNNKLTCLVLKNNMLSELCGFGDLFLLINDIYNIEFSKGFEKVSSEFLFSEERNAGRLPILLYEIILPLYLIKNKEELSLADVFGGNFHNSCSLNDLIESVRFFYDLGFITLYDYICDALDKKDECENLNNKSIKIIESVIPFDTQVIEHLISDIYNKCKFKKDEKTKKLIRKVLLTDIHQFYRWLDFLFQSISKNDTDYLTCHSSKGLEFDNVIVFLDDSFNRNETYISAFLQADINEILDDPLESARRIVYVSCSRAIKNLRVCLYTATGENIESTKGIFNSI

SEQ ID NO: 69950 - protein, 647 aa, Flavobacterium sp. Leaf82
MYLKNIKIWNFRKIGTKDNSNEIRTDNPGIDISFNSFLNVLIGENNSGKTAIIDAIRMILGSHTFDFHRLDERDFHHYKTGRSRELRIECLLSGFSNQEAGFFLEWLHFNEFKQYELRIWLYAYTRDHRVIYNVKAGIDDDGAFMDGAAKDMLRLTYLKPLRDAETELSPGYKSRLAQILSNDPLFKDQFDDDQKKVKHTLEKYVSKANNLITGYFSHDSLDEDLEYEISKETPAGGPIKSKVENHLKDFFHIDDIQNPFFHISGSELASILKKLGLSLEENKSGLGALNKLFIATELLLLQGKNYSGLRLALVEELEAHLHPQAQLRVISALQNKQQEFDNQFILSTHSTTLASKLHLKNFILCQDGQAYSLAAGHTGLEEDDYEFLERFLDATQSNMFFAKGVILVEGTAENILIPTIAEIIGRPLHRYGVSVVNVGSKAFLRYAKIFKRFDQSTLPIKVSIITDLDIEQTDTGATIQSKKRTVTKLVPDAKIESDNLIKDYNSADGRIQVFHSSLWTMEHDLALGEFAEFINCATYLAQLSKSRTNNHNFKGITSTEAIKRIKKAKEIYSKWKEDSLSKEQIAYKIYERLSANKASKTVTAQWLSKMLLRYKSKIQPGIKADERFKYIVDAIYHVTKSEDADHS

SEQ ID NO: 69951 - protein, 652 aa, Flavobacterium sp. Leaf82
MQITHKDITRVEKIFFGDNGTFEDDKNERYNFISCIDRSIDVEACPGSGKTTSLLAKLYLLSEKMPFENGKGLCVLTHTNVGINEIKNNLGHRAEKLFQYPNFFGTIQSFIDKFLAIPYYSNKNHERIAVIDSDRAFNRLFTSFAKGVSRDDLKMAKEFLHANGDIAFKLTYKQVEEQVYDLVKGVDGKKIEPKKPQRSKGKNAGWSNEEKIRVYNSLNKLKASILKSGVLSYDDAYFYAKEYLLAYPEIKNAFSSRFSHVFVDEMQDTYNHQDAIIKLLFDDNVIIQRIGDTNQAILNDNDGISAWEDSERMSITESRRFSQPIANILKTVALKSNPDLKGRNEFDIPTYIIKYKSKEENQVIEKFAALLPVHDLAENKQYKYPVKAVGWVGKDKDGLTIKSYFPSFNKKISNKNPSFKSLLAAITYSNISEPKEFFNTVIDCLVEILRRSEIKNSTIKGERYYSRTSLINFLKQQFPEQFIALSSKISAWASQSFSGNNPTEEIKNFTKDILFPALDIALKDYSLKFIDSNDAEDISAQTLQLKNIFYSSATHLNHVPIEVATVHSVKGETHRATLYLETSFHKPCGEYLIEQLKGTAYVKRKGASRKEMCLKVAHVGMSRPTHLLCVALNETLVEENSKLLEDNGWKII

SEQ ID NO: 69952 - protein, 604 aa, Methylobacterium sp. Leaf100
MKIYAVAIENFRGIKSTKLFLPDHAVLIGDNNTGKSTVLEAIDLALGPDRLSRRPPVDEHDFYDGKYRPAAPALAEVGEAPAGPPTVPQITVEVTIVGLSEEQEARFGGNIEWLNVETGDFFTEANPAGVDAANIKAALRVTFIGAYDSEEDDFVGNTYYTRSLTEEETPVPFSKKDKQHCGFLFLRSLRTGSRALSLEHGSLLDIILRLKEIRPQMWEGTIGTLAGFDVASDPAIGISGVLESMDKSLKKYVPREWGVKPHLKVSNLTREHLRKVVTAFIATGDGAHAAPFFRQGTGTINMLVLAMLSQIAEDKQNVIFAMEEVETAIPPYAQKRIVHELRKLAAQSIVTSHSPYVLEEFKLDETVILSRANDGVLKQAQIALPDSVKHKRYRQEFRTRFCEGLLSRRVLVAEGATEASSFPVAARRLSELNPGVYASLEALGICIIDAGTESQIADLAGLYNGLGKRTFALCDKQTDPAKAAIKAQVEHLFMHEEKGIEDLILKNTTDAALTRFSDALDWPPHLLQKFPDPATNLTAALKEYFGWAKGNWGIADFLGQCSEAEMPAWIREACVTLKALCDPPPALPARPEENGEDAAIEPGA

SEQ ID NO: 69953 - protein, 607 aa, Methylobacterium sp. Leaf100
MVDLTHAQKDVLRVDGHQLVVGGPGSGKTTVSILKAAKIAREKLRPGQRILFLSFARATVSRVFQAIDEEQSVTEEEKKRIEVDTYHSFFWRILKTHGYLVGFPRQMEILTPPNESIALSAIRSAFKAPSKLSDVEKAQKAALETAERMRLATEEGKICFDLFAERAAVLLHDSAKIRGLVSTMYPFIILDEFQDTTAQQWRVVEASGKTSTLIALADPEQRIFDFIGADPERLDHFREAFKPSEHDLAGDNHRSKGTDIALFGNHLLTGDYRQEAYQGIDYYGFASNPNQAFSSLVAQVLKARKRLVATGRRDWSLAILVPTKRMTRLVSDNLREPFGNVPPIAHTAAVDMEGPILAAELIAFLLQQRSHSGRFDEFVDLLCSYFSGRGGQAPTKGDLMEAARFRLALEKWNDRLAKGKAVPANSVLQATFAVHEAAAAVALTGQPDGDWTVIRTVLEAGACTRLTEVAKDARNVRLLERGTQLRQSLSQDWRDTGGYKNALAVTRQAFVKEHFAIAHKPETGVIVMNMHKAKGKQFDEVIIFEGWPTRYKGEIVSNPGRIVSGNFRAGAMTQARQNFRVSVTRAKTRTTIMSPNDDVCVLLLPAK

SEQ ID NO: 69954 - protein, 574 aa, Acinetobacter sp. Leaf130
MFNKLTIKNFRNFHNIEIELTNKNIVIGMNDVGKSNFLHALRLIFDKKVRFEEICDTDFHQKNTSLPINIIITLDISDESNEDVQKVLACVKEARTQEDSKLFFIKLEVENNLSNGYLKHYTWGDDLLNLKEIKTKGLGYLLLDDIFNIIYIPSHIETAKIFNDIRRNILQEIEYSADDEKIKGEIFDGLKGVNNNIEKLSSVKNIAEQINKNLEIFDESYKVKITSQSVVDDLHKQLKIFTYEKDEDILFPASGDGRQKKIMYAMLHYFLQKETRKIPLLLLEEPENHLYLTAQIDLSDTLFSSRDIKYIFMSSHSSQLLYYINSDCSLIRLYKNKKSACNNTSSNSSKISEEYHQLKKIYVEDMSKGYFADCVLLVEGYSEKLLCDTILKKVLPQNIYQRLYVLPVLGTNFKPYRDLLLNLGIDVIIRTDNDIYKNDIYGLKRCYKIIGKKFKKTVPEEIKGSKSEGELILNSKKNRLNEIYRRIISFLKTKKIYLAEIDLEYDLKNALEESGIVMCNFEGEDISNTDLVARLQDKKWHNMYIFLRDNSDKYNNIFNDKRFEFLKEVELCLN

SEQ ID NO: 69955 - protein, 445 aa, Acinetobacter sp. Leaf130
MSELEFTDEQKNIIKCIDDNIIVSACAGSGKSSTLVEKALSEITNIQNWKKLSILTYTNKSKQDLEKKIYNEKIVIDTFHGFIYKNIFPFDYEISQNFIENFTFRAKTYEQWCNKLYDENILVSSFGGNDFVMEHTLYLMKRKNLLSYLKSKYYAIYIDEAQDNNYHQYTLLEEFMKLGIKLLMVGDPNQTLYQFRGASPEDFKKYFSDKRFSSFSLTKNFRCHDIIDKIANSYCFPDCNINDASFGYYLISSSNLEEIVSTYSSEKIAYLRKANADLSDYSGRFSIIKDLAFDSDVSEIVKNIVLCLLKFKFQKTYYLYSLFDDLKIDGNLYSSQNQKKLIEFLNFLIEEKCKKSLINFLVLLLLDEYIEEVFNIYIQLADDPITKNFFNNLSLHITMTVHSSKGLEFDNVIINKNDFFYQQELQKNSFYVAFTRAEKRIFVIY

SEQ ID NO: 69956 - protein, 766 aa, Xanthomonas sp. Leaf131
MYLKKLALRNFRRLNNVVIDLASDISIFVGSNNSGKTSVGHALQLFSGRGRFNIHDFSSELWPDIISYGESEGLDMGKLPTIELDIWFEIGTDDIHRVVDLLPSLSWQGNLVGMRVIYAPINPTATHARYTGVRQHALGATPQREDGAPTYDPSPRNLKDFLRDWLHAEYEIRYFVLDHAKFDPSMVAIDGYVPSPLSGKEHSGRDILKNLLQVDFLNAQRHLSDGQGGSRSEELSRVLSRFYERNLEQKGNDIEALSALAASEVSLNKHLERVFEPTLKSLSKLGYPGLTNPRMMIRSALDPVQIMSGREGAVVHYALGADDGNPDPPTLPDRYNGLGFKNLIFMVVELLDLHAQWLAIEEDRPPVHLIFIEEPEAHLHAQLQQAFIRKVMDILALSDEDKKHHTSQIVVTTHSTHILYERGFRPIRYFRRSREQNAATSEILNLSVFYDSAKPDDRTFLERYLKLAHCDLFFADGAVLVEGNVERLLLPQMIEKSAPRLQSTYLTVLEIGGAFGHRFKSLIDFLGLTTLIITDLDSVFGPVTPASVEAVAAIPPVPGAEEAQDDDDEDDDEEDTPEAAAKPGKACIASHTGAATSNQTLLQWLPKFGTVAALWQATVEQKTQARTVDGDALVRVAYQCQTEVTWGKETQKLAGRTLEEAFALENLQWSQDKDRKSLGLRIPKASDKDLSTLADRLHKRVQSKSFSKTDFALGLLAEEPNKWLVPAYIAEGLTWLENQIAPPELHNGHPDGNEPQPATIPLEEAV

SEQ ID NO: 69957 - protein, 625 aa, Xanthomonas sp. Leaf131
MTSRIGSPDTPADLEVRACLDREPPRSFVVVAGAGSGKTTSLIKALAHLGETRGPALRRAGQKIACITYTEVAVGEISEDVGVSPLFQISTIHSFLWSIVRPFHSDILVWVQDRIKEKIAERCEHFNKPRTQKKTKARLEQEMVDLEAELAEVHKVEKFDYGTGSSYAEGILGHDDILKLAPACIVLRPLLRQVIAARFPYIFVDESQDTHPDVVKALQTIAAEHPKLCVGFFGDPMQRIYMSGAGPIELGGDWSEITKPENFRCPRAVLDVINAVRAEGDGLEQTRGRTRMVDGHEQPVAGTSNLFVLPSDGDRTACLMAVRQWLSEQTDDTQWLNDVRESDVRLLVLVHRMAASRLGFPSLYAALNDRAPMSLSEGLSDGTAWPLRPFVQHILPLVVSEQAGENFNVISILRSVSPKLEPDRLSGQDTATVLSDLQQAVRTLVELLAEGSQATILDVLKHVRDSELLRLDDRFDSHLADDPQNNHTSGYDNVQAFIACGIQDLWAYQRYFSEESPFATHHGVKGAQFERVLVVIDDDEANYRQYSYGKYFGYTPLSENDDEHIAAGEESVLDRTRRLFYVCCSRATKDLAVVIFVPNVEVARAAIIEKKLFPQNVIRGAELLG

SEQ ID NO: 69958 - protein, 574 aa, Flavobacterium sp. Leaf359
MKLIKISISNFRGINHAEVLLSGHTVLIGDNNTGKSTVLEAVDLVLGPDRLSRMPVINEHDFFEGIYLNQDGPVPIEIEIIIGALSQEQKRKFMNNLEFWNHDTLSLVESGPLDLLDDIAVEEVIRVKFSGKYDIEEDDFTGETFFCSPEEAKTRFTKSDKRDCGFLYLRALRTGTRALSLERGSLLDIILRIQELRPQMWESILKQLRETEVNSGAEDEVNKILSSVQKSLKQFVPTDWGSEPHLRVSNLTREHLRKTLVVFMSSGSGNYHVPFSHQGTGTINTMVLALLSMIAELKQSVIFAMEEPEIAIPPYTQKRIVNSIRNQSAQAIFTSHSPFVLEEFSPEQIVLLERKKGIMKGMPLTFPSNIKPKAYSKEFRMRFSESLLAKRVLIAEGDTEASAYNAAARCLSELDPQNYSSFEAMGISVFNAESENSIPIFAKYFSELGKTTIAVCDKQSDAANLKAITESAGYVYESAYKGFENLILTETPISVLKKYITELVSEQKWPQHLKLDGSPEDMEEEVVKSKLFDYLKWQKASGSAADILALCTLAEFPATLRDAVKGITDTIDLI

SEQ ID NO: 69959 - protein, 569 aa, Flavobacterium sp. Leaf359
MIICEKRAELIEASGHLLVLGGPGSGKTTISLVKANTIINNGILENGQKILFLSFARSTVSRIQEHTNSIISPENKNKIEINTYHGFIWKLLQSFSYLINNRKFLQLLTPAAESALLAEMDDDKELRKQAKMALFKTEGQVSFDIFSEIASEMFKNSKRILDLVSQRYPIIIVDEFQDTDNNEWELIKTIGTVSTIIALADPEQRIYDFRGASTERIDQFIKNFDPEIFDFEQENNRSTGKDITQFGNDLLKGANIGKQYNDVAVVHYPFNRAEPNKMLKINLLTAIKRQKKDKGEQWSIAVLVRTKKMMFSASSYLSSTTSLPPLYHEVAIDPNGPALAGIIIAGLMEPTMDISRFTSLVSDVKNHMKGRSGTKISNETSQFSTALDNYIGTGKIKGSKRILFIQELDQLLAAREEIVLSGIPEEDWLAIRRLFQNCQSPYLKNVYEDAKFLRLLKKGALLSERLASAWRSTGTYLGAKSSIEEAFVQEHFIAAQTDYRGLHIMTLHKSKGKEFDEVFIWEDYYNPLVRHEASAKEIVESRYLLRVAATRSRERTTFLTVASQPCILL

SEQ ID NO: 69960 - protein, 678 aa, Rhizobium sp. Leaf155
MKLVNIQVEGFRLLENVRIAIEETATVVVGRNNSGKTSLTEVFDRFLGEQMGRFRLEDFAAAIRPKFLAAKALRDGGAEPPEKVLAELPVMALTLTFGYSAEADDLGPLSPFVIDLEPSCTTAIARIEFSASLKTLGALLDAPEPAEAESATESLFRHLREVVPKAYSIKIFAIDPTDVTNRRTFEKTIELNSLISTGFVKAQRTLDVGKRGETEVIGKLLNKLFKTANAVTASTDDQQIADGLKASVADLEKAMQGDFDDRLKALLPALNTFGFPSLNDTELRPQTTIDVESLLTDNTRILYTGTDGVHLPEGYNGLGTRNLIYILLQLEALHKTYRSTPMRPGTHVVFIEEPEAHLHPQMQEVFIGQLNDAISTLSQKYSGETVWPVQFVVSTHSSHLANAAPFEAIRYFLNEPTQTNGVRRTKVKDFRKGADKIGSEDRRFLQQYMTLTKCDLYFADKAILVEGATERILMPRITKIVDADLAPEHRLGRQYVTTIEAGGAHAQVFYSLLEYLELKTLIIADLDAVKLVDSRWRKCVCAEGERTSNSALKTWFGDNEISSAALQAKTPEEKTRGYCRIAYQMSEEGSEHCARSYEDALILANLADFGIANDVNAAIKAWETAQDFKKSEEAIKYAIREENWNVPKYIREGLAWLSEPPPPPEASPPTIPEEAEAA

SEQ ID NO: 69961 - protein, 578 aa, Rhizobium sp. Leaf155
MIDRDPSPAVVAAQKAQERLEAALADGKNFRLEAGAGAGKTYSLVAALKKIIAEKGPALTHAGQKVACITYTEVARNEIAQEIEEHPAILVNTIHGFGWAFMSRFQKQLREMVATQEARQEAIEAAGGIHDQTVEYSLGFFGIDEERITLHHDDIPRFLAALLSNAKFQRIFRSLYPILFIDEYQDTDPLVMTALSENFFATGQGPVIGLFGDHWQTIYRRDYQLANFPRLEGIDKGANFRSVPVIINVLNQLRPELKQDVDDETAEGEARFFHCNAYLGARVDSRSGKQELPPEVYADFIARMRTQLREDGWDYNPEKTKILLLTHNAIAAERGYPNLAAIFEHNEAFSKKEDATIAFLADVVEPVCQAYCAGSTGEMFRLLGGAPTIRKPSDKVEWRVEMDQLVKLRAEGTIGDVLDLLKQTKRPRIADRVAKREEEIAQLEPEPTEGESKSLRRHLRLRDVAYKELIALVEFIDGFTPLATQHSVKGAQFENVLVILSAGWNHYNWPRFLDYLQTGKVTEKDQAGFHRARNLFYVAVSRPEKRLAVLVTQTLSDNALAAAERLFGADNVFPLAEA

SEQ ID NO: 69962 - protein, 671 aa, Pedobacter sp. Leaf176
MKISALKIKGFRSFGPDEVKIPIDEKLVGFIGLNSAGKTTSLEALRKLFGQSLADREIFRQDFHVGKEEKPDEITERFLSIEVIIDFAEDEKEAIPHFFSDMVVDEENENPYLRLRLEATWKRSEYEPEGEVDYKIYFIKVAEGTSEEEQSKQIFPNHFRRLIQILYVPAIRRPAEQLKYVSGSILFRVLKKIKWDDSFKTEFDGKIEQINDAFRGLSEFSTVQTSITEFWQQFHKDERYKDTTLGFGGSDFDSILKKLEISFSPTGTHKTYKIDELGEGYRSLFYLTLVCALLDIEEKLSENEDEENIGINRPLLTILAIEEPENHIAPQLLGRVIKILKTIAGKDNSQVLLSSHTPAIVKRLNPESILHFRITEKYETEVNKILLPKKTDEAYKYVKEAVHNYPELYFARLVVIGEGDSEEVIFNRLMEVMEVDFDDNIITFAPLGHRFVNHIWKLLETLHIPYVTLLDLDVEREGGGWGRIKYALKQLIKVGINKEDILKTTTGILSDEELEKMHTWSLIEENAIENMNSWVDFLMKHNIFYSNPLDLDFLMLTHYPEFYKKAIPTSGGPRIPDEIEKPDEFNDKVNVAIQATLKSENATAETYSEDGKKLMIWYNYHFLGRGKPTTHIQVLSSMTDEETKGNLPQVFTEIFDCISSLLKPNRADEAN

SEQ ID NO: 69963 - protein, 614 aa, Pedobacter sp. Leaf176
MKPIKTQEWIPTDGMNLEENALKVATSVENNLVVAGPGAGKTELLAQKACFLLQTNTCKFPHKILAISFKRDAAYNLKDRVRLRCGDELSNRFDSLTFDSFAKQLLDRFKQALPTEYKIGSEYDVLIRDQSILDLYEAEDINYYNTTNRDTILRLHNTQLPHSANNVGENIRNKVWQKMIHQSKLSFTMIMRLADYIINKNPKIRRFLQQTYHFVFLDEFQDTTEIQYDFYKSCFLDSETAYTAVGDDKQRIMMWAGARETVFEDFITDVNATRIPLNMNFRCAPRLVTLLNHLTQHLLGKNDFATPSPKWQAEQGECYVWVFENPESEMQILLQEVKKWITTDGINPREICILVKQQLEQYTGDLIAYFNQNGTKARDENKLQDMLTQEISIYIINILYSIFQNKSHETKQTAFSFLTNLHTELEDGQLLKLEVALASFIKKMKDKCKNTTCNKEQINTLIDEIIDFADKDRIIASFSSYRNPTELNRITTLLKEELIKYYNTVNNMILALDMLVGKDTIPVMTIHKSKGLEYHTVIFIGLEDGAFWSFERQPDEDKCAFFVALSRAKERVVFTFSKQRVGRFGLQNQSITKIKVILEELQKSGIVTMIERKN

SEQ ID NO: 69964 - protein, 597 aa, Rhizobium sp. Leaf341
MYLSRITADNFRNFRCLDVSLAGNVVIVGENRVGKSNLLYGLRLIFDPSLPDSARELSLGDFWDGLEELDEGSRILVSVEIKDFDDDPDVLAVLTDYRVPGSPDTVALTYEYRTRPGLGRAPTSERDFQFSCYGGRDPTRKFGHDVRSRVSMDVLPALRDAEGDLAVWRRSPLRPLIETAFGAIDRDELQEVADQIGTATSSLMEFESVSELEEAIATSFRAMSGERQDVEPTLGFSATDASKLHRQIRLLIDSGQRAVSDASLGSANLIFLTLKTMELRNLIAGDKRDHSLLAIEEPEAHLHPHLQRLVYRSLFQDASSPDEDGEDPPLSVIMTTHSPHIASVAPVTSIVLLREYGDETVGCSTASLDLSTDEADDLQRYLDFTRAEMLFARGVILVEGDAERFLVPSFAEELAADLDGLGITICSVAGANFTPYAKFLEALKIPFSVITDFDPDGDRGQKRTVALSRLLDGMRTEKYDEEYFDELLETDDWPRFDESIEEFGVFTNGDTLEMDLFKGAFTASIIEGLREGNFGKERMTRIDAWEKDPTTVNRKQLLAMMEDIGKGRFAQRMAARISGLEVPGYIARAISYVVDRV

SEQ ID NO: 69965 - protein, 612 aa, Rhizobium sp. Leaf341
MRYPATSRAQSATWSTVSSSALYLDAAEELRPNNAQWQAYESTGHCVVLAGPGSGKTKTLTIKLARILAEDVKAPRGVACITYNNECARELEERLGALGVEPGKRVFVGTVHSFSLTQILIPYADSLDVGLPSRFQIANAQQKGLAMARAHRDVVGGPGNPEDFRFGMDLHRRTYLDRTKPIWMEANPQRAALATSYEQYLREAGLIDFEDMPLLALRALVRNPWLRDALLAKFPVLAVDEYQDLGTALHLMVLGLCFRTGIRLLAVGDADQSIYGFIGARPELLQQLSQREDVETVRLALNYRSGTRIVAVSEYALGEVRGYQAAEGAAEGTVYFHPLAGSYEYHAAWMFSTLLPEVEVRNPGLQRGNIAVLYAAAFMGDAVAEAAADHGWAFVRADANALYSRSNKLMRWIERCAAWCCGGWEVGEPRWSRIVSEGRRLFSETILSDQDWREFKRALLAFTWSSRDSTLHLSAWLRALDAAIVQRFAIGCRGLSDDVSAMRSLIQRLEQDQGLSGMTLGQFSGAGEGNDRVNLSTLHSSKGREFDVVVMFGIDEGRIPRSNPAPRDIIEQRRLFYVGFTRARSEVHLAFSSTRPSRFVLEVDERIQAEDD

SEQ ID NO: 69966 - protein, 664 aa, Dyadobacter sp. Leaf189
MQITKLIIKGFRSFGPTGAEILINQTLAAFIGLNSSGKTSAIESLRKLFGSSSSEREILHHDFHSSKNEQPGEVSNKQLSIEVRVDFFEKGDDAVPHFFQHMVVEEEGGKPYLRIRLEASWEQSDREPDGIIDSNLFLITSAGHLNEEKQLYPNHLRSLFQIIYVPAIRRPTEQLRYASGTMLYRILKKIKWSNDFKVDFATKISEINNEFKGLREFTTIQASISSFWKKFHKDSRYAESTLGFEAGDLDSILKKLEISFTPSPVHRKFRIDDLGEGYRSLFYLTLVCSLLDVEEKLAKDEGSETGNAPLLTILAIEEPENHIAPQLLGRVVKILTTISEKDNSQVFLSSHTPAIVKRIEPESIYHFRVTKEYETQVNTIKLPAERVEAYKYVKEAIRNYPEIYFAKIVVIGEGDTEGVIFNRLMDLFDTDFDDNIITFAPLGHRFVNHIWTMLKALHIPYITLLDLDVGREGGGWGRIKYSLEQLMNVGVDKNELFELEGGEIMSDPTFDSWSSKKVNDEADLKLLVSWVDYLEDFDIYYSGNLDLDFLMLSYYPAIYKTIIPAGGGPRIPDKVAELDKFNAKVKTAVQATLKSENSDGSIYSDAEKELMIWYNYHFLGRSKPGTHIEALAAMSDDVLKKGIPPLLVRIFDRISEIILSEVEK

SEQ ID NO: 69967 - protein, 615 aa, Dyadobacter sp. Leaf189
MKKVDEKVWTPADGLFLEDNALQVIKSKSNNLVIAGPGAGKTELLAQKAGYLLQTNVCKYPGKILAISFKRDAAFNLKDRVSLRLGEELAKRFDSMTFDSFAKQILDRFMLALPADYHISSDYNLTLSDNLALDLYKLIDKDFFFKKGRTDLVTHHTKVKLSTPLDFSKSQRAEVWRRMLRDSPSQLTFKMIMRLAELIIARNPRIRTFLQQTYSHVFLDEFQDATTIQYEFFKTCFLNSDLQFTAVGDDKQRIMVWAGARETIFEDFEKDQNAVRVALTTNFRCAPRLIKLLNYLTEHLLNKRDFAIPPHNVDSENGECSVWKFADPEMEMKYIFEAAKSWISSGVAPRDICILVKQQLERYAGGLIEYLNRNGINARDESKYQELLTDDVILYIIYSIENIVGAGSLQAKSFSLRFLRNLHSEYEDEKMLKLEIAYFKFCQRMLQSITLGQSSSSTISEMISKILDFAGRDRIMAYFPNYNNATYFNSCVASLESELLICYARAQNLVAAISMIKGEETIPVMTIHKSKGLEYHSVVFVGLEDSAFWTFERQPDEDKSAFFVALSRAKERVIFTFCDIRDGRTKGERQANKKIRVFFDQMESSGLVNIRTLGN

SEQ ID NO: 69968 - protein, 690 aa, Rhizobium sp. Leaf391
MRIKSVEIENFRLLRQVAVGLEERTTLVVGRNNSGKTSIAELFRRLLSEKSLSFRLEDFSLGCHEGFWAAFEAFQAGQPVPDVVAMLPAIKVAIEITYDVDSPDLGPLSDCIVDLDPDCTDARLILTYGPRPTAPELLFSGVAVGDDVAVNRLNLFRTVGAGLSGAYGASLEAVDPNDPTNRKLLEPKMITALIRGGFINAQRGLDDDTHRERDVLGKVVEVLFQSALTDPVDPEKRTTAEQLKAAVEQIQGDLHAGFNAKLTSLLPTFDLFGYPGLSDPGLVTETSFDVDKLLNDHTKVRYVGVNGMTLPETYNGLGVRNLVYMLLQLLRFFREYQAAPTSAGVHLIFIEEPEAHLHPQMQEVFIRQLDQIISAFVSQLNENRPWPVQFIVSTHSPHMANEARFEAMRYFLSVPDGDGMRRSVVKDLRRGMGGAPEPDREFLRQYLTLTRCDLFFADKAVLIEGTAERILLPAMIRKTDVTAVGEPQLGSQYLTVMEVGGAYAHRFFDLLSFLELRTLIITDIDSVTPNGSGKRVAVPVAEGTFTSNGCLKAWFDADVSPAALIAKTEAEKTAGGRRLAFQVPEVDEGPCGRSFEDAFILANPVRFPLGDGDRALAAYALAGDQKKSTFALEHAIEHTDWNVPRYMSEGLRWLAQGNPAPVQPAAEVAVEIIAGVAGVAVNVAEVGDHG

SEQ ID NO: 69969 - protein, 586 aa, Rhizobium sp. Leaf391
MVEEVENPADAAGRVALERMFACLDNGSSFRLEAGAGAGKTFSLDKALRRLIDQRGAELLRVGQQVGCITYTNVAKDEIISRIQAHPAVRPETIHGFCWSLLKDFQSTLRALVPNLDGWAERLDPVGGIGARRVHYELGYPSVGDHQVTLRHDDVLAMMIEALSYPKFRSVLTARFPILLIDEYQDTDAGFVDAIKAQFLDGGHGPQIGLFGDHWQKIYGEGCGLVEHPALVVIDKNANFRSTDPIVQMLNRMRPALPQTVRDPALPGEARLFHTNQWPGARRTGQGGGHWTGDTSPEAAKAYFAHIKQRLAGEGWDFAVEKTKILMLSHSVLAREQGYANIPPIYGQFNDPWLKKDDPHIKFLADQLEPACAAFEAKRYGEMFECFGTGAPKIRKHADKVAWTNAMTILLALRMSGTIGEVVDYIAGQPHMRLPETVEDAEKRLADAGPEPVEGEPRRVTRLRKLRAVPYIELIALDRFIDGHTPFATKHGVKGAEFENVLVIVGRGWNKYNFNQMLEWIEAGPPADKVEFFENNRNLFYVACSRPKVRLALLFTQLLSADAMARLSAWFGADNIVALPADPGVA

SEQ ID NO: 69970 - protein, 747 aa, Methylobacterium sp. Leaf465
MKISQLKVKNFRLLHDVSLQLEKKTTVVVGRNNCGKTSLSDVIKKFLSEKSSFEIEDFSSASYENFCAAHRAYLQNADPQEVRALVPTIELRIHVKYDPAVPEFGPLQEFVIDTDDTCTEAVIVCRRALADGRIDPLFDGHGKVVLEGDPAQHTEADKLALFRSLAERIPSHFTTRMWAEDINDPTNTHEVTPAAVTKLLSLGFVNAQRALDGTGGRDTDVLAKVLEGLFQSASVSTADGSQKDIAEGLKKAVEEIQTGIDRDFKGQLAKLMPAIEYFGYPGLDNGPLYPETKLEIGKLLTNFTKVQYAGHNGVQLPESYNGLGYRNLLYILLKIVGFFREFRAHAHAPGLQLIVIEEPEAHLHPQMQEVFIRQLQLIVKRLCALEGENVTWPVQFIVSTHSPHVANEARFDTIRYFAITSKDQPVGVRYTQVKDLSSDLAGLKGPVAHFLHQYLTLTRCDLFFADKAILIEGTTERLMLPQVMRALEQADPSLKLGSQYTTIMEVGGAYAQLFIPLLEFLGLRSLVVTDLDAVRKNEKSKLEACLVHEGESTSNSCIKNWFAEVEADPPPPTEAEEVEEPQAEPAVKSAAEAIADLADDDEEEVKEGTTLFDLAVAMTADAAKKTRGSVRIAYQVPEADGGPCGRTFEDAFILANQGLFGITGATNDALAKAAADKAAKQKKSKFALTYAIDKTNWTTPRYIKDGVVWLADSNAAVVDPGVALAAEAQAANMIENLGEKMTTGAAE

SEQ ID NO: 69971 - protein, 580 aa, Methylobacterium sp. Leaf465
MSEATELNPAEAAAVLSWEELRGYLDDGSSFVFEAGAGAGKTFSLVEALRHILKDRSRELQRSHQQVACITYTNVARDMIVAQTDGHPAIYCDTTHAFAWMLISGFQKRLVELVRTLSGWVDRVEELKAANITGVGYALGRRTIEESTANLHHDDIFPVLIELMKSKKFRNTVTSRFPIVLVDEYQDSNKALVECLASHFLGQPKSPQFGFFGDHWQRIYDDTCGAIEHEALKRIGKKANFRSAKPIVDSLNLMRPELAQAVKDPSAPGSVHVFHTNGWIGSRETKNHWQGDLPGPKAASALTKVRATLAAEHGWDFAGDTKILMLTHRALATEMGYSSMRNVFSYADSYTRKANEVIAYFHEHLEPAARAFLDGKYGAMFEAIDARRPIMSGPADKAKWAGAMKRLCELRDTGKVGEVIAHLQATGLPILSDTVERQEKDLADAIAAGGELSSRQKELSKLHNVDYADVIALCTYLDGHSPFQTKHGVKGDQFENVLVVFGRGWNEYDFNAYLGMAKNPAKIAAKAAAYERYRNLFYVAVSRPKRRLALLFTQKLDPSAMATLKDWFGQHPILDIGSTL

SEQ ID NO: 69972 - protein, 617 aa, Rhizobacter sp. Root29
MAIFGKDSGIAVTTVRVLNFRSLANVEVELGDLTVVIGANNAGKTSFLDALFAAIGAGRKLLSVDDVRLEPAEATAPKTREIVIDVKLRPVGDDGKVLDAYPAGSFWTGLWGTPGIAVDAEFKEFTPIRTTLKWSAVKGEYVMERKFLKEWRDFADWTNAAVHDRLVSAAQMEPIALHYVDAKRDLDDDLRRPGSFWRRLTEDLGLSATDIAAMETTLSEINQTIVDKSEILKHLKESLAGLQNVVSSDSGSVDIAPVARKLRDLSKGVDVSFSTAGAQSFPLARHGMGTRSLASLLVFRAFASWRNKQATKGGDKVHSLLGLEEPESHLHPQAQRSLFSHIKQIPGQRIVSTHSPYFAGQAQLEELRLFMKKGGDTIVTRIDLTPLTDPNDVRKLQETVIDTRGDILFSRGVVLFEGQTEEQALPIWAQEYWGSTIHELGFCFVRTNGTDYFPFIWLAKALSIPWYVFADGEEQPVKDLDSALKKAGEADSASHPNVVVHPKGKNFESQLIDEGYMAEIEMALDEMSGRMGYLDEYIKEKHGQKGKKGVVRDYQSAGGRERAAFDALSAAKTSVSKHLGYVITAHKDPVRRFPKTIEALFKIVGDAHKLKIAEAKK

SEQ ID NO: 69973 - protein, 615 aa, Rhizobacter sp. Root29
MNAPFNARLSAEQREVVEHVDGPLLVEAGPGSGKTRVLTERIRNLLTSVRGHFRVLALTFTNKAADEMKDRLQDLGDERERAFIGTLHSFCLDLLTERGRLVGIEGVPNIFEQFKDRKDVLLKAIDEDPFLSDAIGQIEDAKERNRQVDKWLTGISHVKSHPITCAVIEDELVKRALDAYEAGMRACNAYDFDDLLLLTYRLLVGNPKLADLYRRLYRFVCIDEAQDMNEAQYAVICALCGNGYKNVMLVGDPRQSIYGFNTSSPEYMERFGVEFGAKRVALTANYRSSKAVVGLAQRLDPNYMVAMQLPIEGAVQIIMGLDEQDEARQVANELQRLFAEGHPDVEGGVEPSKCAILGRTRFALLAIEAELKERSIAHYKRLSANHENESALVEEFQLALRVLANPKDRLHMSALAKKWKAAEPSSTPDGYLQSLRAIAQATQSRNAVTVCEALDTMSAGQARLDLMPALKRLEDHADNLDEPDRLAIYEDTVVFRHEWDQYLRAASGSISLTAFLSSKALGNTQKAAREGVALLTVHSSKGLEFDVVFLAGMAEGTFPDWRASGAKEQAEEVRNAFVAVTRSKRLLYLSYPATRVMPWGGTRRQARSRFLANLS

SEQ ID NO: 69974 - protein, 601 aa, Aminobacter sp. Root100
MRVARIVLQNFRAFSSLDVNITDDLCCIIGENNTGKTAILRAVQICLDNLLPSSFRSLFREDIHSGIDITHPNQVLIGIEFTGFEGRVNEEALVSTWKTAADRARIFYRFRPRPSVREQLASGDLLPGSLTLEDYQWEIRGGGDPAVDLTNITWNDEGIGEAVRFADLQSYLLVHLPALRDVENDLRNPRQSPLIRLIEAFEIDAAEQAALIAILDEANQAIAQSQTIAEIAGAIDKRFKYVSGPAFEMDATLGLSAATFRAIIRNLKIILSDLSLSSFEPGRNGLGMNNILYVAILLEYLQRRIALDRSAGQLILIEEPEAHLHPQLQFSLISALRDIGVQTILTSHSTQVTSRVPLSSIVSLTKREDATIAAGNLAHNSALNDNEIADLQRYLDATKSSLLYARKVMLVEGPAEMFLIPAMIENVYGVQLERLGISVIAIHGVHFDVYAKLFRYGSLEKKCAIVADADLIPSDADSFDPETHAPDLVALEGAFVSVFAGATTFERELVSVGRLPMLIETVRALGAPQILEQLENGLIDLQVGGMGFAEEIALRVELGRLTLNTARRFGKARFAQVAARYAHLAADLPTYIDEAYQWLTE

SEQ ID NO: 69975 - protein, 586 aa, Aminobacter sp. Root100
MIPLTPEQRTAVEHDGNLLLTACPGSGKTRVILAKLLALADAVVGTPQFVACITYTNAAVDEIEARLRTYGGNASADKCEISTIHAFCLEFILRPYGWLVPEVPRAFQVLTRENPIFEQIVTAVEDAYGRQATARTFDDYEGLRINVDGAACGQGLEGGIVTPESAALYWERVRDHRCLDFAMILYYSWRVLAAHPFVGRGIASRFAWLLIDEFQDTTDIQLAIIGKLQSFLHTRFFLVGDQNQSIMRFAGARPDLADQFGQHIGARRDASLTGNFRCGPAIVAAARTLIPTMPAMQSAGAASELNASVNYVHVARPLDAITDYFLPALQAAGIPLGKAAILAPWWTHLIPIARALREFDVPVFGPGARPYRRRRLIAGLAEQLGACAVSSDYLGLPGVERAIFRLIGDFTGATRHDIFSYVGRRTALGLIYRARALADDHPGGVNWLRAIAREVGDYLEREEWLPAAAKPSLIDSAEVMLTDMRANRVDLGNLLISDMGLFANPAEALKLITLHNSKGREFEGVALVCMNDGSIPHFATSTQEQYDEARRLFYVGLTRAKQVLVVASDASHHRNRPTPFIADAGL

SEQ ID NO: 69976 - protein, 779 aa, Aminobacter sp. Root100
MRIEFVEIANFRKLISTRIGLSAEKTVFVGANNSGKTSAITALRYFLVDRERTSFCFNDFTLSHWPRIDAMGAAWEAAHVAQQALPEPEWDAFLPFLDVWIQVEENEVHYVQGILPTLDWGGGRLGVRVRYEPKDREQLQKDYLAARSNARDLQTAGAALAEEQGQDVAQFQVAIWPRTLVEFLQRRVTHYFTIHTYVLDPTACVDPQHGRAQPQALHGSEPIEGDPFKGLIRIDEISAQRGFGHAGESNIDDGDASGSGSTSRKLSSQLRQYYKSHLDPYENPDAKDLLALKAIEEAQEAFNVRLSDGFESPLKEMHTLGYPGVTDPKLNISTRLRPVEGLNHDAAVQFVVPIQTGGAPINLYLPEDSNGLGYQNLISMVFRLMAFRDSWMRVGKAQSKASDDAIIPPLHLVLIEEPEVHLHTQVQQVFIRQAYKILRNHDHLGANSNFVTQIVVSTHSSHIAHECHFDSLRYFRRLPAREHAIPTSCVVNVGEAFGGEQETKRFVTRYLKVTHCDLFFADAAVLIEGPAERILVPHLVNSHTEFHKLAESYITWLEIGGSHAHKLRSLIEKIGLTTLVVTDIDSCDAAGSSAAPMRGANYTTRNHTLKTWWPEIAELDALLDKPEAEKSKDYDAEQFTLRVAYQCPIEVEFKGATAEALAYTLEDAIVVANIEFFSTLPGTGLIAKFRSDIENSVDFAALSAAMKETLKGGGKAEFALDLLEIDNPSDLKPPKYIREGLLWLAAQLEQKQTELGLVAIAPVEAEAGADAEAGVEIAA

SEQ ID NO: 69977 - protein, 633 aa, Aminobacter sp. Root100
MNIDSASVGSNVTRDDPVEDEIASYLDLENPTSFFLFAGAGSGKTRSLVNALRHIAAKYRDTLRLRARHVAVITYTNAACDEITRRLEYDPLFVVKTIHSFAWSQIQGFNSDIREWLRVNLQTEIADLTAEEAKGRAGTKASAARLTSIGSKQRRLARLDEIKAFTYNPNSDNRERNALNHSEVIKIFATFLLEKSLMQRMFVEKYPFLLIDESQDTNKTLIDALLTVQQAHASRFCLGLIGDTMQRIYLDGKENIESSLPPGWKTPEKVLNHRCPKRIVRLINAIRLGADEQVQEPRDDAIEGWARLFVFPVDTPDKPAMEDEVRAYMAALTDDAGWSDRDQCKILTLEHHMAAKRMGFGQLFEAIAPIEASRTAFLDGSFAPTRFFTHSVLPLVTATQRGDKFLATKLIREASPLLSKDTLKGSEKPLNQLRTAQAAIDSLMSLWANGEPTCGAVLENVASTNLFVVPDSLKAALAALSAEPVVSDDDEEADPVGDNIAALLTLLDCPFSMIAPYASYVAHEASFDTHQGVKGLEFDRVMVLMDDGDARGFLFGYDKLLGAKGLSASDLKNAQEGKDSSIDRTRRLFYVTCSRARSSLALIAYSADPGAMKAHVIQSNLFKEDEVFVGLPA

SEQ ID NO: 69978 - protein, 778 aa, Ensifer sp. Root31
MHLHSLTYKNFRRLRDARVEFANDLTIFVGANNSGKTSATHAVDLFLSGSKDKFTVNDFSADCWPGFENFPAEDAAEQAFEFPAITLDVWISVDPDSLYRVVDLLPRAAWEGALVGVRIEFAAKDAAQTLASYRRMATEAAKFAQTKAEHGADYKPWPRNMRDYLARELKNEYGLRYFILDEASLDPANAAETYTPKEILGDTERTGHSIINSLIKVDFLSAQRHLSDGNAQARTEDLSKRLSRFYTRNQSKREDDHNALRALALSEDQLTKHFSDVFKDTFKSLRKLGYPGLSNPSLEIRAALRLERLMGDQQAKVHYLLEEATGDAEALSLPDSYNGLGFKNLIYMGVELLDLHAAWSVTEEGEEEKRQPIHLMFIEEPEAHMHAQLQQAFVRKLTELIPPAGADGHATQFVITTHSPHILYERGFRPLRYFRRSAEIGSKQSSSVFNLSAFYESNKEDRDFLQRYMKLTHCDLFFADGAILVEGNVERLVLPLMIGHGAEKLNAAYLSILEVGGAFAFRFQKLIEFLGLPTLIVTDLDSVYPPKPKKAAEAAPDANGDAATQSDNDACEDEDDELDDEGAAEGDEPKPSSKCPAGTAGAVTANQTLRQWLPGKILIEDLLAAAPESKLQAPQNGSGAHVMVTYQCPVTVTWGAETAELKSRTLEEAFAYENLEWCQKKEHHDLKLRWSKAGTMPLADLASKIHTRVKGQHFKKTNFALGLLASSDATWVVPTYIQQGLDWLTQHVAIVEEETADTAEVAGADEAPAQPQNVQVGQ

SEQ ID NO: 69979 - protein, 629 aa, Ensifer sp. Root31
MTSRAGKPDTPADIELRTLLDDDASTGFVMVSGAGSGKTTSIVKALDHLLKTRGRALRAQSKKIACITYTEVAVAEIWGDVGNNPLFHVSTIHSFLWAAVKPFQIDIASWVGRRLDKKITDTETEIAGFTNRTRAPTRERKHADLERYRAQKLTVGDVKRFTYGVGSDYPKGILGHDDVIKLSTELIRDLPVIAKVVGQKYPFIFVDESQDTDPDVVAALQAISALLGSKFCLGFIGDPMQKIYTSGAGVIAPLEGWKPIEKPENFRCPVAVLDVINQIRAGDDGLVQTGGKTKEVGGVRVPVQGSAKLLVVSKTDRTQSLADARQWLAHHNSDALWLSDESDADVKVLVIAHRMAANRLGFGSLYEAFHDKTSDGLKDGFDDGTHWAVTPLLKLLAPLMLANADDDQFEVMSLLRRHAPFLQREYMQANAVPGILKDMDTRLKALAQICGEASATPAFAAFEHLRDGGMFKLDDRILAAMAEYDVAAPSVESGDHAALVKLLHTPIRQLWGYRRYIEEQSPFETHQGVKGAEFSRVLTILDDEEGRHNQFNYGKYFGITPLSDTDEQNIRDGKETTVMRTRRLLYVCCSRAGEDLGVVFFADDPAQAHAAIVASGLFPPQDVINLAAP

SEQ ID NO: 69980 - protein, 711 aa, Rhizobium sp. Root1212
MHISRVQLVNYRNFERASFHFNKGINTVIGENGSGKTNLFRAMRLMLDDDFLRWAYRMEESDFHRGIGNWRGHWIIINIEFGEVSQDEAVQALFLHGTGVIEDEAIARGTYNLIFRPNAAIRTRLAQLDQDDHAGLAAILNAVTLDDYETVFTGKSTADFSDPAVYQELVGNFETVQFPAELHPATLGGRVPGIMSVSKEVCFTFIQALRDVVSEFQGQRTNPLLTLLRSKSGDLDPAVLAPITDRVNQLNSEIEAIPDVGEIRADIRQTIRDAAGETYSPASLAVRSAVPGEADRLFQSLKLFVGETDDEYEGAINELSLGGANLIFLSLKLLEFKYQKAKQACANFLVIEEPEAHIHTHIQKTLFDRLNYPDTQVIYSTHSTQISEVSNIENVNILGRSGSRCEAFQPSAGLEAPKIRSIQRYLDAVRSNLLFAKSVILVEGDAEEILVPVLVKEVLGVSLDELGISLINIRSTGFENVAVLFHDDRIRRRCAIVTDLDATFFNTDPHPDDPDTLKSAKEKALGSQAAGVARRTRLTAFKDGNDWISVHYAPRTFEVDFVAAGNVELTVSVLNSVYSDAATIVAATEELRSGDVAIYGKRILAMASYAKKGWLAIQVAKVVTGTTRIPSYLVEAIFTAHKPLSRRVLANMIEHRLKFHTDPAVISEAQVLALRTQVEAFRVGDLEIEPLREAIIVAMAGDVIIDVLGYA

SEQ ID NO: 69981 - protein, 600 aa, Rhizobium sp. Root1212
MFVWEDGDLNEEQVDAIEHDGSVYLAACPGSGKTRALTDKIALELSKLESKRHWVIAITYTHRAAEEISERIERLGVGTDQLWIGTIHSFCLDWILRPYSVYHEKLQNGFRVVDQHETEAVLDQLCHQSPYQVRALDCRYYYSTAGCQLENANPNRRLAALSVLNGYWHHLEENRLIDFEMILGCAYDLIVAQPSIPILLGKLFRYILIDEYQDTKEIQYAIVAAILSASAGNTETFIVGDPNQAIYGSLGGFAMGRLDFAALAGIALADKSLLSNYRSSDRIVDYFSNYCVVPAVIEAVGPDKEYPSVVSFNQEINQQELDDEIVRLIRYNIETLGIPPHEICVVGPQWIQLAAVTRRLVAALPEYSFDGPGMAPFSRDQDNIWFRISRLALTRPDPQLFVRRTRWAKEILDHLRSAGVDVSKISPRDLLRHCNSIEIAVEDGLEYLELFFAELLFVLDIEIDLFPPLQEHHVAFFERSRVQIQRLENAGVQGVSSIAMFRRVFATRAGITVSTIHGVKGAEFDTVIAFALLEGMVPHFSEPNAAESASKLLYVVASRPRKNLHLIAETGRISGIGVPYETTQVLAEHGFAYDLIDGPG

SEQ ID NO: 69982 - protein, 728 aa, Nocardioides sp. Root1257
MQIRCFRVENFRRLKNARVDLDRQRTIFVGANNSGKTSATHLFQMFLSQQPRAPFQIYDFTADCWEVFDSFDVDGGDPDVELPRITFDLWFEVDEDNLHRVLELLPSLDWEGEPVGVRMVYAPRDGAKLAANFKEARAKAKATTGDVQTSYKPWPQTMVEYLTKRLQQEYEIKYYALDANECDDQFVLNDGYDPFFLGTHLTGASSIVDSIIRVDFLNAQRHLSDVDSHGRSEDLSKRLSRFYERNLQKLDSDLDALGAIAESEERLNKHFADVFGPTLERLGEVGYPGIANPGLVVKASFNAHGILSTSAKVHYSLPAPAGAGAGSEQMLPDQYNGLGFKNLIYMVVEVLDFHQAWAEAEIDRPPIHLVMIEEPEAHLHAQLQQVFIRKILEILPAPEADFQTQLVVTTHSPHIIYESNFKPIRYFCRSVAPNGLHCSDVKNLSVFYDDEEVSTRDFLQQYIKLTHCDLFFADAAVLVEGNVERLLLPLVIERFVPDLRSCHLTILEVGGAFAYKFAKLLDFLSLPTLVITDLDSVAVPEASGEDDEDAKQASACAVDTPGAVTSNETLKQWLPKIGGISELLAASAEQKAPASPDGGPGLVRVAYQTYETVSWQAADEDRAGRTLEEAFALQNLDWTQSVDGKDLGLRIAKASELSITELHEKLFKRVKGTHFDKTAFALSVIAAAEQSWKSPAYIVEGLEWLREQLELVVPEELASQVAEESDSE

SEQ ID NO: 69983 - protein, 626 aa, Nocardioides sp. Root1257
MTSRVDAPDTDADRQIREILNQDHLIGFTVVAGAGSGKTTSLVKALAHVTRTRGPSLLAKTQRVACITYTEIAAREIHEEIGNDPLASVSTIHSFLWALAKPFQKDIGLWVATRIDEQIAGLLEKQANYKPGTRQTTKDNDAAALEKRQHQQAAVKGVKRWTYGIGADYARGIVGHADIIKMVPEMILERRLLAQLVGRQFPFIFVDESQDTFPEVVEALKHVWSLAAGKMCLGFFGDPMQQIYQQGVVSVSLEPGWVNVDKPQNFRSSRRVLACVNAVRAEGDTLQQVSGLSEQPAGEAFCFVLPSDDQRSDRLELVRVWLDQHSTSGNWTRSAHEGGSKILMIVHRMAAKRLGFENLYASFHDNKSSSLGDAFDEGNAWPLTPFRDVILPLCLAKEASSPAVLAVLRESSPLVRVGQASRQLKAALASSKAAVEELRQLAADPSTAKLGDLLRSAANSELIELDPRMAAYLYPDGEHGDVVLDERVVDVLNAMAECVLSELEGYYTYVKQESPYSTQHGTKGSEFERVIVVLDDNEGRYSLYSYDKFLGLKDLSATDVDNQSRGVDSAIERTRRLFYVCVSRARESLAVVLFSDDVARAAEAVRQSAIGQHVQVLTVDDLSPLA

SEQ ID NO: 69984 - protein, 624 aa, Massilia sp. Root418
MSIYAADSGIAVTDVRVSNFRSLGNIEVELGDLTVLIGANNAGKTSFLDALFAAIVVGRKTLTSDDIRLAKGEAMAPKDRVVTVDVRIYPIGADGRKSGSLPEGSFWTALWGGAIVLDANLDEFIAFRTTLTWSVAKADYVVDRKPLSEWRDFADWLATPVSEKSITVAQLEPIALHYIDAKRDLDDDLRRQGSFWRRMTDDLGLPAEDIEELEAALSSINQQIVDKSEILKHLKDNLSDLQGVVSADSAGIDITPVARKLRDLSKGVDVSFSTSGAQSFPLARHGMGTRSLASLLVFRAFAAWRNLKAKEGGDKIHSVLALEEPEAHLHPQAQRSLFSHIKAIAGQRVVSTHSPYFAGQAQLADLRLFIKNGGETSSTRLNLAELSNPDDLRKLQETVIESRGDLLFSRAVVFFEGQTEEQAFPIWAQAYWGVSIHELGFTFVRVNGTAYFPFVWLAKSLQIPWFIAADGEPQPLAKLEDALKKAKCNASAKCDNLVVLPNGQNFESHLIVHGYLPEIELALNELHGVENALDRHIESENGKSYGPNKGVRDYAGEDGRKRAAKDAMGLAKTKLAKPLARIISELEDEKRRFPPGIRRLFDIIAKHQGLPQLASDNTKEDEEL

SEQ ID NO: 69985 - protein, 610 aa, Massilia sp. Root418
MSVPAKVRLSTQQMEVVSHVDGPLLVVAGPGSGKTRVLTERVRSLLTEVPGHFRVLALTFTNKAADEMRERLTDLGEVRQRAFVGTLHSFCLVMLSERGKFVGVEGTPNIFEQFKDRKDVLIKAIADDPLLDQEINNVEDAKERGKRVDDWLQMISRIKAHPITCAVLDDEMEQRVVDAYDAGMRACNAYDFDDLLLLTYQLLTNNPKLADFYRRLYRFICIDEAQDLNEAQYAVVCALCGESFKNVMLVGDPKQSIYGFNTSSPKYMKRFGEDFGAKRIELTENFRSSRAVVEKAKSLDPNYSVAGQVPIAGVCESMVGSTPEDEARIIADKIEELFALGHPDVEGQITASSCAVLGRTRFALIEVEKTLKARSIPFYKRLTANHENESDLVEDFQLALRLLANPRDRLHFAALAKRWGVSAPRDVIEAIPAIEAMASSSSEARAPRVTEAIRAVICDALKFDLMPAFEKLRNYADMLEEAPRQAIYEDAAVFSLEWDQYLRAGRPGRSIASFMSNKALGSTQKATREGVGLLTVHSAKGLEFDVVFLAGMAEGTFPDFRARPGPTMEEEKRSAFVAVTRSRRLLYLTFPRLRQMPWGDWRQQAPSRFL

SEQ ID NO: 69986 - protein, 606 aa, Chryseobacterium sp. Leaf405
MYISNLKLWNFRKYGSHTFDIDTPDLIVSFNRGLNILIGENDSGKSAIIDAIKLVLKTHAYEWIKVEESDFFIQGNKISEVLRIEIEFSGITNKEAARFTEWCGTADEKVIVGDNEQILRRPKLFLIYQVQIKDGKIIPTDVRAGMDGHGNTLTAEAKEYIKCTYLKALRDADSELTAKKNSRLSQILKEHKEFKIRQTNGLHEFEELFDVTSHTIREKFKEEGVGYNINIKKVVDDFVSAFIGNSSKSSFDLGPTKISNILEKISLGIADSNNLGLGTMNRLFMAAELLHLKKANWNGLKLCMIEELEAHLHPQAQLKIINRLKEEPDIQYILTTHSPNITSQASLEDIIICKNNNVYPLGEKFTKLDKDNYKYLKRFLDVTKSNLFFSKGNIIVEGWSEEILLPALAKKMIFDLTKNEISIVNVASTAYLHFAKIFLRQDGQKMNVPISIVTDLDNRPDENGVFKTLDEESEKVKTKQENLAILKTGFNETDITLEIAKEWTLEWCLYKSCLSKIFKNAVSEVHSGTDEFKKDLNDNFKDTFEGKFIKKLLKKDGNSPIDKVAVASVFAEYLENDKTISKEQIEKDEYLMYLINAIKNVCKNGN

SEQ ID NO: 69987 - protein, 750 aa, Chryseobacterium sp. Leaf405
MLLKMSAKMEINPNDIRRAEEILIGGAEFDQERREFIHCMETLDLLAVPGSGKTTALLAKLYCIAQQMPLEHNQGILVLAHTNHAIEEIEKVLKPICPQLFSYPNFVGTVQSFANRFIANQACFELFGSYIRKNDDEVSNDELKNMFYNINYQSKLNGFIFNQLYSQFSVIKIEYLIKYFGLTLAEAKIKLLSLKKERKINKNGSCNYLAIKSIAKNDIDPINSFLRKVHDESITKFKNEKQTFCLRYKIDFIKSKFTSNSGDLSFGSESGTELLSYFTKAFKNGILRYSDSIALSLYYLNVNKELISILQNRFKYVFIDEMQDLDQDQVDMIENIFFNEKSNTVIQRVGDKNQAIYSNVSVVDEIVWKTRKEISPEIFTKNFSLNNSYRLSPIIANLVDGFVLDREEGYKVIGISNNQNLKPYLLVYDNESDADKLKDKFISLIKHHGLEQNSKNVERGFHIVAWTTDKEEDSDKWYLRKLFPEYSKESRQKKEDFDCLRKYVFLFDQNKKTLESIRKSLLNGIIRILRIEKIYIHEKTEKHYRKSSLIRVLKDTNETFYQYFNQKLFDWSYSIVVHKNYEDIFVQYSTFIEDELSNVLSNFSIINSSSFINMEYDYVATENFSNNKTCIGELQIKLGSIHSVKGQTHCATMYLETDYYNVETHKLNVEIVSKTKKRKQVLGRNPLFFQEQNFSHLNKARSNETLKMMYVGFSRPTDLLCFAVRKENVVNDLKKYRESGWNIQFVDDDL

SEQ ID NO: 69988 - protein, 617 aa, Rhizobacter sp. Root1238; identical to SEQ ID NO: 69972

SEQ ID NO: 69989 - protein, 615 aa, Rhizobacter sp. Root1238; identical to SEQ ID NO: 69973

SEQ ID NO: 69990 - protein, 708 aa, Bacillus sp. Leaf75
MYISDLEITNFRNFKNANFKFEPGVNTLIGENSSGKSNALYAIRLLLDDTLPINASKFLESDFNQNIIDWKGHWIVLKLTFKDLDSSEAASFLAHHSEDVTTDESIGTYALYYRPNKSVRKRLYEFTQQSRHIEDLDEILKDITVNDYETVFTCRVNADFNDEQMYKELVGDFEEGIFPDPEDDNANILGNISPHITLIKKEVSCTFVKALRNVISELKQRKSSPLLQLLRGTAKDIEIEEADAIKEQIKALNENISELNEIDILTKKIKASLNKTLGYTYSPNVNIKSELPEEMETLLHSLTLWVGDDVNSNQGKLDDVSLGGANLIYITLKLLEYELYQDQEEKAAHFLLIEEPEAHIHTHVQKTLFDKYHFENTQVIITTHSTHISSASKIDSVNILIKELGFSKVCQPSKGLDVDTCKRIERYLDATRSTLLFAKGVILVEGDAELILIPAMFKAVFGLSLDEIGVSVINMSSTVFNHIASLFDDQRIHRRCAIITDFDEAIDVLPENPNDDNKEQKKMRDSQTAGQERAEVLNAIYSNNPWVEVFYASHTFEIDFAINFNKHEIKEILPAIYTRQHDIDEATKKLDSGNKIVVGKEAIRLANKVGKGWFALLLSESIDVFTFIPEYILKAIAFSSPNLTRDHLIAMASYRVKNQELHLSDDGEISLENMSLEDLVEIIKEAKDDDDLIKLINLLGVELREYAH

SEQ ID NO: 69991 - protein, 599 aa, Bacillus sp. Leaf75
MHINLNPFQKAAIDEEENALVIACPGSGKTRVLTLKIAKELEKLKKRTDRIIALTFTNRAADEIEKRVHGLGIDVSKLWTGTIHSFCLQWIIKPYGSYLPELQKGFSILDEFKAQDLKNSFKGDFDIPGYEDFITRRDSAGNYVNEKSNFNEAAETYHKHILECKLIDFDLILYFSYLLVEKYPKIADKLSRIFKYFFIDEFQDTQDLQYKLIGNIVKAAEGECKIFLVGDPDQAIFKSLGGGVKSPSEISQEIGGYSVKKLGLNGNYRSTQRIIDLYSNFQSTGLSIESLTDYHDEGGIIAFDRVINKDKLVEKITGIIQEQISNGVSPNEICVLAPQWNFLTSMARKLKSHLPDVTFDAPGLTVLPRDRDNFWFKLTRIILITKEPDNYLIRMKWAKQLLEELVMLNGTVVYADIESCRKFLKTINSINIQKEDAVEFLEASFKYIFKKIGFDYASSDLLMGQWDSFFHGLSRRYEYSDFSDIPKDINYMKKMFNTKEGVVINTCQGVKGEEFHTVIAFGLLRGYIPHWSQIINQSISNEIAESNKLLYVICSRAKKNLFLFSENGRFTKNKQEYQVNNQLNTIAFEFNSLTSYRTE

SEQ ID NO: 69992 - protein, 536 aa, Phycicoccus sp. Root101
MRLTRVKIENHSRLADSEIEVRQHLILVGPNDVGKSSLLRCLDFLLGASNAQLYNRITAEDFADPALPFVVEADLAGLSADHHALFPDEATVDPITSVITLTVRLAVVVDANGTLGIDRLAPHSGTNRQLSRAQMDALGWTLLGATAMARDLRDDRRTALDEILQRVDLGAEKAGFDALVEQVQKGLKNSKILEGLRDDLAGQLSKALPIAIDKGALEFVTAATADGDVLADVRLHVERGGSFKNITDQSDGLRALYALALYDLFSVGANMVAVDEPEIHLHPTSQRSLASLLRDGPNQKLLATHSPDIVSAFSPDSIVAVRAGGTLVQPKAGFLSADEKMVVHWWVRDKLEPLTASHVVAVEGVSDRIIVQVVADLTDRNLDRLGVSIVETDGAGDMGAIIKLFGADGFEVDMTMLVDEDARNDTANKLGVAAADLESNGHFVSGPDLEAEYIAAIGALDTWVAFGTSGLFTKNQLANCVMTGPGGTPTPDDIRTFVIKYRHKVRAAMAAAKVLDDATARKITSVNATLTKVAGK

SEQ ID NO: 69993 - protein, 561 aa, Phycicoccus sp. Root101
MKTPTPAQAEVRDHESLALLLVAPAGCGKTEALAIRVAGLIEAQRVARPRRILVTTFTNRAKDNLRERLREYVPLATQREYVTVANFHGFATRVIRAHGAVIGIDPGLEMPDSDWVTERCFELGIGWGGKDAVTEIFRVVKQLPSTDVQVAAELAARGNKWAIQIEHERLAANRATYDDLLRYAELILANDAVAGLYRSHFGAVIVDEYQDLTPQQLRVLQRLSDGNITFAGDLAQGIYRFAGATPTEIDALMRPLCEHVITFNESHRSSPAVLDMVNAMNPLTGGEDLTSADPSRWPAGGLAGAMTFPHATSEANWVVRAARLILKLAPNHRIAVMSRIKSRVRFVEAELGGTDVPVHRWEDGMLDTETANIVKSTLTRLNVADLGLATDKLTFLRELAGIDLIDEYDTRRNLVDALTWTLERLGEGLHPDRIAERIRVGDQTTLIKAPGIHLLSGHVGKGQQFDWVFIVGAEDDNMPFFRAHNSDVELEEEARILGVMLSRARHGVVVTYSEVVPKVDGHDKSRAVSRFVAQLGPASPRDRDGVIRWLNDAPWDDLRVT

SEQ ID NO: 69994 - protein, 775 aa, Sphingomonas sp. Root1294
MYLKKVSIRNFRRLSNVVIDLAPDISIFVGANNSGKTSVGHALQLFTGRGKFSVHDFSADQWPQIVAFGEGEAEAELPSIEIDIWLEIGADDIHRVVDLLPSLAWEGALVGMRVVFGPVDPNMTRVRYTEARQRALEAMAPQDGEALAFDPSPRNLQEYLRDKLNDEYELRHFVLDPRRFDPAMVAEVGYQPKQLTGRDRTGAKILESLLRIDFLHAQRHLSDLPGSARAENLSRVLSRFYDRNLEQRGEDLVALRALAESEALLNEHLERVFAPTLRSLARLGYPGLANPRLMIRSALDPESIMSSRDGTRVHYALGPDDGATEPPTLPDNYNGLGFKNLIFMVVELLDIHAQWLGIEDNRPPVHLIFIEEPEAHLHAQLQQAFIRKVMDILALGEEDQVHYTSQVVVTTHSTHILYERGFRPIRYFRRSRSEAISTSDVLNLSIFYDDTDPNIRTFLERYLRLTHCDLFFADATVLVEGNVERLLLPQMITSAAPRLQSTYLTVLEIGGAFGYRFKSLIEFLGLTALVITDLDSVFAAPVLEADEEGEGGADGADGAVVAAALDEGGALPAAEAEDEDDDQEDDAAEPAADVAEKPGKACIAGHPGAATSNQTLLQWLPRCGTVEALWAATDDDCTQPRANDNQALVRVAYQCRTDVTWGEDTMALAGRTLEEAFALENLAWCQDVARKSLQLRIPKAGDKDLTDLARRIHRRVQAKSFKKTDFALALLAEDPAQWAVPAYIANGLRWLENELAPLPAGGLGQGDAVNPEIAA

SEQ ID NO: 69995 - protein, 622 aa, Sphingomonas sp. Root1294
MTSRIGSPDTPADLQVRDCLGEARSFVMVAGAGSGKTTSLIKALAHLGETRGPALRRAGQQIACITFTEVAVGEISHDVGVSPLFHVSTIHSFLWSIVRPFQTDIAAWVVARIDEKIGERQERHAKPGTRAATRVRLEQEIADLGIEREAIGRVEKFTYETGSRYAEGILGHDDILRLTPACVTVHPLLRRIVARRFPYIFVDESQDTQPAVIEALRQIAGEEPLCVGFFGDPMQKIYGAGAGAIALNAGWADITKPENFRCPTSVLGVINAIRAPGDGLAQIRGRTVVIDDVEQPVEGTANIFILPADNQRSERLAAVRSWLAEQTADDAWLSDLRDGDVRLLVLVHRMAARRLGFADLYAALNDGAPQSMSEGIADGTAWPLRPFTQHLLPMIGAARADDQFAIMSILRAESPRLQSDRLRGQPVAPVLAALQQAVNTLSIMLAEGSLSTVRQVLQHVRNAELLSLDDRFGAHFVAEPVDDGSSGYANVAAFLDCGVDELWAHRRYMLEESPFATHHGVKGAQFERVLVVLDDEEAAYNLYSYGKYLGFTPLSDNDEARIAGGEESVLDRTRRLFYVCCSRAVKDLAVVLFVPDVAAARAAVTAAHIFPEATIRELHQLN

SEQ ID NO: 69996 - protein, 711 aa, Devosia sp. Root436
MHISRLQLVNYRNFGSANVYFKKGINTLIGENGSGKTNLFRAMRLLLDDDMLRMAYRLDESDFHRGLDNWRGHWIVISLEFDEVAQNEALQALFLHGVGNVEDGQVGRATYNFIFRPNTAIRLRLAELGEGDRDGLVRLRNAITLDDYEVVFTGKSTADFTDPDQYRALVGDFDAVRFPDEMEPSEIGGRVPKVLSVAKEISFTFVQALRDVVTDFQNNRTNPLLSLLRSKSGEIDQAALAPITALVEGLNTAIEELPDVGTIRGDIRQTIRDAAGETYSPAGLWIRSGVPAEAERLFQSLRLFVGESDDGYEGAIHELSLGGANLIYLTLKLLHFRYQKEKQVCANFLVIEEPEAHIHTHIQRTLFDRLNYPDTQVIYSTHSSHISEVSNIENVNVLGRVGRRCEAYQPAAGLPPGQVRGLQRYLDAVRSNLLFAKSVVLVEGDAEEILVPALVKDVLGVSLDELGISLINIGSTGFENVAVVFHDTRLRKRCAIITDLDAAFIDTVPAPGDNDATQKAKAKVLGSQRSGIARRIRLDGFVAGNPWVTVHYAPHTFEVDFVAAGNQRPVVAALPDFYVHAPTIALATAELGSGDIAQFGTRVLTVANGAGKGWFAIQVAKKIDPDTELPDYVAQALFAAHSPSRAMIANIILYRLKRLEIDRRGNPDTLAVMFAHVERFSAGQIELDALLLEMAAAFPADQISRVLNHLT

SEQ ID NO: 69997 - protein, 597 aa, Devosia sp. Root436
MTFVWPKGDLNDEQVDAITIPGNVFLTACPGSGKTRALTYKAALELSRLATTKQRVVAITYTHRAAEEIHERIEALGVGTEHLWIGTIHSFCIDWILRPYAIYHPALRHGFRVIDAHGTERRLEEHCRALRNGVRPFDCSYSYSTRGCELRDTHGRSQQAVGSVLNRYWADLEAKRQIDFEMILQFAYELIATVPSIAILLSQLFRFILVDEYQDTKEIQYGIIAHVMRAGAGRTNAFLVGDANQAIFGSLGGYAITREQFAQDCQAPFTPKSLSINYRSSTRIVDYFTNYHVIPAAISAEGKNRLFESAISYDHTTPSRQLEDELVRLLRYNIETVGISPREVCVIAPQWVALADITRRLVVAMPEYSFDGPGIAPFARNIDNFFYKVARLALTEPSPQLFVRRLRWAGDIMLELERAEVHLRGVSPRGLLSMCNAIAIDEEDGLNHLRLFFDEFLTGLGIVLADYPALANHHETFFGDSQARINRLQEDGLQGISDIAMFRRVFASRSGITISSIHNVKGAEFDVVIAFALLQGMVPHFGDLQVESAKKLLYVICSRARKNLHLISETGRMNRGGPYLPTEVLASYAFNYDDVPD

SEQ ID NO: 69998 - protein, 587 aa, Rhizobium sp. Root1334
MREEQGRHFKPGRRSVRFDHITGTVREDEYVDLLNEAVRIDDIISFKRINARRSVSNKDSDRSLSAMSAKIYNAMASDAGDEEVFETFKEALTNTDDQLDGIYANLFKEVISDVRSFGGIKEGDTEIKIRSTLQHRDLLQENTTVMYGQGVDLTLPENHNGLGYLNLISIIFEIKIILNEFKRGQKPRPADINLLFIEEPEAHTHPQMQAIFIANIKRLVGRAIRNADGISRPLQTVLSTHSSHIVAESDFDDIKYFRRIEGLTQSRSLKELDGLYKAAGKTGHYAFLKQYLTLNRSQLFFADKAILVEGDTERILLPAMMRKIDQIDTAKAWADGAVQPVALLSQNISIIEVGAHSQIYEIFLQFIGVKTLIITDIDSAIEELEFGDLGIPILNKQGEQKKTVRAHGIENATHTTNYALQFFHGVGPDISYFVGLTFEQKVVGKDPDTGKWGPKVEGQVLCAYQISENDGDGNGYHARSFEDAFFHVNRAFISNSTAEEPDIQKAGFPSLVGKHLKKYLAGGSSFEMAEDGITRKPSFAIEILLNSATSTSSVASPLGPAKEFSFDFDNWNTPGYIEEGLRWIKVG

SEQ ID NO: 69999 - protein, 632 aa, Rhizobium sp. Root1334
MDQGGLNLEPEVIEVLKHVAAGRNFLLSGGAGSGKTYSLVQVIGELLRTDPSAFVACITFTNAAVREVESRISNERLTVRTIHDFLWDVVSPFQQELRKVLVELLSGDEPKLEPGTVVVSGNMFAGKKVQYKEFTRVGDGIVSHDEVIIIAHAMFETYPKIRDILRDRYRYILVDEYQDTAPEVVKILLDWLPLSSRQGLCGFFGDAMQSIYDEGVGSIQPYVVAGTVDEVRKQQNRRNPRLVFELANNLRTDGIVQGASKDLNAPNMIQGKVKDGVIRFYHSTGDDSRLQKVRDQLGWDFSDVLETKELNLTHNLIAPQAGFGDLMEIYDKDRVLAFRNRIVKFIKTNGNLNDYQSETFGKVVASLQKGKTGNALRAVSPTAGMQAFIDANPKLLEYANEIEFHQFRRLYVDKDQLIDDKKHTEEEITRKGSKRCDFVKHVFKIQSVVHLYEQRRFNEFLRKTEFRLTNAQDKLRIQKCVEDIGTMKDSPILDVIDFAHDNGLCIKDDKFANFRAEKRYLFDRLIGVAFSSFQKLYEYLEGRTTFSTQHKIKGREFERVLVLLDAGEWNHYNFTYLFEGSGTDSVIERTGKLFYVCCTRAKDVLAVYFQNPTPAVLKQAEAWFGKENVVEV

SEQ ID NO: 70000 - protein, 591 aa, Aeromicrobium sp. Root495
MTTAAVAPATRHAALYVERVTIRNFRGIVSCEVEFEPGLTLLVGRNNVGKSRVLSALHLALGGRVADVDDFTVGSSAEPEIDVVLAPSPPPASTDEQAFEDDEGRLMGGDAQTISDPPFRERFAWRAHVRRSAEGLGARSEFKILTFDAASGNWVERSGAKDLGRDARGLVASDLVNTGRDLMEELGRRGSGVRKVLSDLDVDDVTRADLELRLAGLSADIVAGSGTLASVSRSLDALNRAVGSIGAPGINPIPITLEELARSLSIDLDSGHGALPIRMHGAGARSLASLQIQGVLYERLLGADGGSLRPHPVTLVEEPEAHLHPQAASELPHLLKSIRGQVVASTHSSQVVTASDPRAIRLFREDGGSLAVVDLGPAPSNAPGTPRPFRPSHHTEEMEKLKRLAERPFGEILFASAIVVGDGATERGFLPPVLRHALGAKAHGVCVIDPESMATQTARAVAKFANAIGVPWFIFADSDPAGVAAVENLATTGASPATVIWVGKPDSAAAKGVSGAIEAMIVDFDEDVGRTACERVRPDLAPVANVLSTMKDLKGSIGQTLADVLLERYEDSTTWPSPVQEMIQAIDGALS

SEQ ID NO: 70001 - protein, 603 aa, Aeromicrobium sp. Root495
MTTTDDFNEPVLSPEQQAAVDSNARALVVVASAGSGKTEVVARRIQRLLLEDSGGNGRVLALTYTVKAADELRARLDTRLGALARRIDSETIHGFAHSLLRAHGTRIGLPLEPELLARDEDRVELFRSWLRDRGDAEPEDLKSRLMGFDLARATGERTDGLNDWLQALDDNGALDYPALLTRATELLTVGSARRQIRRLYTSIVVDEAQNLTKAQYDLLTELVSDQGEVVIPTMLVGDDKQSIVSFAGADPRLIGVFTEAFVAERHELHTNFRSATVLATASSKVAAALGHAVSEEAAFAAPGMIDLEALATEAEEGERVAAWVEGLLESGLPEGALGIGENNSLRAEDIAVLSRSAAGLRFVASALAEREIPFALSSTPNEWLTTVAGRVVLEAVSLKAAPDHHSTYWELGRLLGVDLAEESTDAVRDAVFASDDELIQAVAGVVDLTDVAELVPFLQGTELPTGVADAEAANWQTDVLQFSTSWAQFDGLTARSDLTWGNFKLHCSRAQRGDDLASGVRLLTVHKSQGREYAAVGVVGLNDGQFPDFRATSDSALRDELRTFYVAITRPRRVLLLTRATARDTRYGPRTTQPSRFLSLVSS

SEQ ID NO: 70002 - protein, 775 aa, Sphingomonas sp. Root50; identical to SEQ ID NO: 69994

SEQ ID NO: 70003 - protein, 622 aa, Sphingomonas sp. Root50; identical to SEQ ID NO: 69995

SEQ ID NO: 70004 - protein, 645 aa, Microbacterium sp. Root1433D1
MFLERLTLLNFQSFGPTPTSISFDEKLTAFLGGNATGKTAASQALLRLFSVVAEQRAIRLSDFHVPADEEEAPVSREMRIEAVFAFPELDDPDSDAAQTVPEFFRHMTADDDGQLKLRIVLESTWTDEGPASGTIRTERKIVYTFDDDVEGRTARFDEAAREKIQAIYVPATRDGAREVTGFLRGRLWRASQWSDTFRDHLTTAADELSTKFKDELVVKSVTEAITTRWQQLHHLKSETNPTFEPINRVLRVMVSNAEMLFEPSPTGRTRSAGELSDGQRSLLHIALTAATLDIEREIVGGKHPDTFDLTPSSLPVLTLLILEEPENNLSPFFLSRVVQQLLNVAERGRSQTIISSHSASVVSRIEPDQIRHFRLRRKKLTTKVREVPLPAPNTDAGKYLRQAVRSYPELYFARFVVLGEGESESVVLPILAAARGIHIDQSFVAVVPLGGRHTNYFWRLLDGLGIPYATLLDLDFGRAGGGGDRLKDVCNELEKIGYDPFDGAPGGATSVADLKGLDTIQKIAPWLTHLRRYGVYFSAPLDLDMRLLMEFPDAYRVKVPGGRGPMSKTIPRSAVLGAADVRPNVALWDRAARISDLRWYRYLFLTNSKPSSHLRALARVPEADLASLDGGLGKLLDRIGKAVGD

SEQ ID NO: 70005 - protein, 631 aa, Microbacterium sp. Root1433D1
MLVSEDDWEPLGEGIDDLEESAWAALKAGSASVAAGPGSGKSEFLAQRAGFLFQTGRCPHPQEILAISFKKSAASNLRDRVQKRLPEYAPRFTSMTFDAFTKMIVDRFSALLPAPWALTEYQIGFSNEREIKSFLDGIAGSAPPHLEDDILAIRAFDFLAKYVGATSLDDDLLSPQTAEAYAVHAWWTQNYIGRARPTVDFVMLNRLAELIIRTSPQLRTALAATYPFVFVDEFQDTTFAQYSFLKEVFAGSGAQVTAVGDRNQRIMGWAGALDDAFSEFEVDFTAEPFVLTANYRSSPELVELQHRFAKILSPEASKQTSHVLSETGDTPAQVWSFADEDSEASKIGEWIRQDMDDSGRTASDYAILARQHVAQMEPRFRAAFEEHDLRVRNDDLLVGVIRLQDLLSDELAALLMDVIRLGASIGGEPDAWMNVTSTLEALPEQTRRRRDSWEDRLSVFLTDLRTWFRETNESLPATTGGTELASAVLDRVTSFISMEELSGSRRFAENRDEVTTKLAAFGIRLASVLEEASAWNEVADVFRQDDAVPLMTIHRSKGLEYHTVFIVGLDDDQWWSHANNSIESTMTFFVGVSRAAERIVFTHTTHGVSRRKVRDLYNELEEAGVPFLELD

SEQ ID NO: 70006 - protein, 752 aa, Caulobacter sp. Root1455
MKLSKAAIRNFRRLEDVTIDVEERETVFVGPNNSGKTSATAIFRAFLGTREFKIHDFSVARIAAFDAFGEDLEAPQTVQAEQADPFAAILGEAPVEPAAAAAPAQDQAQPQEDADPALPAADPPPLPEISLDLWFTIDPDSIAFGRVYTLLQSLSDEPKVGLRLTFGVEEPKKLRTEYQAAYPKPEEGPRAKTLFEYLSIEGNLSRYCAVRHFSLSETPQADGSASVKAVRLDPDEGKRLVKNLIRAEFVDAQRNINDDEGARANRLSTAFASYYRKNLEQISAAAEAQSVIDANNTALTEHYGSQFKSLMNLIRDLGVPSINDRELQIISSMSPDAALKGNTELIYVDAGRNHRLPEPYNGLGFKNLIYMAIQARHFHSQWIATTENRPLCLLIFIEEPEVHLHAQVQQTFINNIWSVINDSAREAGEPELVPQVVVTTHSSHILDTIDFEKVRYFQRCHLEGETDLDSIRNASIVRSLKAFRPEDETKSASFPVDETDDAQRLSTTEALAFLKRYLRLTHCDLFFADAAILVEGAVEKLLMPTMIDKAAGRLRGTYLTVLEVGGAYAHRFEGLLSFLKIPYLVITDLDSVNAKGYPSACRGDTPNARTSNATLKKLCNVSTVPALLALTTQDKQSAEKDRCVAFQVAVPVEVGGVAQQAIPRTLEEAIAYENLAALHAKSMSIGIDVPTTWPALHQAVYDQIRSDKFKKTAFAMSLLATDADWATPQYIAQGLQWLEGRLCPTKIVGEAV

SEQ ID NO: 70007 - protein, 615 aa, Caulobacter sp. Root1455
MAKRIETEADKQVRACLDEKRSFALIAGAGSGKTSSLIDALARIRETDGPRLRRDGQRVACITYTKRAVEVIRARLGFDDLYFVSTLHSFLWGQLAGFQEDIRRVLIEDRLPALIAKSEQKMLEKGGHTKEGQKHRDRADRFKEELDAVKLVPGFTYEDSDFSNYVKGELGHPDIIEIASYLLRTNKIFRRITALRFPYIFVDEAQDTFKGIVEGLNLVCAGEGLPLVGYFGDPWQQIYEDRAGDFGPPPGGKLITKTENFRCSESVITFLNAFRDDVEQYPAGDNKGRAGRVAVRLIRAEKPEGKRNVYSDDQVARALERMDNALDAWGWKDREDVMKLLLARQMIARRLGFSTLNDLFNDETKASSRAKDAYEEGTHFLLIPFLTTICPLLRAREAGESHRVIEILRRESPAFAIDGENAAKSLRHMLEASQAAIDELHKRWTEEKVGEILRHCAKTRLIRVSDRLREHLARAPRAEAYDPTLHVQEKADWLADALFDMVPAPLAPYAKFIQENSAFSTQHGVKGEEYGRVLVLYDDVEAKWHHYNFNKMLTPKTSGDPTEGQLEKSRKLAYVSFSRAEDELGIILFTPAPEAARAELMERFAITTEQISIDG

SEQ ID NO: 70008 - protein, 772 aa, Caulobacter sp. Root1472
MKIDFIEIGNFRKLQSVRIDLAEERTIFVGANNSGKTSAMVALRFFLMERARFSINDFTLINWHKINEWGEAWDAAYEAKQPLPASQWRELVPTLDIWLSVADTEFHYVRGILPNLDWDGGQLGVRLVLEPKEAAALQQEYVTVRAANRKVQSQAAAAKPEGAQNVEKAVQLWPECLTDFLAKRLGQLFKINAYVLDPDKCKPTEVGIAALQALADEAEPLDSNPLKGLIRVNEIGAQRGFGQADDDRDEDDDAGGPSQTGNRRLSDQLKKYYSAHLDPFELPDAKDLHALEAIETAQRAFDGRLKEGFADAIKEMETLGYPGVTDPHIEIATRVRPIDGLNHESAVQYVVAKGAAGVKALALPEYYNGLGYQNLISMVFRLMSFRDGWMKVKKAASKAAKLPQDENAETTIPPLHIVLVEEPEAHLHAQVQQVFIRQAYKILRNNAALGADRALNTQLIVSTHSSHVAHECEFSSLRYFRRLPPSSGIPTSCVVNLTTVFGEEDETKRFVTRYLRTTHADLLFADAAVLIEGPAERILVPHFIRKEKRFERLNEAYVTWLEIGGSHAHRMRTLIERLGIPTLVITDLDAGDEDGKSVSPVRGAKQSTRNTTLRKWCPEIEELDTLIDLAEPTKCKKYDAENFSVRVAYQHAMKVEFKEQAAVEALPYTFEDALVYENLDLFKNIKGAGLVAKFKGAVNDAASVAELSTKLHTILKSGGKAAFAMDMLEVEGDLALKPPRYIDGGLTWLTEQVKIRQDALLGGPPIPEVAGV

SEQ ID NO: 70009 - protein, 626 aa, Caulobacter sp. Root1472
MSDALVADNSHLDDGTDEQIARCVDLTQPRSFFLFAGAGSGKTRSLINAINVVREKSGDVLRRRGQKIGIVTYTNAACDEIVRRAEFDPVVQVSTIHSFAWALIQGFDEDIRRWLANDLARSIAELRAEEAKGRPGTKASATRLASIASKERRLQTLPTIRKFIYSPTGDNRTRDSLNHAEVLGITAAFLTDKPTLRKVVVSRFPFIFIDECQDTNKALVDAMFALEQAHRGSFGLGLLGDTMQRIYSDGKANIEGNLPGEWAKPAKQLNHRCPKRVVQLINRVRSSVDRQEQTPRTDSPEGIVRFFCLPADTPSKPEAEAKAAALMAEITGDEAWKNPTDRKTLILEHHMAATRMGFTGIFGALAGVGDFRTGLLDGTLPATSLFAKTVLPFINAHRAGDKFALGKIVRDASPLLRKDALKAAPEQKAQLDLARKAADLLAQQFDGKDPTLREIASVIAETGLFAMPEIIANVIAKKANGTPVADAEDEAADPLPERVAAIEVFLECPFSEIGPYAEYVSGNSAFDTHQGVKGLEFPRVLVVIDDTDARGFMFSYDKLFSAPHVGNDGIGDKESTADRTRRLFYVTCSRARESLAIVGYAAEPRNLARQLEATGWFERDEIVLGI

SEQ ID NO: 70010 - protein, 771 aa, Rhizobium sp. Root491
MHLHAYRLRNYRRFKNAKIELGNEISIFVGSNNSGKTSATHAVHTFVSGAKDRLNLYDFSACCWAEFDAIGEIDLGAAEPAELRLPSIDIDLWLDVQASDLYLVIPLLPSTSWEGTKVGIRVSFTAKVASEIVRNYQAAKSKSAELTKDLPDTYEPWPRSLTDYLQKELKNEYEFRYYVLDRSQFDEDLNETGGYAPTQLETEPGGAAVLRSLIQIDNLSAQRHLADPVTETGGAGRSEDLSKRLSRFYKRNLDQRQDDHGALKALADSEKALNIHLDDVFRPTLDRLSKLGYPGINNPELKIMSALDPAHVMSQDARVHYVLGDGANAATLPDSYNGLGFKNLIYMVVEILDAQAKWASVGENRPPLHLIFVEEPEAHLHAQLQQVFIRNVLDLLKIPDDDDSIFSTQLVVTTHSPHILYERGFKPIRYFRKQKSGTEQITEVLSLSRFYDSQPADRDFLERYLKLTHCDLFFADAAILVEGNVERLLLPLMIEKVAKSLRSSCLTILEVGGAFGYRFKTLIEFLGLTTLIITDIDSVGPTILAPAGVEAAEPDDDEDVEEFEVPLIPDGEAAEVAAPADDAALEKKPKFTKKMGKACLPSLTGALTSNQTLISWLPGSQTIAELRDSEDADKTADLDDGAKVRVAYQTKRPVTWNGHTEDLYGRTLEEDFGLENPTWSQAAARKNIGLVVRGPAPNPTALAAGLHKKVSSKSFDKTKFALGVMTEDVSSWDVPSYIRDGLVWLKEQIAVEADEPLPAPIADGVVGVEAA

SEQ ID NO: 70011 - protein, 649 aa, Rhizobium sp. Root491
MISRANKPDTQADLTLKQCISESPPRSFIMKAGAGSGKTTSLIKGLSGVVALHGERLRKNRQRVACITYTEIAAGEIWRDVGNTPLVHVSTIHSFMWLLARPFQSDIRDWVSGRIQEKIAKLRAEQAAFGPRVQQRTKDKAVRDLARFHRQAAQIVTVQGFRYGTGSDYPKGILGHDDIIKLGSYLLTERPLFRTLTAQQFPFVFVDESQDTTVEVIAALKAIGLNATSPLCLGFFGDPMQRIYATGTGSIDPEPDWVEIPKPENYRCSKEVLAVANAIRRDGDDLVQVAGERFGPDGAIPTQDGCAKLFVLPADQNRDDNLKRVRTSMAHFTNDEDWVEGPDDATRIKLLVIVHRMAAKRLGFGDLYAALNDKAPDSFKNGFLDASAWPLKPFVSFILPLAAASAAGRHLDVMHLLRRFSPLMEKDGLKGRDVAKQLGKIDQLVASITQAFAVDSEATVKDVLAIVQSSGLYNIDSRLSAYLDPPPVRPAEELVEAEDVADDEDDGEELTKEIAAMDRFLSCSVRQFLHYEVYVAEESPFRTQQGIKGAEFDRVVVVLDDEEGTHNQFSYEKYLGLKAPSDTDLKNHREGKETTVDRTRRLFYVSCTRALRDLAVVLFTADPGTAAASLRNAGIFTPADVLIEADLAP

SEQ ID NO: 70012 - protein, 641 aa, Rhodanobacter sp. Root561
MKLQTIRLSNFHSFGEKPTELTLEDITYLIGPNGSGKTAALQSLCRLFAFDPSLRRIQRSDFHVPFDETGVPEERQLWIEADFLFPELAENHDNSTVAPHFGHMRLDEADGIPRVRFRLSATMGLDGDIEETLVYVLDINPDGSPLTVAQVQRAERNHIHVHYLPARRDPADHITYGANALLGRMLRAINWDAERGDIRDLTNKISDSLASNPAVNAFSTRLKTVWGTLHKGNFFSDPKITFVASEIEALLRHMSVSFSPGHDEHLVDFSRLSDGQKSMLYLSLVLSSQAIGRAVLAEEDKSFDADKLRPPVFTLIAVEEPENSLSPQYLGRIISALNLMTGNGDAQALIATHAPSMLRRVAPERIRYLRISDARTSRITHIHLPSKTDEAHKFVREAVQAFPEIYFSRLVVLGEGDSEEIVLPRLLQAKGAPVDESAVSIAPLGGRHVNHFWRLLSALQIPYLTLLDLDVARHQAGWGRVKYVNDQLAKFEPTKILPSDWPLPPWNSAEAPIRTHHFFDDGKRNVFIELESRGIFFSAPMDLDFAMLIAFPDAYDVLEEVPDDATIKAVLGKSHYGASQYSQEELKLFGTYHRKFKLGSKPAAHLEALANLSDADVLAHMPESLGRLADAVIARLAELPE

SEQ ID NO: 70013 - protein, 558 aa, Rhodanobacter sp. Root561
MIAVETWQPAAGLILEPSALRAATEGEHCLALTAGPGAGKTEMLAQRADFLLRTGTCFYPKRILAISFKVDASRNLKGRVQRRCGSELASRFDSYTFHAFAKRIIDRFRPALTGEYALDVGYKIVGRKAGPSRTEIEFGDLVPLAIQILEKSNVARNAIRQAYSDVFLDEFQDCTNFQYGLVKLAFQGTHVRLTAVGDTKQKIMGWAGAMDGIFQTFAADFTAIPLSMYRNFRSKPRLLRMQNEIIRVLDPASVMPDEELIGDEGEVFVWHFDDSREEAEHLADLIAGWVNEEQLPPSEIAVLVSKQLDLYADHLMAALEAHGIPFRNEQQMQDITVEPVARLVVDYLSCLYGRREPKAWVRLMNQLIPFADDEIQSNARKDIDRLIKQQRKEAAMADLAVEPFAGWWEFVRTFLKQISIETLVALSPDYESHDRLKEVIRDTKAHIEELLKIEPDLPKALERFSDDQAVRILTIHKSKGLEFDSVIIMAVENEIFFGNKDENRCAFFVGVSRAKKRLILTHADQRERPAGYAKRWDLHRSAQNEYLGYAMPFVRQQH

SEQ ID NO: 70014 - protein, 681 aa, Rhizobium sp. Root564
MYLRKIKLANFRSFHETEIELQKDLTVFVGENNGGKSNAIDAMRLLTVPLSGRREIYCEGTDIRFQSTRPDFEMVGEFEELSTGQQGRLISAATDVSLTRAAFGLNFTANRVGARPTLWAGKEGNTPEPGCHEMIRHVYLPTLRDAKRSLASGNPTRIMALLTHFLDGSSPAELAKDLARTHSHDVHQKVDGAVDKGLQALTSGVRRQTASLGFASDEALVDIARDLRFKLADHGVDPEDLRYSGHGYANSLFMATIAVELEKVRTADLTLFLVEEPEAHLHPQLQAAVLSFLRDQAAQSRSTSPNDGSLAGELQVVVATHSPNLSAWVANERLVLFKSVAVPAPSSESEKTEPEPQLADTAVIESSAASETSSSDESTDGVVVATMTAAAMRRSTRVIPLCKLPLDDGERRKIDRYLDVTKAALLFGGRVLLVEGIAEALLLPIVAKHHTLKSHPEKLRLFMSTVFVPIDGVDFAPYIKLLLTSVNDARIADRLVVMTDGDRAADEDEDDDGDAQDETNESAGNVPSLVAEDNAESASVQEEVAQALDSEKDEAATQAKTVDPVIPGERRKREFDDLATSLGGIAQFRAIASTYSLETELIEAGNVDILRNVYLELHPRSRRKWDNAAALSGDARAKAIHKIFKTTRKGDFAQMLAKRIEDGEAFKVPAYIGEAIEAVVS

SEQ ID NO: 70015 - protein, 565 aa, Rhizobium sp. Root564
MNHTGSAFITACPGAGKTRTLVERARTALQDGKPRRGVAFLSFTNAAVEELEARLRGLRVLPVPLFPSFLGTFDRFLWQFFIQPFGIPDIAVLPRLVPDKSDWEIVPFPNAQPLAFRLFDRQTGDADEDSLKEAGFDVEKRNITAWETAAIRTQKTALSKGMIDFDDVRWIVSQRLGDSSFRERVGKALAARFFEVIVDEAQDCNPSDLDIVAWLRTAGIAIKVICDPHQSIYQFRGGVADELIKFAKTFPDDQQLSMTGNFRSSPAICAAVVALKPPGGVATIDKPLGPRKHDSTPVHILSYPGTKVTPAIGAAYQKIVAEYEIPLDVAPLIASTRPTGSNAIGQPIVGRTKEMTLLLAEAAMQYHFAFASGNRKEALVNLHRTVLYVQEKIPSLGSYHAHVADTNLDDGRWHPALIAIANDLVVREGETAEGWLARARSILSPGLVGTRKIGQRLRKHNNLETVLSQPPLQSSPARTIHSVKGMEFPAVCVVMTTQTSGGILDFIEGNSAAKWGEDARKIYVAASRAERLLVIAAPHSRVLRLKALLEKHGCNVEVTELARDG

SEQ ID NO: 70016 - protein, 599 aa, Achromobacter sp. Root565
MRISRISVENYANFENVNFATDDSLVIVGENKAGKSNLLRALRLVLDPMLPDRDRQLGLEHFWDGLGDAKLGATVKVVVEITDFEDNDNLLTVLGGSLVGTESPVVARLTYMYRPKAALEGAAPKTLADYEFLVFGGTNEDNAFTAARRRELPMDYLFALRDAEGDLLNWRRSPLRPIIEELTASLDEKTREELQQLVSNAQSALAQRPEVSAAAGKVYDRLVEMVGNEHAVFLTLGATPTNVDVLLRGLRLLIDGGARGIGDASLGTANLLFLTLKGLELERAVEAGERSHTFLAIEEPEAHLHPHVQRLVYRHYLGEEDDAPQNVTTILTTHSPHIASVAPLRSIILLREDSEGGSTSITSAAEVELLPDEEDDLQRYIDVTRGELFFARGIIFVEGDAERFLIPEFAAALGVDLDTLGVTVCSVASANFLPYVKLVGPDALGVPFLILTDLDPPEDGGEPLAFARVRDILGLWMEQEDIDQYKEFDDIWEDGELNGIFVNDKTLEVELFQAGMGPAMAPILQKHANSWGDQRRATMNSWIADPTKLDEGKLLGWIGEVGKGRFAQALAGSAAEAVCPEYIKKALTYVKNGFSPVES

SEQ ID NO: 70017 - protein, 599 aa, Achromobacter sp. Root565
MASPQSSPKYLQAALQLRDNPGQWAAYESTGNCCVLAGPGSGKTKTLVTKLARVMAEDVRSPRGVACITFSNEAARELIRRLRQLGLEQSPRLFVGTVHSFCLLHLMLPFAQLAGLDLPYPLKVATESEAASIYRAVADKLRGVGQPLRKEDADRHRRVNLDRSGQEWTENEEITVLAEAYEQELRKQGLIDFEDIVHYGQRLVNEHDWVLKVIRAKFPVLAVDEYQDLGAALDRIVRRLTFDAGVRLIAVGDVDQSVYGFTGANSELLEDLSKENDVETIRLKINYRSGTGIIEVAQRALGKDRGYESSEPERQASVQAHKCDKGLQHQAEYAMQTLVPAALAAKQGRQLGDIAVLYRNRNVGDAAAIEAVKAKYPFVRIDNAAPYRKVPLTSWVEDCAIWCAGGWKVSSPPLHDLQGRWISFHGGLSDKEARDGAARLTRFLWNHRGDGAALDFVAALRAELLNVLTAARQELADQTAHLEGMHQALEKGGVLVGTTKAQLGRRDGAPKLLNLLTLHSAKGTEYDVVIILGLDQGEFPSPKWADNTPERMEEARRLFYVGITRARDKVHLMYSGFRQDRFGRTWREGPSQFLDGLLT

SEQ ID NO: 70018 - protein, 593 aa, Lysobacter sp. Root604
MHLAKLSIRNFRNFAAVDIPLAGNVVLLGENRVGKSNLLLAIRLVLDPTIPESMRQLKLSDFCDGCDLSTNPRIEVHVDFADFDSDPALVALLTDFRTAADPRIARLSYVYRKRAEVVGPPQSSEDFEYIVFGGEDESRSIPSRVRRRIALDMLDALRDAEGQLASWRSSPLRPLLEDAVATISADQLGTVATDLEAATKKMEGFPSVKALEDALRAGILDLAGTAQDVDARLRFAAADPLRLFRSIAMYIDNGKRGISEASLGSANVALLALKLAEFVWRRNKNERNFSLLCIEEPEAHLHPQLQRSVFNKLFSNPDNSQALIVTSHSPTLAAAAPLRSIVNLRTSQGATSAHSLAKLPIGADELDDIEHYLTSTRSELLFARGVIFVEGDAEETLVPVFADSMGKNLDRLGIAVCNVAGVNFVPYVKLVGGLGLPFTVITDWDPLDGVKAPLGRTRTLHIWDAYCEVTGKAPLTAAERAGWESASFADFSASWATAGIFLNEHTFEVVMANTPGLQAALLQILSEQGFGSRRMTRIAAWRVGTLAIDSTQLLAMIADIGKGRLSAKLEKKVPTLLPPAYIASAINFLAARV

SEQ ID NO: 70019 - protein, 594 aa, Lysobacter sp. Root604
MSNPTELARAVAELSKNAEQREAVFETGHCVVLAGPGSGKTKTLTTAMARALSEDVVDPRGVACITYNNECATELEARLARFGIASVDRTFIGTVHSFALTQIITPYARCVPGLLDGNFRVATAAECRAAVEAAHKKIIDDGRDPHEHWRYAEQKRRRDVDRSLPAWMGKNPDLARFIEQYEAELRLRGLIDFDDMPLLAFRLVKEQTWVREAIRAKFPVLFVDEYQDLGYALHELVLLLCFQGGIRLLAVGDSDQSIYGFTGADPELLRALTQRSDVKTIRLRFNYRSGVKIIRASLGALGEERDYRGVEGAPDGTLSFIQVDGRHDAQAEHIAQVVVPDLVGRGFSMEQIAVLYQAAWLGDLVAGALDGAGIPFVRTDRNALVKRSSRLARLIEACSQWVTGGWHGADPAYSRLLREALGIVFGGPASEPEERILSAQLVAFLQDGIDRGETAHQWLQRLDKELIAPWMTVARNRHQEWDVCSEMIMRTDPAKNLDMALNVFAGRLDESGRLTLSTLHSAKGREFDAVIMFGVNESDMPSARDRKNERSLREARRLFYVGVTRPRKELCLVFQKGHHSPWVVELYKRSQESQ

SEQ ID NO: 70020 - protein, 759 aa, Flavobacterium sp. Root420
MKIKLVELQNFRKLNSVRIDFDSETTLFVGANNSGKTSAMVALRFFLISPMHLSMRDVTIGNWEKINKVGHAWEKNHLSTSNITEFLPKLDVWLDVPINEIYHVIHIVPTIDWSGGLLGVRLQYEVQDIEKLKIEYLSERKSAEALRIALLAKDKDSTPKVWPLDLTDFLQNKSSKHLVLNAYNLDSKLLQLNLEDGVAEPQALSKNAIVLENKPFRNIIKIDEISAHSDFANDKRSFGQIDEQKEPSYQQSKKPLSEQLRSYYDRHLDPMKKMISDQDLDALNAIQKAEKTFDERLKDAFSFAFQDLEDLGYPGVNNPKININTLLRATDGLKHGSAVEYEVADPSGDGSNPLLLPESYSGLGYQRLISMVFMLMSFRDGWMKKYKSQADVGSPSEDFIEPLHLVLVEEPEAHLHAQVQQVFIKNAYSLLRKHPLLGKGNTLSTQLIVSTHSSHITHEADFANLRYFRRRQAQSKDVTATTTVANLSSVFGNENETTKFVKRYLKATHCDLFFADAAIFVEGQAERILVPHFIRHHFSNLSKRFITLLDLGGSHAHSFKKLVEELGITTLIIADLDAVVPTKITQKNGTKSTRNKSVKPQKGKGQKTSNPVLKTWHPKLENIDLLLALPSTKHITPISDGCDLFVAYQKEVKVNKDTFIPRTFEDALIFENQVSLASIDGSSTTKKVKEIISDGLTGEDLADAIYDLLKDAEKAAFALDCVLTQEPTKIKPPTYVKNGLTWLEDTLDGKNTKQVTIKK

SEQ ID NO: 70021 - protein, 629 aa, Flavobacterium sp. Root420
MTLNPLTLAPADTDNSVDIEIATYLNPSVPQSFFLYAGAGSGKTRSLKNALLEIRDKHGEFLRRTSKKVAVITYTKAARNEIISRVEENALFHISTIHSFCWSQISSFHSDIQKYLLTSLPLKILDLEDKQIKGRAGTKAAYEREKSLVNTYQRLEYLKTPREFNYNPNGDNFGQSSLTHNEVIEITAYFISNKPSMQVLLVNKFPFLLIDESQDTNKHLIDAFFKLESAHTGNFSLGLVGDTMQRIYLDGKIKLGDIIPDHWKKPKKFMNHRCPHRVIQLGNALRLDGEEQMGRDDGEEGFVRLFILPSDTANKQQKEFEAAKMMAKITLDDKWLTPKEFVKSLTLEHHMAAVRMGFFALFSTLDKSTSLSTGLRSGELAGLRLFSQRVKPLFDAVKREDDIAVMALLRNYSPLLNKYILKTSEASINPLKKVRKAVNDLLKFDNNSKVTFFDILQCVAKHNLFEIPNSLQSFVNDSQLKPTTFVHDDEEDEEQKTSSLEAWGNFLQTEFNQIGPYSDYVTSVGSFDTHQGVKGLEFERVMVVIDDSAARGFTFNYEKLLGVQDLTPNDLEKMENEESNVDHTRRLLYVTCTRAEKSLALIAYTSDQNKLENAVINKGWFLKNEIIKI

SEQ ID NO: 70022 - protein, 663 aa, Paenibacillus sp. Soil750
MYISEMSITGYKNAKEKSTIKFNEGLNVLVGENGSGKTTIINALRLILRENEFSYMNISEDDFYISLDKKSSSDKIKIDLTFESLTPDEEVTFLTWCDADFKALLHLEVNSNPNRKGYYKKEIWGGNSKSSIFEDETFDCIDCIYLPPLRDAEEKLTNGKKSRLAQLLKKQYGDQKEILVNSVKEFNDNITNNTDGKYNEISLAKSNINGKLNETLGQRLGQSINLQFADTSFSKIVESIKMVFFPNSNETDPNKFRDIATNSLGYNNLLYIATVFAELELLKDNNLMTVLLIEEPEAHLHPQLQVKFIKYLQEMSESLSNTQIFITTHSPVLASSISIDKLVHIVEKGNQIISTPLGLIQLGDSKNYLERWLDVTKSTLLFSKGIILVEGISEAMLIPVFAKVVLAKYNKAAIENSKQLLPNSLEEAGVSTININGINFKHFMKLFSCLDDSTDEVKLPLFCSGITDNDPPKDVIPIYDKDGELKKDKDGDPLTKSIEVYPLPSNRPLGSNSALSLIDKINKSRWGRLYGSPLKTFEYDIAMEKNTKIMARTLKELWPTKDGKITKFCDEIISRDNNYTDETSLSNDSKFLLEHIDNDEVGKGVYAQAFTDLIDLEINGELKGLNKDKSNLESILENISKIVLIPKYLEDAILWACGGETGE

SEQ ID NO: 70023 - protein, 662 aa, Paenibacillus sp. Soil750
MNKLDIQNAIAHVLCSKDPTQSFESCFENHTSKTLPCSGYQQCRVTEKTEQQLDYILSSMTDNVFLEACAGSGKTEVVGMKMSYEINKWTNTKSGIAVLTFTNEATDTIVNRVESFSKKTSFHPHYIGTLTGFIHGYISQLFGYKYFNHKKIGDDTSFRLVDKSVDVFNNHWLVKYKISIPYVTSAGHSGDLYANQIYFDFKSNDYIIFIPDNIKMSVTEYYNSPGFSAYVESIRKKTGKEWLFKIEYVKQEFHAAKMKFLGDGFATFEDMNNVGYTILKNRRIARSITTRFPTILIDECQDLSWIEIEILNKLRESGTSLHFIGDLHQSIYEFKDADPAYTKSYLSTFKNLSLTDNFRSCQPIVELANRISSISLPIRGLNKNKLNDDSVCYYEYSDLNLIENQYSILLRRFNLSSDRSTILVRQHNLKSEFEIQHKINTHLLLNAIQLWNLKTPITRRTALEFAGKELQRWFGGARTSKGYHCPSGINSAFRWRIFIKDFLELCCSIPQLTDIVGKNYSHWYKQAREQRSTLLKSAYINLKAFDSDIRDFDNLPTFKAPSGTATDTVVILNNAEKPESITINTIHSVKGSDFDGVLVVSSKHNRGSGAHWKHWLNGNGEGTRIGYVASTRAKYSLIWAVPTLTDEDRGYLESFGFKRIEI

SEQ ID NO: 70024 - protein, 585 aa, Paenibacillus sp. Soil750
MGIYLKEVRIRNFRSLREINVSLDFTTILVGANNSGKTAFLKALEVVFGLENKKVKKEDIYLSGAGNSYPNEAVIDVLIVPVDDHGEVCKEFDNGWYQHFGASRIQLDDEDNHILPIRTFVKFDPVRNGFGISQFVLDKWYANPEFWNDSITKEQVPSGLMDILPLVYLDAQRDIVDDLRNPDSFWGRIVADVGMGLEETVEAEKDLDRMNQMVIDHSPVLSHIHGQLQMLKDINAGTSNEVVVSPLPRKVRNLYRGIDVLFKDGISELMPLEQHGMGTRSWATLLALRCYISWLKKVHHDKNTPYHCMLALEEPEAHLHPQAQRNLLAQISGIGGQKIISTHSPFIASVSELSSLRHFRKVSAETVVSSIMTEALEPEDLRKIEREVMNTRGELLFARAIILCEGETEEQALPLWFHEYFGKRTFEMGVNVVGVGGKGKKYLPFLRVAEGLQIKWFIFSDGEMDTVDELRTAVTEVGYTLPDSNIVTLDTGMKFETYMLAEYYNEMENLIRDLHLTKAVNDHHKQAIQNKVYSYTDLQDELKGGKTRFGPIVAHKLIGLPDQAKRIPSKVRTLFEALSHEFDTH

SEQ ID NO: 70025 - protein, 628 aa, Paenibacillus sp. Soil750
MSYLLTELQKKVVEHKNGPLLILAKPGTGKTFLLAQRIKKLLTDEQGNHHILVLTYTKVASESLKSRLSHELSEMEGWEQRVYIGTLLKFGLDMLRARGDLIGLQSNHMVLMDEYERNDVLRRVVYSLPDMDRSSFHPEKSRETLDFIRGRKRQLTPPIEIPLIQIDSPELEENELLYREYDRYLRQHGLLDMDDLIYLPYRIIKERESLGELYRKQYTYVCMDDGQDLDFASYQLIRALYPDTKSNIMIMGDPDQAIFSFMGGDGSCLSSFQRDYEPTVIELDKSYRLHEDIVKYARKLVPELELEPNFIGKEGSVDVKGFETQEAEAAWVADNLKEIQKLGIKGLENPPAWNQMAVIARSRHTLRKVEVALRQRGIPYNNGTLGYLESESRFIQLFELGIRIMTSSSNRINMEQMLNFLQVKRKPESILNTNRGIDALHAMKNLINGQTGSSNYDVLLKVWDFLSMNPSSFPDALEKLRFYMEDELEGNWESHGEGYIIQDDLAMWSDYWKQYMNTKPIRPSLSQFRTNLPGLTRKNNTSGVNLLTVHLAKGLEFDIVHIIELNQGTLPFQHMELSEERKILYVAMTRAKRMLYLSYCESKGTGARKRNLRPSVFLEEMGLLTERT

SEQ ID NO: 70026 - protein, 775 aa, Sphingomonas sp. Root720; identical to SEQ ID NO: 69994

SEQ ID NO: 70027 - protein, 622 aa, Sphingomonas sp. Root720; identical to SEQ ID NO: 69995

SEQ ID NO: 70028 - protein, 613 aa, Hydrogenophaga sp. Root209
MRLSRIVIKNFRNFKLLDVRLGEHAVVLGENKVGKTNLLFALRLILDPSLPDSLRKLRLDDFWDGLVRPLKAEDVIEVSVEFRDFDDDENLLAVLADHLVRPDPMVARITYRYQPVPGIERAPRSEADYEFILFGGDRPDNAVGYDLRRWMPLDLFPALRDAESDLARWARSPLRPLLDRAAKTVDVKALSTIAGEVHKTTSKIAALPELAGVVDQVNNQLTAMVGDKHAVETALGFAPTEPDRLLRALQMMIDGGKRGVAEASLGSANVLYLALKHLEHQYLVDEGERQHTFLAIEEPEAHLHPHLQRLIYRNYLQTRDDAQAGPGPRSIFLTTHSPNVASVAPLANVVVLRQVAGEGHTVGRSLKGIKLDATDREDLERYIDVTRGELFFSKGVILVEGDAEKFLLPTLAKLYDETLDFDAMGITVCSIAGTNFAPYVKLLGPKGLDIPFVVLTDFDPKKEEVSQEDADPDDGGVTDSYGKNRVVNQIMEHILDEDVWEKSDFAQVMVLAPKHGVFLNEFTFEIDVFRAGAEDHFLTAIKDLTTNKKMHARFARLATDADSLDPSQFLKDIDSIGKGRVAQRLASVLIKEGVDVCPEYIESALDYLKAKLG

SEQ ID NO: 70029 - protein, 586 aa, Hydrogenophaga sp. Root209
MTSTAPPHLKAAEDLRGNDDQWRAYQSTGNCVILAGPGSGKTKTITVKIARLLAEDVHRPRRLACITYSNACVGELRSRLSKLGVYDGDRLLLSTVHSFCLTELVLPYAALAGLDVPDPLVVASPAQARKLFADAYREQLGGNAPSWFRMACDKLRRTVPDKSSDEWRAWSARETAVVEAYETLLLKNGLIDFDGLVLAGLQLVEKHEWVRRAIQAKYPVIVIDEYQDLGLPLHRIVLALLRAGNRIVAVGDPDQSIYGFTGAKPSLLRALARLPQMEHIRLKLNYRCADRIIAASMALLPEPAEFRSHDGRTGEILIHRLECNIREQADYALGTLVPALLAANPSWTHGDIALLYRTLNEGTPIAQAADALGLRYFRLDNGSPMKRTRLTEWLTDAARWCAGGWQTGSVPLSQLLKAWRRLRRSVTRESELLAARKQLISALFSLRDGAQPLHRWLSVLRREALDELLREEPGLADEGDNLNDLMEAAAGGLLQTFTVEIFGNQGKSPDQINLMTLHSSKGLEFQAVIMVGLENGVFPSGYDKTDEQLEEAARLFYVGVTRARTQIHLTYDADESPLITSIREAN

SEQ ID NO: 70030 - protein, 728 aa, Nocardioides sp. Root224; identical to SEQ ID NO: 69982

SEQ ID NO: 70031 - protein, 584 aa, Nocardioides sp. Root224
MKALAHVTRTRGPSLLAKTQRVACITYTEIAAREIHEEIGNDPLASVSTIHSFLWALAKPFQKDIGLWVATRIDEQIAGLLEKQANYKPGTRQTTKDNDAAALEKRQHQQAAVKGVKRWTYGIGADYARGIVGHADIIKMVPEMILERRLLAQLVGRQFPFIFVDESQDTFPEVVEALKHVWSLAAGKMCLGFFGDPMQQIYQQGVVSVSLEPGWVNVDKPQNFRSSRRVLACVNAVRAEGDTLQQVSGLSEQPAGEAFCFVLPSDDQRSDRLELVRVWLDQHSTSGNWTRSAHEGGSKILMIVHRMAAKRLGFENLYASFHDNKSSSLGDAFDEGNAWPLTPFRDVILPLCLAKEASSPAVLAVLRESSPLVRVGQASRQLKAALASSKAAVEELRQLAADPSTAKLGDLLRSAANSELIELDPRMAAYLYPDGEHGDVVLDERVVDVLNAMAECVLSELEGYYTYVKQESPYSTQHGTKGSEFERVIVVLDDNEGRYSLYSYDKFLGLKDLSATDVDNQSRGVDSAIERTRRLFYVCVSRARESLAVVLFSDDVARAAEAVRQSAIGQHVQVLTVDDLSPLA

SEQ ID NO: 70032 - protein, 711 aa, Rhizobium sp. Root268; identical to SEQ ID NO: 69980

SEQ ID NO: 70033 - protein, 600 aa, Rhizobium sp. Root268; identical to SEQ ID NO: 69981

SEQ ID NO: 70034 - protein, 688 aa, Sphingomonas sp. Root710; identical to SEQ ID NO: 63456

SEQ ID NO: 70035 - protein, 590 aa, Sphingomonas sp. Root710; identical to SEQ ID NO: 63569

SEQ ID NO: 70036 - protein, 587 aa, Rhizobium sp. Root73; identical to SEQ ID NO: 69998

SEQ ID NO: 70037 - protein, 632 aa, Rhizobium sp. Root73; identical to SEQ ID NO: 69999

SEQ ID NO: 70038 - protein, 712 aa, Pseudomonas sp. Root9; identical to SEQ ID NO: 64746

SEQ ID NO: 70039 - protein, 594 aa, Pseudomonas sp. Root9; identical to SEQ ID NO: 64747

SEQ ID NO: 70040 - protein, 675 aa, Bacillus sp. Root11; identical to SEQ ID NO: 62958

SEQ ID NO: 70041 - protein, 653 aa, Bacillus sp. Root11; identical to SEQ ID NO: 63647

SEQ ID NO: 70042 - protein, 675 aa, Bacillus sp. Root131; identical to SEQ ID NO: 62958

SEQ ID NO: 70043 - protein, 653 aa, Bacillus sp. Root131; identical to SEQ ID NO: 63647

SEQ ID NO: 70044 - protein, 608 aa, Bosea sp. Root483D1
MRISKIKIDNFANFSEFEIETGDNLVVVGENKVGKSNLIFALQLILDPGLSERDRQLGLEHFWDGLGDHKLGAVIEIVIELTDFEDDPRLLAHLGDCIVDPGPPMVSRLTYRFQPKADLDGHPQSMADYEYILFGGLDPDNAMRPRLRRMLPIDVLAALRDAEKDLATWRHSPLRPLIEGLTAGLDEDDRAAIQEAVDTAQNTLAERDEVQSVAQIISDRLQEMVGPAHATPISLGITPTRIDALLRALRLLIDGGARGIADASLGTANLIFLALKSLELDRLVGEGERDHTFLAVEEPEAHLHPHVQRLVYRHFLAEPDDEADEDEDAEGEGNEDPASATRLTTILTTHSPHIASIAPLRSLVLLRRDGEGDRTVGFSTANTPLTEADEADLQRYIDVTRGELFFARGVILVEGDAERFLVPAFAEALDIPLDHRGISVCSVGGTNFGPYVRLLGPDGLSIPYVVLTDRDPVEAGPPLARGRVQKLLEIVEPGPVYDDLADAAIFRRGERHNIFVNTRTLEPELFGAGLARRMGEILKSELPLRRAGREAIDGWVAAPATVNVDRLLSLIERVGKGRFAQRLAAGATERRCPAYIRAALERIRDAVA

SEQ ID NO: 70045 - protein, 606 aa, Bosea sp. Root483D1
MPLRSTSAAYLRHAGDLAGNPGQQAAYDSRGHCVVLAGPGSGKTKTLVLKLARILAEDVRAPRGVACITYSQECARELTRRLEALGLRDAPNLFVGTVHGFCLRHILTPYARLAGLAVPYPLTLATTRQTDSAFKQVAERLLGVGQPYKTHDMGKYRRIHLDRDAPDWESDPDLARITEGYEAALRRAGLIDFDDLVIFGNRLVSDHDWVLPAIQARWPVLAVDEYQDLGVPLHRIVERLAFDGGVRLFAVGDADQSVYGFAGADGALLLELAQRDDVEAVQLQLNYRSAGRIIRASELALGEARGYQPHDPGRQAVIEFTERPGGLEDQAAHVVENLIPAALAAKPGRTLGDIAILYRAASVGDVFADSLTAAGYDYIRVDNAAPYKKVGLTSWIEDCAAWCAGGWRTGRPQLAGLISRWTGFRSGRPDEREARRMALALTSFLSDHRADEGAAAPFVTAIRRALVDPLTASERSLADQREQVRRMSEALAEGGKLEGLDLKSLGGRDGSPTHVNLLTLHSAKGCEYDVVIMVGMDMGAMPWRRETENELRESRRLFYVGLTRARDAVHMLYSGWIPGRYGAQRLGRSPFVEELEERLVAAEEDE

SEQ ID NO: 70046 - protein, 666 aa, Flavobacterium sp. Root901
MKISTLKIKGFRSFGPNEVLIPIEDNLVGLIGLNSAGKTTCLEALKKMFGQTSADRELFRQDFHVGKDEDPDFAEEKHISIEAVIDFSEEEKQAIPHFFSEMVVDEQDGDPYLRIRLEAYWKKSNFIPDGEIDSKTYFIKTAQGFQETEDSKKLFPSHFRSLIQLLYVPAIRRPSEQLRYSSGTILFRVLKKIKWGEAFKGDFDKKVTELNNLFNSLDEFGTVQQSITELWQQFHKDERYKDTALGFGGSDLDSILKKIEISFSPTGTYRSYKIDELGEGYRSLFYLTLVCALLDIEEKLSEQEDQENIGINRPLLTILAVEEPENHIAPQLLGRVIKILKKISCNDSSQVLMSSHTPAIVKRLKHECILHFRINHKYETQVSRILLPERKDDAYKYIKEAVHNYPEIYFAKLVVIGEGDSEEVIFNRLMEVMNIDFDDNIITFAPLGHRFVSHIWKLLEALHIPYVTLLDLDIERDGGGWGRVKYALKQLIEVGADRDILLKLKGGGVLPDSSLELMHKKTLKTDKDLKSLGSWVRTLKRYRVFYSAPLDLDFLMLTHYPEFYKRAVPENGGPQIPDKQTEEEKFAKKVSLAVQAVLKSEKAIGYNYSEEEKQLMIWYNYHFLGRGKPVTHIQVLSSMKPREIRGNLPPVFREFFTRIKEILDKQ

SEQ ID NO: 70047 - protein, 613 aa, Flavobacterium sp. Root901
MKPIKADEWIPADGLELEKNAHNVATEVKNSLVVAGPGAGKTELLAQKACFLLQTNTCDYPHKILAISFKRDAASNLKERVRLRCGDELSKRFDSLTFDSFAKQILDRFHSALPDTFRLVPEYEMLLNEKSVLEYYRDEDADFYGSANKDKIIKLHNMQLPFSTDSSEEILKGRVWGSMMREGKLSFIMVMRLAQYIMASNPKIRSYLQTTYQFVFLDEFQDTTEVQYDFFKSCFLDSSSFFTAVGDDKQRIMIWAGARKTVFEDFMAEMGAERIPLDMNFRCAPRLVALLNHLTKHLLGKDDLAMPSPKWHEDQGECQVWIFEDPESEMKILFTDIQKWINEDGIDPRDICILVKQQLDVYAGQLIDFFNQNGIKARDENVLQDVLTQELCNYAIDVLYLIFNSKSGNSKENAFNFLKNLHTELDDQQLLKLEISISGFIAGLRQKWKKTRLSEEQIKGLIDEIIGFAGIDRIRANYPHYKSITEFNRITGLLKNELIKDYFTVNDMGEALDMVMGKDTIPVMTIHKSKGLEYHTVVFIGLEDGAFWSFDRQPDEDKCAFFVALSRAKEKVMFTLSKKRTVRFGEQKQFINKIKVIFDELQNSGIVQIVERK

SEQ ID NO: 70048 - protein, 651 aa, Bacillus sp. Soil768D1
MYISKIKMKNFRLLNDTSLDLKKDLSLLIGRNNSGKTSFLVLFEKFYEQKDFNYNDFSLSLRNKIKDINDHTETNQLTIQMVLEIKYHKDDNLEHISDFILDLDPEIDTVKILFECAINKKSLLKDLLTIESEDKERYIIKNINSYLQKDVYVFDDYKDLEINNRHKLVKKELKSIKKLINFQIIHAKRDVASSEENKESKKVLSSLTTKYFNNNSQGDFISINKQLIEMDSNLDKQYDTFFKTFLKNSKEFLEIKNIKVVSNLQSNELLQYSSQVVYGVDNNHLPENLNGLGFMNILYLLLTIEIKKENFIDINKEINLLFIEEPEAHTHPQMQYVFARKIKTILDDVKNLQTVVTTHSAQIVSQCDFEDIRYLMKTVDEDGNENTEIKNFHTELEKKYTKLEEFKFLKQYLTIQSAELFFASKIIFIEGTTEKILLPYFINKFDKENEKKESYIPLSSQNICILEVGANAKVFHHFLEFLKIKTLIITDIDTTAKMSSDKGYYSACEVLKAQNTSNETLKHFLRAPDLKTEKPAFEKWIENLRTNALDDYSENIKIAYQTKEKNYQGRSFEDAFININKETIKMNKDNIDGLKKTKLFEEEENIYELTQEVLDKKSNFAASLLYLALSEEAIDWEIPAYIRGGLSWIAE

SEQ ID NO: 70049 - protein, 678 aa, Bacillus sp. Soil768D1
MDSGITSLDKIKSCIKNNQNFVLQGGAGSGKTETLKQLLEFLSESYPGKKIACITHTNLAVDEIKSRVGDQYTISTIHSFLNSLTKDYKKNIQKVIFDIFKLSNIERKGPENYDDEKQQKKEEFDNYKKTQKKYADKLYTVKNESTKKVEGKRDYDKDPEGFNRILNEKINILNKEIKAEIESKDFYNIKYNETRFDDFNELTFGHDSLLEVSYLLFDKYEILGKILQDKYDFIFIDEYQDTNEKIIDIFLKKLPFKEKTIIGLFGDSMQAIYEDGVGDVEKYIDDKYLVKIIKEDNYRCSEEVIKFINQLRNDGLKQQVAFKVNKDAIKESLSDRQGSVKLYYSIYDNKPNVYSNLEDKANYENVLNTLIEKACHNQENYKTLMLTNKSIAGKAGFGALYDVFAARYLDPKEQIDNHLLNLQFLDLFELCNAYELKNFNFILDKLYKSNFSIKRLEDKIKLKESFEKIINSDKSALETLDMAFKLKLIKVADKNSEYSNRKNAFLKELDQIDDYQLFKSIYNSGNKTFAKIKDKMDFLEEDAFKDFENKLKKEAFYVDLFSDKIKFKDIMNYFKYVNEETQYITMHKTKGSGIDNVIVVLDEYFWNQYNFNLIFDSNYKDEKKKLKNQRLAYVACSRAITNLTCVKLISKDEEIEIKKFFKDPINVEIERLMTIPVN

SEQ ID NO: 70050 - protein, 765 aa, Stenotrophomonas ginsengisoli
MVSRSATGGMSLRFIELTGFRRLEMIQMEIDQKTTILVGANNSGKTSILAALRHFLADGSPFGAFDISLSQWPKLRAFGKAWEALLEDPLTVSGDEEHWEQQLQSLLSAMPTLDLWFDAEAGMYHYVAPFLSKFSWKGGAVGIRLRLEPASTAEELKQLAWVYRAAREPVKDMGADSLAWPIDLLDFWLREPSRLGQVRAYKLDAENNPIAGFKTYVTPTLAANAIHIERKHLSRVIRVDFVAAQRGLGSEEAESRSASGPHRVGMFSNQLLKFARQHLNVSSSGHSQRADLIKAVADAQRDLDKKIHEAIADSVEEVKELGYPGLHDPQEIRFRTRIQTADLLDHGTAVQYSMQKESLEELLPEYSIGLGYQNLQSLSYQLVSFKAARLKPDKESPAPVHLVMIEEPEAHLHVQVQRIFSDKAHKLISPVGADVSALNSQLLISTHSSHLAHAENFDRLRYVRRIAKSSASPMPTTEVVNLGQVFGDDKKTRQFAERYFRVQHTDLLFANAAIFVEGVAERMLVPLFMERDFKDLSSRYVSFLDIGGSHAHRLKPLVEKLRIPTVIITDVDPCEEEVGKPKKNGEPTKKLVAVANTGQAGLQCGNPTLRGWHPKLQKLDDFKSPTDAQLVWSETAECLVRFAWQLPVAEADGSWPSSFEDSLVLSNISWFKGLMDEKVGDDGLEIEPPTGALGSVAKAVANAGSVAEMVAALHKVMHGSLNKGELAASIFEKLASDESVVCPKYIADALAWLQAQLEPSKESVA

SEQ ID NO: 70051 - protein, 652 aa, Stenotrophomonas ginsengisoli
MNAIPIFADNERDAGVVEEICGYLTEEPPRNYFLFAGAGSGKTRTLVEVLRRMTGVVRHEKGGQLARRLRTYGRSIRVVTYTKNAVAVINGRLGDNDLVSVSTIHAFCWELVSGFNDDIRAALVAIKQAQLEKETAEAAAKPRGITPAKQRDLDEIKADIEAFKLTDVFIYHPDRETHGAGALAHNHVLDATAWLLLHRPTLQTILKDRHPIILIDESQDTMKGMLDALMSLAEPRGSGLTLGLLGDHRQRIYTDGHSDLPSLVPVSWATPELQMNHRSQRRIVTLINRIWEAELEGRTQPANGVEQHPRMEKAGGVVRIFIGDTSLSPEEKVKAERWCADQMRQASGSDAWSEDQYQLLALEHKLVATRGSFLDAYSAMALIDPNSAAPTGSGENKGPAAVQMLLNELSRLEACVGEDGAIDEFKATEVFRCFGRLDNMPESEVERAKRFEEILQGISDFAAACANPEATVEQVLTSVLNAKLFEVDPRLSAAFADKSPAPPAPGRGEEESKKDRIRRGWCALFATPWSQLQKYCTYLAGNSVLATHQVVKGSEFLHVMVVMDDKLAGGNRFSYDKIFGGVRLSKSDLDNAGKGKETTIDRSLRLLYVTCSRAKESLALVLWSSDPSAALNRIKESEWFSNEEIIEINFQV

SEQ ID NO: 70052 - protein, 641 aa, Stenotrophomonas koreensis
MKLQTIRLSNFQSFGAAPTEIRLEEITYLIGPNGSGKTAALQALCRLFAFDPSLRRILRSDFHVPFNEAAPPAERQLWIEADFLFPELDEDEDNSTVAPHFGHMRLDEAGGIPRVRFRLTATMGQDGDIDECFEYVTDLNADGTPLVKATVPRTDRNHIHVHYLPARRDPADHIAYSANALLGRMLRAVNWDVERTVIKGLTDQISDSLATNPSINTFSTSLKTTWGALHKGSFFADPKLTFVASEIESLLRHMSVSFTPGHDEQLVDFSRLSDGQKSMLYLSLVLSSQAIGRAVLAEDDDSFDADKLRPAVFTVVAVEEPENSLSPHYLGRIVNALNEMTSEGDAQALIATHAPSMLRRVAPERIRYLRLTQERTSRVTHIQLPDAGDEAHKFVREAVQAFPEVYFSRLVVLGEGDSEEIVLPRILQAKGAPVDESAVSIAPLGGRHVNHFWRLLSDLQIPYLTLLDLDVARYAAGWGRIKVVNDQLAKFEPANVLPEDWGLPKWNTTEAPVRTHHCFGGEKKSVFRELEGRGVYFSEPLDLDFAMLLAFPEAYGVERDEPDEAMIKAVLGKKHHDANQYTKDEQKLFNTYHQRFKLGSKPAAHIDALAQLSDEKLLADMPASLSRLADAVIAKLAELPE

SEQ ID NO: 70053 - protein, 558 aa, Stenotrophomonas koreensis
MIAVDAWTPADGLTLEPNALLAAKERARSLALTAGPGAGKTEMLAQRADFLLSTGTCRYPKRILAISFKVDASSNLKERVKRRCGSELATRFDSYTFHAFAKRIIDRFRPVLTGEYALDVGYKIADRKPGPSRTLIEFSDLVPFAIEILRKSAVARNAIRQTYSDVFLDEFQDCTNLQYELLKLAFQGTSIRLTAVGDTKQKIMGWAGAMDGIFQAFVADFTAAPLNMYRNFRSKPRLLRLQNEIIRKLDPSSVMPDEQLAGDEGEVFAWRFEDSHKEADYLADLIEGWIKTEQLPPAEIAVLIRNQLDLYADHLMAALEARGIPFRNEQQMQDITVEPAARLIVDYLSCLYGRRKPKAWVRLMNQLIPFADEDIQSNARKDLDLLIKQQRKEIAIAELVDEPFAGWWEFVRAFLKQVRIETLVSLSPDYESHDRLKEVVRDTKARIEELLSLEPDLPKALERFSDDQAVRILTIHKSKGLEFDSVIILAVENEIFFGDQDENRCAYFVGVSRAKKRLILTHADQRERPAGHTKRWSVQRTAQNEYFGYATQFVRQEE

SEQ ID NO: 70054 - protein, 651 aa, Acinetobacter pittii
MHICSLKVKNFRAIEDAELRLDPNHKQDLTLIVGKNNSGKTSFIMIFDKFFKKDDNFNFHDFSTHLREKIYQIESTSISDVTIGLFLDISYTEDDNLEYLSEFIVDLNSVNNTVKLYFECSIDEDRLRKDLINIDQKHKKRFIEKNITSYLVKSLYVYENEDDLKNTNKQKLIKKEVGEVSNLINYQVIHAKRNLASSESKEKSSLPLSKLSTEYFNKENIFSEKDFIEINNAILEMDENLNNLYDTHFEGFFENVKEFLGSTALKVLSNLESRQIMSNSSKVVQIDNKENFLPESLNGLGNLNILYLLLQIDLKKRFFIQENRSINLFFIEEPEAHTHPQMQYIFSKKIKKIIAKIPNLQTFISTHSSHIVSQCNFEDIRYFHNKNGSVKIKNFYLELEEKYKFQTDFFKFLKQYITLYSAELFFAEKVIFIEGVSEKILLPYFIKNFDESNKEKEGYIPITSQNITYIEAGANAKAFQHLLEFFEVKSLILTDIDSVSGVNRNACSVELGTSSSNATINHYLSYDETNPDWFELLKNRSIKIDNENINVFYQTEENGYHARSFEDSFIAINYKLVRKYKENISGLKNKEKITDKPENFYDLKNNIIKSKSEFASSILFLALVNSDKKDDERIEWKTPKYIYEALEWINQ

SEQ ID NO: 70055 - protein, 697 aa, Acinetobacter pittii
MDQPIKAIENVKKIIVNNQFQEDGFRNFVLQGGAGSGKTESLKEIIEFISNNYPNQKIACITHTNIAVDEIKSRINNDKLWVSTIHSFLNVQIKNFQKNLQEVLPNIFYIDSSDINDHDDYKKRYEKLSKLNYKLKNKKMDKVVGKRDYDKNPSDYNNFLLDEIKQINFFITEEISLKDFRDIKYNETVFDSISEGTFSHDSLIKISFLLAEKYNLFSKIVSDKFDYIFIDEYQDTDKVLVDLLLKKIATNKKTTIGFFGDSMQGIYDGIGSLDDYIRDFNLIYIPKDDNYRCSQQVIDFLNVIRNDDIKQKVALKKDENLDSRQGSIKIYVNKIQKVKSNSRQEDKEKYIALINDAIKRVKEKNDILNLNILQLTNKSIASELKFSKLFKVFEDRYPNLEQAQIESNLKKIQIKDVIDLIVLYKNNRHNDLILKLKKNNLKIKKLDDKNNIIARLSYICDNDLGLNEALDYCYENKLLIKSPQRIDFESQSKRHFEQCDSDPVFKDLKTLLERDNLNTYNRAKQHCTYDIDQYDYDDFMSSYRKIKFSDSLLSNNLLLSEVLNYFNYIEENSNSDEKYLTMHKTKGTGIENVFVVLEEFFWSNYSFRSIYDSSYSNFEVKEKSEKLFYVACSRTIKNLMILINYETNDELELIREKFNGFEIIELNSSDTNLLITNPDVENFTLPAAIESNIQVSI

SEQ ID NO: 70056 - protein, 538 aa, Acinetobacter pittii
MKFVVYRAKIYEVHVSAIDPTDKSNKRNFEDTSAFAALLQCNFVQAQRTLDKTKLGEADVIGKLLSELFKTAAAPTATESDQELAAKLKKSVEDIELNVQSDFDKMLKKLLPVMGVMGFPSLNDTELRPETSLNVEALLSGHTKVVYSGTDGVHLPEGYNGLGTRNLIYMLLQLESYHKIYRSQITRPSAHLIFIEEPEAHLHPQMQEVFINQLNVAIQKLSSAYPAEDVWNVQFIITTHSSHVANAACFDAVRYFYNQKDAVKSIRNTKVKDFKKGMQTISVTDKEFLHKYMTLTKCDLYFADKVIMVEGTTERLLMPRLRELVDKSLPEHQKLASQYVTCIEAGGAHAHLFYPLLDFLELKTLVVTDLDSIKKVEKENNKKKKINVWEKCPVAEGTRTCNTAIRYWFAPKDIKKIEDFHLSPVELLAKTPTDKQVSCRRIAYQIPEDPNTDVCARSYEDALILANLKDFTLPNEEDVVIEAWEYAKGLTKSDFALEYAIRKKEWVVPRYIHEGLVWLAESDVPIQNLEPLDKGATA

SEQ ID NO: 70057 - protein, 533 aa, Acinetobacter pittii
MSQIKENPALVAAQEAQRKINEALDAGYSFRLEAGAGAGKTYSLVAALKKLIDERGSMLVRTGKKVACITYTEVARNEIAQEIEDHPAILVDTIHGFCWAFIRQFQKAIRDLVSEIDDKKEKIELGGGIGSQLVEYDLGFFSVDEKRITLNHDDIPELMAMLLAKEKFQMLFSEQFPVIFIDEYQDTNRKFMDAITEFFLKPKTGPIIGLFGDHWQTIYSSEYELAEYPIEEIAKGSNFRSAPAIVNVLNTLRPELPQAVSVPEAKGEARFFHTNAYKGGRTDELHSKEDLPSDLARSCREELIIRLQGEGWDLQKTKVLMLSHNVLAIEQGYPQIAELFKRHTEQFTKKEDPVIRFFAEVIEPICIAYSSSLYGEMFKKLGTRPAITKHEDKMLWRRDMDQLLKLRNEGTIGQVIDHLKTTKRPLPSDRILRREEEILSLMDTPEAEWSSTLQRYNKLKKIEYKEVIEVTRFIEKQTPFATQHSVKGAEFENVLVVLGGGWNHYKWPQLLELLETKKLNRANTKGFYRARSL

SEQ ID NO: 70058 - protein, 788 aa, Bordetella sp. N
MRLQAYRLQNYRRLRDVVIELDDKISIFVGANNSGKTSAVQGLFSLLRGDAKRFELFDFSAALWPGIDEAGEPIPDEGGEQKSLPSISLDMWFRVGEQDLVAAMPLLPSTDWDGKCVGVRVAFEPKNQDELFHRFRDLRGKGNEAAKALAEKAAKAEGAAGAVGTDFSDYKPWPESLTKYLTKALATEYTFRYYVLDEREFEGYREKNVDYSPLSIAGDKDRGGAAVIKSLLKVDFLRAQRHLDDPDEGTSSRSENLSRKLSRFYQRHLEKRGDDHQALQALDASEKGLNFHLQEVFKDTLDRLKKLGYPGVNNPDIVIRAALEPSTVLGQDAKVHYVVPGNVPAHLPDSYNGLGFKNLVYMVVELLDLHERWNRDEAERAPLHLVFIEEPEAHLHAQIQQVFIRNVLKLLEEDKEDQDSFFHTQLVVTTHSPHILYERGFSPIRYFRRVSAELEHHTDVRNLSRFKAGDTEKEAREFLQRYLKLTHCDLFFSDAAVLVEGNVERLLMPAMIETAAPRLRSSALTILEVGGAFAHRFQELIEFVGLTTLVVTDLDSVEVKEDAAADVGVDEDEDELRPFEVEEDGEGDGGEKATSKKRGSTCHAHVPHAVTANQTLISWLPKKHSVDELWKAPPEQKVLALASATDAHVRVAYQTPIPVTVEGNTVERCGRTLEEAFGLENAAWCQAAANRPIGLKLRKAATTPEELALGLHKRVVSRSFDKTRFALEVLASGPLNQWRVPTYISEGLVWLEKRVAHEQEAEVAIAAGAAAIEPVNDGAFLVEAGAAQ

SEQ ID NO: 70059 - protein, 638 aa, Bordetella sp. N
MSRRTNSPDTDADKEIHACIKSVPATPFVVTAGAGSGKTTSLIKAMDRVIAEHGATMLMKKQKVACITYTEVAANEIREDVNADALVHVSTIHSFYWTIASSFQADIKVWLRMDLQRRIDELVEKARNFGQRVRQNTRDNNKRDQERLARHLEEIEKVTSFRYGMGSDYPKGILGHEDIIQLADHLLKTRPLFRRLVALNYPFVFIDESQDTFEEVVESFRMVEAQMRGRFCIGFFGDPMQKIYLRGSGSIGLEDGWKSITKPENFRSAQSILHVANAIRAQGDGLKQERGLHEELDGTERPVEGSARIFILPKTMNRNEALAKVRAWCAAADADDGWVQPELAVKILVIVHRIAAKRLGWDGIFAALSERAPDSIKQGLLDGTGWPVQPFLGFVLPLVAAMQNGNEFEAMNILRARCPRLAASNLAGKNGAHLLRELREAKLELVRMMNDESCSIRDVAMHLRATGLLALDERLERVLGLKGAPAEAEGNEADGGLPSDLPVLKLLDCPAPQLTSYGQYLSEGSPFATQHGVKGAQFDRVLVVMDEEENDYRLYDYEKVLGDAQASAADRAAFANGEDNTWSRTLRLLYVCCTRAKRGLALVFFVADPAATATHIVASGIFPEGSVITQDLLTGDQH

SEQ ID NO: 70060 - protein, 675 aa, Lactobacillus hammesii DSM 16381
MYLSELNLYNFRRFSGSYKNKQPGLVVHFHKGLNIIIGENDSGKTAIIDAIRLMLGDVSDDFQRITDDDFHATKSGLDENTFQIEGIFCDLSEREAGIFLDWLSFDKKGNYELRISLSVEKKKNDNDQVYLDHKIVAGESSSSMPLSASARSFLKVTYLKPLRNANDELTPGFRSHLPKMLMAHSTFSKDNQSKSELERIMKSANLEIENFFDGDANVSDQSSHASLNTELSKVLSQLYDQQDQSKSKVSLKLPEATLSQILNQLSLNPDSRNLGLGNMNLLFIATELALLDDHLTHTVYGPNLMLVEELEAHLHVQAQIRLIKYIEKYIESHQSKASMQFILTSHSVSLTASVDQKLLIYLHDGQAYPMGPSYTMLKEEDYRFLNRFLDATKANLFFAKGLIFVEGYAENILLPVLADLIGYSLHENGISIVNVGGRSFDNYVKLFSRKNGSIPINLPISIVRDSDVRPYTYRINQNNIDGIRELLTSNDFNKNRMGNTYSTFNQLQKSLKLKFSNENFSKISQIAYQLLDGDELATSQGKKAEKLENAYHDLNVKQQVFVSPAWTLEYSLLKSPLGDLLLQSIADAKFNLKADAENKKREFIATSQSGDLIQIYSQFEHSDVSKAETAQFLAEKLYNLDEEKRNKLKVAVLGNSYCAYLVDAIKFACGRDEDD

SEQ ID NO: 70061 - protein, 597 aa, Lactobacillus hammesii DSM 16381
MIDNLEQVERVLLPPGKRFSTEQTQVIGADGNIDIVAGPGSGKTTVLAAKLIMFLSKQRRGDKGICCITHTNVAVAEIKKRIEQSGLGNVEYPNFVGTIQRFFDHFFGSKAFGLLFPQKALRILDGDQYTNVYAENFLQLAPSWWKNNDYDAPDYRRREARLVISEDKKAYFVNNEHKNYGPIINEALGALLSRGIVNSEQMTELARWYISLHGNYLSTAMSERFDYLLLDEAQDTNDIQYKILMELTKGKNIHFQRFGDPYQALYTIYGSESEDAWNPFTEEQDNIAQIKEISTTARFGPGIAGLVRDVCYEKYPTFHSDISQKTFNNRFIIFESGDDLREKYQRLLRQCESENDSFLKCPKKDKIVAPMYKDLEKWFNAYKKPTHSPIIHVQPATDLFYSVLRKLAYANRRTISEEHMILQENMELAESVAKSVKCLFSKDETQTTLEGLIHPLLENDAWMTSADVSNDLIKETMHVDESNMELSNSMESEIILSTIHGVKGETHRSTLLLVDSEVYGGEKIHENFFFKDLFPFLIGERKVYDTDPHSKRIKACLKYAYVALSRPVFLAGVAIPKGSVTSTQREKMVSYGWKEVK

SEQ ID NO: 70062 - protein, 535 aa, Lactobacillus kitasatonis DSM 16761 = JCM 1039
MFDRSLSENDLDLLDSDFNAYSHSNKVEITAYLKEIEEDCLLSEFKGHIKNGKLILRYIKEKNEDYILQAGFSEETMKELQSRSYLRRLNMQYVDTNRNLYAYLRKERQNLLLISQELLSDEEKNDDRTKTAEIQKNLDSINQQISSLNYIKGALKNVNEQLSSLSVENKDQNVQFVAGHNDAEKMLSDVALSYSSEEGPLTLGGDGRNNQIYLATWIAKQQIKNTPDHVTFYAIEEPEAHLHPHQQRKLAQYLTNSLNGQVIVTSHSPQIAQEFKAKNIIRLYFKNKYTHAASGPEDEQIKNSFDDFGYRLNAMSAEIFFSYGVFLVEGTSEVIFYKALAKENKIDLDRLNISILSVEGIGFKSYIKVCKALNIPWVLRTDNDVFKNTQNESYYAGINRAIGIIKGCNLNYDVPSVYQNECKKWSGNSVPSDIKDSNDKMRESLKNAGIYMSKMDLENDLAKSNLNDTLNDYYDIQESDVAKLVSEMQKRKAENMFKFIQKEHSNLVKLQNDELIEPIFDIVNKVKNQVQPNGK

SEQ ID NO: 70063 - protein, 530 aa, Lactobacillus kitasatonis DSM 16761 = JCM 1039
MESSKEQEKIIHDKNNIVVVARPGSGKTYTIVEKIKLILKDLYNYQGIIAISFTNKASEELRNRCINGGLSLKKSFFGTIDKFCFSQIIAPFCSHLSGKIQELKIQKLEDFDRLKNLNNKEVEKIIEGYLKQNIVFLELLGETALYILKNVPDAIKYLRARYKEIFIDEYQDCGSSQNELFLFLVSQGIKGMAVGDLHQAIYGFAGKSSVYLKELMQNSDFSHYNLLENFRCHPSIYQYALCLFGQTEEKPEKEKRVFRIRITGDERNIAKEIEKNISVIKERYNLKTTSGFAILCRSNTTADIVNESLTIPHKVYKSTELDKDDSEVARLFIYLLRGYFDKKIYAIDITERFFSEEYERNKYRSLSNATQQLFAYPANKLIDNITIFSDIANIIYPKVTTKDMSETLSKLKDVLSDKRNYENYIPPKDNELSIMTIHKSKGLEFDVIFQMDMYKYVFPPEKAVSDENLYERYLNLHYVAITRAKAACFLMEGTLRHNSQMELWPAESSVFYDLPGLAERRYDIDMRFKN

SEQ ID NO: 70064 - protein, 689 aa, Lactobacillus helveticus DSM 20075 = CGMCC 1.1877; identical to SEQ ID NO: 62888

SEQ ID NO: 70065 - protein, 408 aa, Lactobacillus helveticus DSM 20075 = CGMCC 1.1877; identical to SEQ ID NO: 62889

SEQ ID NO: 70066 - protein, 574 aa, Lactobacillus paralimentarius DSM 13961 = JCM 10707
MIIKKITIFNYRTLNDIQISFNEESNYLVGKNNIGKTSVLNLLSTIMRGKDFDKDDFLDLSKPIIIRLVLKITDDEIGIFGDNFSTNDKNEIELKFQQNSPIERITIVDDENSSEILTSQIKKSNFIGYTSNIRPIKDNDLTMNFGNYKLIPQLVKKYIEQHNTDNEPKNDFDVRLVDFINSNLNKLQSFNQRNISVGFEVNYADLITRSLSLTDNKGIEFSRLGYGVQFSSLIPLKIIDTIINWSKYNQLDEHLLINTSGKKYLQIVLCLDEPEIHLHPNLQLKLMKYLRNLLSGKDDSFNSLLKELFQIDFIKGQLFSVTHSPNILSTNYHQIERFYTDNGKVKVVSGRDLSFDQSLNKQLKRQFPYVTNALFADAVIIVEGDSELSAFPIFSDTLGKSIIDYNINIVKSDGFQSIKPLNRLFNALHIKTILVADNDNKHREWPDNTFVTDKEDFEYECFSVMTLIEINQYLNDFETIIQGNTTYTGSFWFEFLTGDKDRILQSKNKVTEISNILKSKNTNEKKNIKSQIEKKIIKNYLKKKSIINGQLIANNIKNVPDIYRNAIEGVIDEK

SEQ ID NO: 70067 - protein, 571 aa, Lactobacillus paralimentarius DSM 13961 = JCM 10707
MKNEKTINNVLNLAKNDSSQLEVIRNDSKKIVVEAPAGFGKTFTMINMIKYWIITGVITNYKKVLCLSFSVSAANRMKESIESSFIKDNDKRLLRVIKATNFHGLCRTILSKYGFLVGLDVKKVYQNMDSSDKKTLSLLPKGERKVIIDLDTSIKAASISSNGLIKKIKNYNNITRTYFLTQNKLPYNSIITLTLELLIDNNQICEFYQKYFTAICIDEFQDTNILGLTLIKLLTGKNTRFVAFGDDMQQIYQFLGAIPSLIDKYSEDSNVKYLTLQNNYRFKNNIEMQLLDCQLRRYKETLNTEGYTRVSLNTIHGKDLSDEALKISEFIKKHSTYKCAVLFSNNSKTTKCLVKYLLNEEITPFNALFRDDDQSVIDFHDIALKIYFEMYRSHPITNKEVTNYIKKVEKSTSKTDYKQSLLLLLKALIKKSIKEYSRDNRSEFISTILSSYSLRQNLVDVKHNIILSTIHGAKGLEWDYVILANFEYNELPNYFEIKAIGNINKNSKLVPNTENKKDIQDFINKFYVAFSRSKKEFIVSYSDMHWEGCRYNQASISPIAKLPFIEIKEIK

SEQ ID NO: 70068 - protein, 670 aa, Pediococcus lolii
MEKPIYLKKVIIEGFRSFGKKTEINIDDFNTFIGNNGTGKTTTLQALNKIFSTNPKDRIIEATDFFVSPQEENEQTTNRDLSIDVIFGISTEKLENDGRAAAIFLKNMTINSPEDEPYLHIRLEASWTSEGGASGTVDYNTYYVDRENNSTIASRLQLNSLRMIYVPAVRNPTRILKDSSHSLLSSLIKNVVWAEQTKEKINNENKRLNNDFLSERGMALINDKVRKIWDEFCPDERYGGAKLEISPTDLVAMSKQTQIVFNSSNVEHNYQIDEMGDGSRSLFYISTVKTALEIENELIDLEAENDPIINDTPPLLTMVAIEEPENHISPHLLGKLMNRLLEIAKLKNAQVLLTSHSPAIVKRVDPLKIRHFRIKSREKYTEVHKLSLPNKEDEAYKYIKRAVQTYPELYFAQLVVLGEGDSEEIILPRFFEAKNKNLDEAGISVVPLGGRFVNHLWRLLNQLGIPYITLLDLDKERKGGDWQRIKYVIKELKKLKENDEELNEKLSVFEGQKVVSSEKDLKEAIDALENKNIFFSAPLDIDFMMLKAYGGFYKGLLNDDEGPRYKNKQGKNVKVPKKNTKSLEEDFVKKIEDAVAETLKKDGGTGESYNQEERELMIWYNYFFLGRGKPSTHILALSSIDDETLNTNMPKVIERLLVKAEYLLEGENEK

SEQ ID NO: 70069 - protein, 605 aa, Pediococcus lolii; identical to SEQ ID NO: 63815

SEQ ID NO: 70070 - protein, 531 aa, Pediococcus parvulus
MIYVPAVRNPEKQLGVASTSLLARLVRSVNWNAETKEDIEDQLSKLNQTVLEENGLRRINETLSADWRKYYQDERFANVALTIDSINLNSLANRIQSTFTSQATGHKFRPEEMGDGTRSLFYISNVASVLDIEQSILEDENIQEKPLIDHQPPLLTLVAIEEPENHISPHLLGKLVGRLKDMAELANCQVLLTSHSPAIISRINPESIRYVRLDPHEGTSTIQSLNLPDKNTVEAYRYVKLAVQVYPELYFAQLVVLGEGASEEIIIPRFLEASGEYLDENGIAFVPLAGRFVHYLWNLLNQLGIPFITLLDLDRERTGGGWGRISYILGELNMIDCKVDKLPSGIEEINDGALNNLSKRLIENKDDANELDEYLKNLERKHVYFSNPLDIDFLMLTYYSDEYKHLLKGNEGPIIKTQNGQQKRVKEYEPQNVSSKEYLKRAEEATKSALKGGVDVTAGESYSSSEKALMIWYVYFFLGRGKPTTHIQVLDGDEDGSKLTDEKLLKKIPPVVKCLCEDVATQLNIGAESHD

SEQ ID NO: 70071 - protein, 603 aa, Pediococcus parvulus
MINKSEWIPTDSFILEDKAGEAVKANGNLLIIAGPGTGKTEMLAQKANYLFETGVCRNPYNILAISFKTDSASNLAERVNQRCPDFARHRFNSLTYDALAKRILDQFRNGLAQSNLPSADYLVQDEGKLRKIFYYVYGKSLRDRQANAFWRHFSLLKQVDNDAEKQFRRIILHGNKRFQANLSFQMIMQLAITIMDTNPLVKKAFQAAYPYVFLDEFQDTTDLQYRFIKTLFESSTAAITAVGDDKQRIMDFAGARKTIFSDFKSEFNSDELHLVLNHRSAPRLIKLQMKMYQSLQDGEYETKWPKNWENDDGDISLIQSQDEYEEAASVAQDIMKKLKQGIKPDEIALLVKQNDSQYGTPIITALSELGIKSRVESKYQSLLKEPLVQIVLQSVIFAVAANPTEDWGNFFDLYLKSREITDVEDEDTLYTAELNLNKFLHEISALITDIELSALKLVQHIIDFWTKDFFRSNFPQYFNESSFEATIDSFIELLNMERQAGGKWIESINSFRGVDTIPIMTIHKSKGLEFKAVYLIALDDTAFWTFQSDPDATRRALFVAISRAKLYLTFTFAQSRSNLNFYSGKQSHQLISEFYDLIDPFIN

SEQ ID NO: 70072 - protein, 670 aa, Pediococcus parvulus; identical to SEQ ID NO: 70068

SEQ ID NO: 70073 - protein, 605 aa, Pediococcus parvulus; identical to SEQ ID NO: 63815

SEQ ID NO: 70074 - protein, 578 aa, Lactobacillus parabuchneri
MKIQKIKVKNYRGLDGVSVLFDSNESFIVGKNNIGKTSTLDLLNTILSGNDFRSSDFQDEERPIIVNAKFILSEEEIGMFDDNFDSSEENSVTIQFAQTDPVSQVKIIATVSEENITRNQIQKSNYIGFSSSRKPIQENDLTRQIGSYKLIPHLVRKFAEDKSMEIPETEGDNQAIINYINEHLLQIKPFRDNQIHVGMETNYFDYITRSLRVQSKEGVDFSKLGFGTQFSSLIPLVLIDQLISWSRYQHLDEHLCSNNNGGQELHIILGLDEPEVHLHPNLQFAVREDIETLLLGNDQEFNKLVKELFNIDKVTGQMIVVTHSPAVLSNNYHQYIRYNSEINGLQVTSGQKLTLSSNQHKQLMMQLPNVKAALFADAVILVEGETEYGALPVFASKLGISLVRANVNIVNAGGVKSTTALKCLFNNLGIKCLSIIDKDDGNKATKDVFVTSKRDFEDECFELMGLRNIHEYFEIFYGAIENSNYDGSFWDCYFSSDYKSGRIETLKAQKDVYEYVENYFTAHIDSKLVNEDNILSNLRTSFIKHYLKKKSVLNGTIIAQCLEGVPETYKKALIEAAR

SEQ ID NO: 70075 - protein, 575 aa, Lactobacillus parabuchneri
MKNVQRVNQNASRPILDSKQLTVVNAKDKRLIVEAPAGFGKTSTMISMISYWVESGMLPHYKKILCLSFSVSAATRMKDSITEHFAEQFTQKSPMHQIIVTNFHGFCRMVLRKYGHLIGIQNIEKIDTVDINSVKSSMNGNRKTIDLMLDLESDIKSGKLSVKGLMSHSSTYVSGIKSLFIPRNQITYDGLIIMVLHLFQQFPTIRSDYQHIFYSLCVDEFQDTNILGWSLIQILLCDSSRFIAFGDQMQQIYRFQGALPNLIDQLIEKEYSYIRLETNYRFASNPDMLAMDSALRKYKDAPGHYSAELRIPIQLIFGNTVSDEGTEIISNIHKIQKDNPKATFAILVGSRSFSTDKLIRIFQNEFDTMDATFNTEDEEFVAFQSECLTLFESTFQKLPLIRQRIASFLSKVEESILPGSNIESYMKLLKGLLMYTVEKVSVHSRREHVVSVLEAGALRRSLSEVDSEITVSTIHGAKGLEWDYVFIANFEQLEFPAYPEMQKLNIKPWSEKIQVTNDNEEAVKEILNKLYVAFSRAKQQVYFAYAGERFNKTGKSIKANLSVLASLPFLKKTFV

SEQ ID NO: 70076 - protein, 784 aa, Pseudomonas libanensis
MQIKYLEIANFRKLHSIRIDLSAETTLLVGANNSGKSSSMLALRKFLGGKASAIRLQDLTLCHFDRIDEIGHSWEMASPGDLLPTANDWDDWLPHLDIWISAESGEYHYVRDLIPNFEWDGGLVGMRFRLEPEDVAEVFMDYRKQRERVQELIAVLAADADAKIPHDDNPQSRNADSGDSRQHPVSLSLWPQNLTDYFSRRLGKLFKIRPYRLDPGKLHTPRGMMRRASPQRLSEHAIHLEKNPIEGLIKIHEINAQRGFGDHGDEGQNDSKSSGGKKLSEQLRSYYEKHLDPGDSPEVSDLEALRAIEIAQSVFNTRLSTSFGPALLQVQTLGYPGRSDPTITLQAKLAATDGLNHEAAVLFEVDSKRTNSLSAVLRLPETSNGLGYQNLIWMIFRLMSFRDDWLKKHRNPDEQTTTGIEPIHLVLIEEPEAHLHVQVQQVFVRHAYQVLCEDDLITRYPNLKTQLLVSTHSSHVTHEVEYQHLRYFRRLPAGMDGVQVPVSTVSNLSSVFGEGSYTQKFVTRYLRAQHAELFFADAVILVEGAAERMLLPQFMRAQFKFLDQCYISILDIGGSHAHRLRPLIDALGIVTLVITDLDAGMAKAARPVRRGADLSTNNPTLKHWLRMKDASAKVDDLLEMADELKCQELDQLFAIRLAYQTPISVILSAAGEAPVEVLANTFEDSLVLTNARHFASRSGRGLVGQFARALQSAKTSEELGDSMFEALRDGNKAEFALEVLGTSDFPSLTVPEYIREGLEWLESKLRKKQSELVLVTTNPTEVIV

SEQ ID NO: 70077 - protein, 615 aa, Pseudomonas libanensis
MSSLPDADQLIQQCLNLDNPTSFFLYAGAGSGKTYSLVEAVRNFKARFSERLAVEGRQVAVITYTNAAAEEVMRRLEHDPLVWVSTIHSFAWEMIKGFNDDIREWLKIKLAIDIAELEKKLAKARGENKTYRANKADRDRKVKRLENIQHVFNFTYSPTGDNRGHQALNHSDVIGLAADFIQRRPLLNVLVDKYPVLLIDESQDTMARLMEAFLAVQSQASDRFCLGLLGDTMQSIYGHGMQNLASAVPLDWAKPEKLLNRRCPVRVVELINEIRASADTHQQKPRDDAPLGTVRMYCVRNQPTSTFETEDEVAERMAELTGDSSWSSGMEGRKTLILEHKMASRRMGFDGVFVPLYQVEHLKTGLLDGTLPALRVFVEGVMPILDAAQVDSFRLMEAVRLSSPLLTRDRLAASLDQAFTIAQAGRGADALLALFADADPTISEVVEVLANTHLLELPDRLRTALDMGPTEEDFPDTGDREVLEVHAYRLLIRSPFSQLAAYAKYCSELSPYGTHQGVKGLEFPRVMVIIDDKEAAGFLWSYEKALGVLPPSPGDRKKEADGEDNALTRTRRLFYVTCSRAQESLAIVFYTSDPEAAMTSIVKAGWLHEHEISVM

SEQ ID NO: 70078 - protein, 712 aa, Pseudomonas veronii; identical to SEQ ID NO: 64746

SEQ ID NO: 70079 - protein, 594 aa, Pseudomonas veronii; identical to SEQ ID NO: 64747

SEQ ID NO: 70080 - protein, 641 aa, Pseudomonas poae
MKLQSIRLSNFQSFGLKPTELSFDKITYLIGPNGSGKTAALQALCRLFAFDPSLRRIQRSDFHVPHIEVEAPEERKLWIEADFLFPELTKDEDNSTVAPHFGHMRLDELHGIPRVRYRLEATMGIDGDIEESLVYVLDVDTEGAPLNTAQVARPERNHIHVHYLPARRDPADHIAYGANALLGRILRSVQWDSERSTIKGLTDQISESLAANPCIDAFSTSLRAVWGELHKGRFFTDPKITFVASEIESLLRHLSVSFSPGHDDNLVDFARLSDGQKSMLYLSLVLSSQAIGRAVLSGENTSFDPDRLRPPVFTLIAVEEPENSLSPHYLGRIVNALNSMVKHPDAQALIATHAPSMLRRVEPEHIRYLRLTDARQTRVTCIKLPEKTDDAHKYVREAVQAFPEVYFSRLVVLGEGDSEEIVLPRLLRAKGTPVDESAITIAPLGGRHVNHFWRLLSELQIPYVTLLDLDVARYAAGWGRIKYVNDQFAKFEPTKMLSNLVTIPKWDDDVTPLRTHHYFGEDNKDFFAALQERGVFFSFPMDLDFALLLAYPDAYQVVKEDPDAQTIKAVLGKSHHNSAQYTPEELKLFGTYHQSFKLGSKPAAHLEALAKLTDDQLLIGMPKSLNDLADAVIAMLEEIPE

SEQ ID NO: 70081 - protein, 558 aa, Pseudomonas poae
MISIDAWQPADGLTLEPNASLAAREQERCLALTAGPGAGKTEMLAQRADFLLRTGTCRYPKRILAISFKVDASKNLKERVQRRCGNDLSSRFDSHTFHAFAKRIIDRFRPVLTGNDSLDPGYKIGDRKIGSKQIEFGDLVPLAIQILEKSAIARNAIRQTYSDVFLDEFQDCTDQQYRLIKTAFIGTSIRLTAVGDTKQKIMGWAGALDGIFKTFAEDFNAIPLNMYRNFRSKPRLLRMQNEIIRVLDPTSVMTDDQLEGDEGEVFAYRYENSEIEAESLADLISEWVRKESVPISQIAILVSKLLDQYALQLMSALEARGIPYRNEQQMQDITVEPAARLVVDYLLCIYGQREPKAWIRLMDQLIPYADEELQASVRQDLGRFIKTQRKNVAIADLIGESFEGWWETAKALLQHIGLETLTALSPDYESQNRLGEVLRDTRTRIEDLLKLEPELPKALLRFSDDQAVRILTIHKSKGLEFDSVIIMAVDNEIFFGDQDANRCAFFVGVSRAKRRLVLTHAAVRERPEGYTKKWSVHRTEQVEFFSYSTPFVSTTVAN

SEQ ID NO: 70082 - protein, 765 aa, Pseudomonas sp. DSM 29167
MQIQHLEIANFRKLLSVRVDLAAETTLLVGANNSGKSSAVLALRKFLLSKASIFRLQDLTLSHLATIDAIGEAWEAADDSFSIPVANEWADWLPTLDIWLEATQGELHHIRDLIPNFAWKGGHVGMRFRLEPDDMPTLFVDYRKERARVRELQQEIQKQAALGTQPPSLPLWPQSLHDYLNRRIGKTFKIRWYRLDSGQLRAPDPATRKANQQPLAATATPLERNPLTDLIRVHEINAQRGFGDSADEGVLEGGHGSGRKLSEQLRAYYSRHLDPGDSPDISDLEALRAIEAAQTAFDTRLSTSFAPALKEVVGLGYPNNSDPSIRVSTRLAPTDGMNHEAAVLFELDSVGGAPGAPPLRLPETSNGLGYQNLISMIFRLMAFRDEWLKKYRSPEEQSATGVEPIHLVLIEEPEAHLHVQVQQAFIKHAYHVLCSDPLLAKYPNLRTQLMVSSHSSHVAHEIDYENLRYFRRLPSGMAGISIPVTTVSNLSAVFGESNQTKEFVTRYLRAQHADLFFADAVILVEGAAERMMLPHFLRQHFRFLNQCYITILDIGGSHAHRLRPLIDALGIVTLVITDLDAGLLQVGKPVERKKGQTTNNPTVRHWMRAAGLGHDVDSLLDLPFDSKAQQIDDLFSIRIAYQTPITVRLPKTGLDVEALPNTFEDSLVLSNTEYFANKAGRGLMRSFAKSLREAETSLELGTELFTKLKDGDKAEFALHVLGDSNFATLKVPTYIHEGLAWLQSKLERKSKELLVVPSAILEVTP

SEQ ID NO: 70083 - protein, 623 aa, Pseudomonas sp. DSM 29167
MSRQPEAATDDVPDADQIIQECLNLDHPKSFFLYAGAGSGKTHSLVEAVKNLKNRERQRLTFEGRQIAIITYTNAASEEISRRLEHDPLVVVSTIHAFSWRMIQGFNTDIREWLRAKLTRDIGELNEKLGKARGQNKTFLANQASRDSKARRLDSLDEISTFIYSPTGDNRGRQALNHSEVIQMAAAFIQQPPLLDVMADLHPVILIDESQDTYGPLMDAFLQAQSLIPDRFCLGLLGDTMQRIYSDGKLRLEEAIPPDWAVPEKRMNRRCPTRVVDLINVIRASADSHQQKPKPDAIEGTVRMFCTQQIPGQGFELEEDIAQRMAAITGDAQWAIGKDGRKSLILEHKMAGRRMGFEGVFTPLYGVEHLRTGLLDGTLPILKLFFERVAPILQAAKTNSFSLMEAVRLQSPLLDTKSIKDAPDQFALLDKAGTATESLCELFSANDPLIGEVAHVLFETGLLDLPDRLVTALLLGATSDDPPETSDRDALETHAYQILLGRPFSEMAAFAGYTDGLSPFDTHQGVKGLEFPRVMVILNDEEAGGFLFSYDKLLGVKPASDSDVKNQREGKDDSLARTRRLLYVTCSRAEESLAIVVYTGQPATAKQRVIEAGWLQPEEIEIL

SEQ ID NO: 70084 - protein, 712 aa, Pseudomonas sp. DSM 29167
MHISKLSLVNYRNFANTKLLFQKGINTIIGENGSGKTNLFRAIRLLLDDNMIRSAYRLDSTDFHRGLGRWQGHWIIISLEFEEISEDEAIQALFLHGAVGIDDEAIGKATYTLIFRPKKEIRLRLSQLDDGDHTGLDAILSAVTLDDYETIFTGRSDADFNDEAFYNEVVGDFENARFNEEIEFPTIGAKIPSVLSVSKEISFTFVQALRDVVSEFHNNRTNPLLSLLKGKSGDIDPVAFQAITDGVKVLNDSIEALPDVQVVRTDIRDTIKDAAGEAYSPSSLSIKSDLPDEADKLFQSLKLFVGESDEGHEGPIHELSLGGANLIFLTLKLLEFKYQKSKQSIANFLLIEEPEAHIHTHIQKTLFDKLQYDDTQIVYSTHSTQISEVSNVQNVNILGREQGQCVAYQPATGLTTKEVGNIQRYLDAVRSNLLFAKSVVLVEGDAEEILIPILIKKVLGVSLDELGISLVNIRSTGFQNLAVLFHDDRIRKRCSIVTDLDKSIIDTAPVAGDSESMARRKRKYQASQEKGIARKALLDESFKDNPWVSPFFSPHTFEVDFVSAGNARKVVGILPDVYIDAPTIAKAKADLESADSARYGQRALTMADSYGKGWFAILLGKKIDPETAIPEYILDAIAFAHPVVTKEVWFNILSYRVNYIDENDIFTAPAVFTEFREKLLAFRRGEIDFVGIRNEVLATFPDDRINDVLKAF

SEQ ID NO: 70085 - protein, 598 aa, Pseudomonas sp. DSM 29167
MFTWNTGDLNPEQEAAILQPGSAFLIACPGSGKTRTLTYKIAYELSRLQSNKQFVVAITYTHRAADEIHERIESLGVDTSRLWIGTIHSFCLEWILKPYGIYHEALDRGFRVIDQHEREKILEALCKPYQKPKITFWDCEFYFTEADYVISCPQAWKHNGLHEILGRYFEILRENRQIDFELILFYAYQLISRHPAISTLLGQLFSFLLVDEYQDTKRIQYSIITAILKAGQGATKAFIVGDPNQAIYQSLGGYPIAFGDFKSMAGIDIEERELSRNYRSSERIIDYFGNFNVHATRIEAASSDKTYQSLVSFDETVSKAGLETELIRLIRFNIETTGIAPHEVCVLAPQWTHLASMTRRLVANMPEYSFDGPGMVPFARDTENFWYKLSKIALTQASPTMYVRRLRWAGDVLNDLEAAGASVSRFTRKSLLRECNAIKIDETDGLSYLRKFFEILFANLAIDFRLFSLLQEHHTAFFGSSQARVDRLKSEGSEFIGDIETFRKVFQTRTGITISTIHGVKGAEFDAVIAYALLEDMVPHFNDPNGQESALKLLYVIGSRARKNLHLISERGRIRQYSGEEYQATRQLVSCKFSYDQV

SEQ ID NO: 70086 - protein, 641 aa, Pseudomonas sp. DSM 29167
MKLQSIRLSNFQSFGVEPTELTFDKITYLIGPNGSGKTAALQALCRLFAFDPSLRRVQRSDFHVPHIEVEAPEERKLWIEADFLFLELTKDEDNSTVAPHFGHMRLDELDGIPRVRYRLEATMGIDGDIEESLVYVLDVDTEGTPLNTAQVARPERNHIHVHYLPARRDPADHIAYGANALLGRILRSVQWDSERSTIKELTDQISESLSANPCIDAFSTSLRAVWGELHKGRFFTDPKITFVASEIESLLRHLSVSFSPGHDDNLVDFARLSDGQKSMLYLSLVLSSQAIGRAVLSGENTSFDPDRLRPPVFTLIAVEEPENSLSPHYLGRIVNALNSMVKHPDAQALIATHAPSMLRRVEPEHIRYLRLTEARQTRVMCVKLPEKTDDAHKYVREAVQAFPEVYFSRLVVLGEGDSEEIVLPRLLRAKGIPVDESAITIAPLGGRHVNHFWRLLSALQIPYVTLLDLDVARYAAGWGRIKYVNDQFAQYEPAKVLPKEWRISPWNDDNIPVRTHHFFDEGKSDIFVALKERSVFFSFPMDLDFAMLLAYPNAYQVVKEDPDAQTIKAVLGKSHHNSAQYTAEELKLFGTYHQSFKLGSKPAAHLEALAKLTDEQLLIGMPKSLNDLADSVIAMLEELPE

SEQ ID NO: 70087 - protein, 558 aa, Pseudomonas sp. DSM 29167
MISVEAWQPADGLTLEPNASLAAREQERCLALTAGPGAGKTEMLAQRADFLLRTGTCRYPKRILAISFKVDASKNLKERVQRRCGTDLSSRFDSHTFHAFAKRIIDRFRPVLTGNDSLDPSYKIGDRKISRKQIEFGDLVPLAIQILEKSAIARNAIRQTYSDVFLDEFQDCTDQQYQLIKTAFIGTSIRLTAVGDTKQKIMGWAGALDGIFKTFAEDFNAIPLNMYRNFRSKPRLLRMQNEIIRVLDPTSVMTDDQLEGDEGEVFAYRYENSQMEAESLADLISEWVRKESVPISQIAILVSKLLDQYALQLMSALEARGIPYRNEQHMQDITVEPAARLVVDYLLCIYGQREPKAWIRLMDQLIPYADEELQASVRQDLGRFIKIQRKNVAIADLIGESFEGWWETAKALLQHIGLETLTALSPDYESQDRLGEVLRDTRTRIEDLLKLEPELPKALLRFSDDQAVRILTIHKSKGLEFDSVIIMAVDNEIFFGDQDANRCAFFVGVSRAKRRLVLTHAAVRERPEGYTKKWSVHRTEQVEFFSYSTPFVSTTVTN

SEQ ID NO: 70088 - protein, 605 aa, Bradyrhizobium manausense
MKIARAFIENFRGIRQAEVHFSGTSVLLGDNNTGKSTVLEAIELAIGPDRLARAQAIDEHDFYGGDYLPAEGAPAKLIIVEVVITGLDEQHCTKFRNNLEFWRQADRSLLGPGQGADLAQEGVDPAVRIRFEGAYDPENDDFTAKTWFAVPRLDDGTLINECRSSDKREFGFLHLRALRTGNRALSMERGSLLDIILKTYEVRTRMWEGLLRQLRDLDVVGDNDPEFGRILTAIRDAMRDIVPGEWADAPHLRVSDLTRDDLRRVLKSFLATGVPGYAAPFQHQGSGTINALVLAMLGLIAQRRNGRVIFAMEEPELSLPPHVQKRVVDKVRSIAAQALFTSHSPYVIEQFQPEQMMVLTRNTAGVLNASNIELPANLKLKTFRDGFRTRFCEALLARRVIVVEGKTELVAYSAVARRAAELAPAHYQRLDALGWVPFDAGGQTSVAAFAAFFRSLGKTVATIFDQQAQPAGAAIVASCDAAYEQPYAGFEDLLAAEISVPMQAWFVQFFVAAGEWPQALNNLLPFPGSPEAAYREAFLALFKHKKGDDYLTIFFEQCQLGHFPPTMLQIITALKNLAAPLPPPPPPAPWCKRISSDNGDGVDPV

SEQ ID NO: 70089 - protein, 574 aa, Bradyrhizobium manausense
MALILCDQRQRLLRTDGNILVRGGAGSGKTTIALAKACADLDAQRLGPLGKALFLSFARATVARVAEQATATLPRALMPRIEINTYHGFAWTILKSHGYLLCAKRGVALLLPAKARAHLAGLVGAARAARQRQLFENDGLVAFDLFPTLLTELLQTAPALALAYARAYPLIIVDEFQDTNAEEWQMVAQLGRHSRLIALGDPKQRIYDFKGAHPRRFDEYIEAFDPTPFDFAGENNRSPGTAIAQFANDIIDGEYRAANYDGVTVTCYRGRSLRPLKQEILRAVARLRRNAEWSLAVLVPANTLAINVFDYMAQAVHGLPAYPVDILVAAEGPMLAADLIALLMEPRSHQHLAAAILDGLAAFELGRSEEASGGALRKAARYRDLATAVRGRGLDGLEARGIGPGIRNLMDTVATLALSGDPMTDWRAIRACLNASDRKEFQAVAKEARHMRLLRRGAQIESRLAEAWRTHGAYRNARALLAAAVVDDQFAATTRPQHGVTVMTIHKAKGKEFDEVIAFEGQFQRYLQRTGADDERSARFNLHVAATRARRAVMIMTPEDRPCHLLPLRTSHDQ

SEQ ID NO: 70090 - protein, 839 aa, Lysobacter antibioticus
MSRTFRRQLSAILLKSPFDLFRSLPALILAWGRNRRGHHGRCKKVRINAWRACSPGATNKMHVNSLVFKNFRRLKNARIDFASDLTIFVGANNSGKTSATHAIELFLSGGKDKFTIHDFCVDCWADFESFPAEGAANAKVQFPAISLDVWISVDADNLYRVVELLPRAAWEGSLVGLRIEFSAKDAPQTLANFRAKAAEAAKFATKEKDGHDYKPWPRNMRDYLSRELKNEYGLRYFILDEAQIKAETTDAVNAPKEIIGDTERSGHTVINSLIKVDFLSAQRHLSDGNAQARTEDLSKRLSRFYARSQNKREDDHNALRALALSEDQLTKHFSDVFSDAFKSLRKLGYPGLANPSLEIRAALKLERVMGDQQAKVHYLLEEATAEAEAIALPDSYNGLGFKNLIYMGVELLDLHSAWSNTEEGKEDKRQPIHLIFIEEPEAHMHAQLQQAFVRKLTDLIPPTGGDGYATQFVITTHSPHILYERGFQPIRYFRRSAEIGAKQSSAVFNLSVFYEQNEPDRDFLQRYMKLTHCDLFFADAAILVEGNVERLVLPLMITHGAKKLSAAYLSILEVGGAFAYRFRKLIEFIGLPTLIVTDLDSVYPAPPKKEEVAAAADAATAAAAQSAVDSEDAEELEDDDGSEDAEGEKKPKPRSKCPASTPGAITANQTLLQWLPCKSLIDELLAASASDRLQAPTADGGAHVMVTYQCPVNTTWGTNTLELRSRTLEEAFAYENLVWCQKKEHHEVGLRWAKSSAMSLAELASKIHRRVKGESFKKTNFALGLLASNDVSWVVPVYIQDGLDWLTKHVAIGDSTIEGTPAKLELAPDAAPSAVEAAK

SEQ ID NO: 70091 - protein, 628 aa, Lysobacter antibioticus
MTSRAGKPDTPADIELRSILDTDTSTGFVMVSGAGSGKTTSIVKALDHLRKTRGPYLRQCAKKIACITYTEVAVSEIWGDVGNDPLFHVSTIHSFLWTAIKPFQVDIASWVGRRLDQKIVDTEEKVAAFTNRTHGKTRVQAAADIERYRAQKLEIASVDRFTYGVGSDYPKGILGHDDVIRLSTELIRSQPLIARVVGQKFPFVFVDESQDTAPDVVEALKAVSEALGPKFCLGFIGDPMQKIYTTGAGAIEPLPGWKSIEKPENFRCPVAVLNVINNIRLGGDGLTQTGGKTEFVGEDRKPVQGTAKLLVVPKDDRSGRLSAARQWLANQHADPLWLSNEPEADVKVLVIAHRMAASRLGFGGLYEAFHDKTSEGLKAGFDDGSHWSVQPFLKFLMPIVLANGANEQFEMMNLLRRFAPSLQREYARANALPTILKELDGRVKTLTEAFGANSTVAAFEALGHLRDGKMFRLDDRLLTAMAEHNATVPPTDSGDTAALQKLLHTPMKELWGYRTYIEEQSPFQTHQGVKGAEFSRVLTILDDEEGRHNQFSYGKLFGITPPSDTDESNRREGNETTFDRTRRLLYVCCSRAGKDLAVIFFADDPAAAHAAIADLGLFPPEDVHILAP

SEQ ID NO: 70092 - protein, 629 aa, Lysobacter capsici
MVELTNMTFLLGPNGAGKTAVLQALARMFGLDPAQRRIKRSDFHVPASEAPQDAPEQRTLWIEADFEFPELEQDDADGTALPAVPGNFAHMQLVAAGGPAQVRFRLKAAIDQDDDIEESFTFVISEDDDGNPTEESRVSKQDRSAIQVHYLPARRDPADHISYSANALLGRALRSADWSAEREEISTLTEQIGDELRDNAAIGGIATALTDQWGGLHKGSHYTNPSVSFGRNEIENLLRHLSIGFTPGHGENIVDFTRLSDGQQSLLYISLVLAMHDIGSKVLKGELAEAFDIDKLRPAVFTLIAIEEPENSLSPHYLGRVVKKLTTFAEGQDSQALVATHAPSLLRRVPPESVRYLRLNEDRSTIVKSIELPTDETAQKFVREGVQAFPELYFSRMVILGEGDSEQIVLPRLLEARGILADDASISVAPLGGRHINHFWRLLNGLGIPHVTLLDLDVARYQGGWGRIKYAANHLLSYSDIDGNDLTQEEIDDIPKWNSDDGIMLDDLGWIARLEALGVYFSAPLDLDFMMMTHYRAAYHVKKDDLEEPDEDTIKAVLGKSHDVLEGQYSNEQQSYFDAYHRRFKLDSKPTSHIRAMANLDDKKLIEDMPDVLDRIFDAVEEKLANLPE

SEQ ID NO: 70093 - protein, 553 aa, Lysobacter capsici
MIRAERWTPADGLSLEPNALAAAKEIDRNLALTAGPGAGKTEMLAQRADFLLRTGACRYPKRILAISFKVDASQNLKARVRKRCGPELAARFDSHTFHAFAKRIIDRFRPALTGRDALDPDYSVGPHRIQRRSITFNDMVPLAVHIVESSQIARNAIRQTYSHVFLDEFQDCTDAQCKLIKACFQGTTVRLTAVGDTKQRIMGWAGALEGIFESYAEDFEAHPLNLYQNFRSEPRLRRMQNAMVRVMDPPAALDDDDLPGDEGEIEVLRFDNDDDEAEALADLVRGWIDDEGLNPSEIAVLVSKQQNLYCQKLRAALDAKGVPFRDEDATQNLASEPVANLIVDFLLVAAGHRQPGPFQRLLDLVVFGRGFDQENEYRARSRWNRFSASVRQRLAAEEVDLADIDDLRTIIGELLDIVGRDAVIGLSSEYAHGAYLQQQIDATTDRAHTLLSEGGDQSTALASFSGDRAVKIMSIHKSKGLEFDTVLMFGVETQTFWGDQDAERSAYFVGISRAKRRLYLTVCEERERPEEAKYWKVMRTEHDEFVGYANSYL

SEQ ID NO: 70094 - protein, 702 aa, Colwellia sp. MT41
MEISKIQIKNFRLLKDFSLDLEDELSLIIGKNNTGKTSVLTALDKFINPSSRKAITLDDFNVGLKKELVEYLSGSKVLPNENDYQPLGIELKIYIEYTEQDDLSQVRLLIMSLDPSDNNIVLKFEYKIGHEQLLKLKGYYAEQSEKFNNNPELFLKEHLLDYFGSVQKKSLLFSDETVFIDLVKENIHLTNILSFDYISAKRSVTNKESDKTLSLQTAKIYKRTDDSEEQIDASDRFKQTLRNTDKELSTIYADMFDGLIKKVNQFGGVNPTDTKLKIASTLQHRDLLDGNTTVMYSHDSHDLPEHYNGLGYMNLISMIFDIEMVMGKFRRTLKEKPAAINLFFIEEPEAHTHPQMQYIFIKNIKSLLKENREREDGITIQLQTVITTHSSHIVSECDFNDIKYLRKNNSTYDVKAKNLKALQDEYKSGDDIEDAKLKRDFKFLKQYLTLNRAELFFADKAIFIEGDTERILVPAMMKKIDQEFSSPDETPLLSQNISLVEVGAYSQIFEKFIDFIGIKSLVITDIDSQYTQEIVDGQKTKKKTIKCKPSDPLANKTSNASLKFFFGDHDLDFYKNLSIDEKVLRKVDTQWIQDPDGYFLMVYQTEESRYHGRSFEDAFFSLNKALLGNDAENFPSLTKKHFNKFVDDADGDPYVFAEKAVNSKPTLAIEILLNSEKVGEHEFSNWQVPSYIKEGLLWLRKS

SEQ ID NO: 70095 - protein, 642 aa, Colwellia sp. MT41
MATQELDISQLTSESQQVIQLIRQGHSFLLSGGAGSGKTYSLVEVLKAVLVEKPTSSIACITYTNAAVHEIEERVQHDQLHVSTIHDFLWRNIKHFQCELKCTLIELMNDDEQPKIKSPDGETVAVDFFNELESDIKYKEFVKIKDGCISHDEVLILACKMYEKYEKLCTITKDSYPLILVDEYQDTDPNVVKLLLEHLNQSPKNNIVGFFGDAMQSIYPGSVGNLNEYTQQVPPRVTEVKKVQNRRNPQLVIDLANKIRTDGLLQEPSKDINAPNMNADGTAKQGTALFLYSNNDDLDVVRHNLAWDFDDSTKTKELNLTHNLIAGKAGFDDLMRIYDKDKVLEFIKRVKGYIKKDDNKIETEGKTFKQVYGELGGLKDDVPKLLAPTKGQREYIDANPQAYHFAFEQPYDEISKLYIDKDMLLDDKKNNAEDLSKPASKRDDLIKHLFKIEHCIHLYKEKRFNEFSRITDFSITSVEDKKCLKESMDALIEVEERSIGDVIGFASTLNLVVVDDKLERFQISRNYVYQQICQIPYQQFRDLYQYLEGYTPFSTQHKTKGAEYSNVLVVLDNGKWNSYNFNYLFEGNGNDNVRHKTEKIFYVCCTRAKENLAVFFHQPSANVIAKASEWFGVDNIVNLDEI

SEQ ID NO: 70096 - protein, 712 aa, Pseudomonas aeruginosa; identical to SEQ ID NO: 63712

SEQ ID NO: 70097 - protein, 599 aa, Pseudomonas aeruginosa; identical to SEQ ID NO: 63713

SEQ ID NO: 70098 - protein, 807 aa, Pseudomonas aeruginosa; identical to SEQ ID NO: 62542

SEQ ID NO: 70099 - protein, 643 aa, Pseudomonas aeruginosa; identical to SEQ ID NO: 62543

SEQ ID NO: 70100 - protein, 712 aa, Pseudomonas aeruginosa
MHISKLSLVNYRNFANTKLLFQKGINTIIGENGSGKTNLFRAIRLLLDDNMIRSAYRLDSTDFHRGLGKWQGHWIIISLEFEEISADEAVQALFRHGTGGIDDEAIGKATYNLIFRPKKEIRLRLSQLDDGDHAGLAAVLNSVTLDDYETIFTGRSDADFNDEAFYKEVVGDFENAKFNEEIEFPAIGAKIPSVLSVSKEISFTFVQALRDVISEFHNNRTNPLLSLLKGKSGDIDPVAFQLITDGVKALNDSIEALPDVQSVRTDIRDTIKDAAGEAYSPSSLSIKSDLPDEADKLFQSLKLFVGESGEGHEGPIHELSLGGANLIFLTLKLLEFKYQKAKQSIANFLLIEEPEAHIHTHIQKTLFDRLQYDDTQIIYSTHSTHISEVSNVQNVNILGRERDRCDAYQPSTGLAPEEIGNIQRYLDAVRSNLLFAKSVILVEGDAEEILIPILVKKVLGISLDELGISLINIRSTGFQNVAVLFHDERIRKRCSIVTDLDKSIIDTMPTGGDPEKVLRRKKKYQASQEKGIARKALLDESFKDNPWVSPFFAPHTFEVDFVAAGNANKVVGILPDIYKDAPTIAMAKAELESPEIALYGQRVLTMAGSYGKGWFAILLGKKLDPQTAIPSYILDAIAFAHPVVKKEVWFNVLSYRVNYIDAEDLVTASAFFDGFRAKLLAFRKGDIDFVGIRNEMLATFPDDRINDVLKVF

SEQ ID NO: 70101 - protein, 599 aa, Pseudomonas aeruginosa
MFEWNKDDLNPEQEAAIFEPGSVFLIACPGSGKTRTLTYKIAYELSRLKSNKQFVVAITYTHRAADEIHERIEGLGVDTSRLWIGTIHSFCLEWILKPYGIYHEALERGYRVIDQHEREKILEALCRPYQKPKITFWDCEFYFTETGYVLSCPQTWKHAGLHAILGQYFEKLQESRQIDFELILYYAYQLIASRPAISLLLGQLFSFVLIDEYQDTKRIQYSIVTAILKASQGATKAFIVGDPNQAIYQSLGGYPIAFDDFKTMAGIGLRKLELSKNYRSSERIIDYFGNYNVHDTRIEAASNEKAYPSLVSFDATVNKTGLEAELIRLIRFNIETVGIAPHEVCVLAPQWTHLASMTRRLCASMPEYSFDGPGMVPFARDTENFWYKLSKIALTQASPGMYVRRLRWAGEILTDLEAAGASVSKLTRKSLLRECNAIKIDETDGLTYLSTFFERLFSSLAIDFRLFTTLREHHTAFFDSSQARVARLKSEGSEFIGDIGTFRKVFQSRTGITISTIHGVKGAEFDVVIAYALLEDMVPHFNDPNGQESAMKLLYVIGSRARKNLHLISERGRIRQYSGEEYQVTRKLAACDFGYDQVP

SEQ ID NO: 70102 - protein, 634 aa, Pseudomonas aeruginosa; identical to SEQ ID NO: 65026

SEQ ID NO: 70103 - protein, 557 aa, Pseudomonas aeruginosa; identical to SEQ ID NO: 65027

SEQ ID NO: 70104 - protein, 712 aa, Pseudomonas aeruginosa; identical to SEQ ID NO: 70100

SEQ ID NO: 70105 - protein, 599 aa, Pseudomonas aeruginosa; identical to SEQ ID NO: 70101

SEQ ID NO: 70106 - protein, 807 aa, Pseudomonas aeruginosa; identical to SEQ ID NO: 62542

SEQ ID NO: 70107 - protein, 643 aa, Pseudomonas aeruginosa; identical to SEQ ID NO: 62543

SEQ ID NO: 70108 - protein, 634 aa, Pseudomonas aeruginosa; identical to SEQ ID NO: 65026

SEQ ID NO: 70109 - protein, 557 aa, Pseudomonas aeruginosa; identical to SEQ ID NO: 65027

SEQ ID NO: 70110 - protein, 712 aa, Aeromonas veronii; identical to SEQ ID NO: 63712

SEQ ID NO: 70111 - protein, 599 aa, Aeromonas veronii; identical to SEQ ID NO: 63713

SEQ ID NO: 70112 - protein, 712 aa, Aeromonas veronii; identical to SEQ ID NO: 63712

SEQ ID NO: 70113 - protein, 599 aa, Aeromonas veronii; identical to SEQ ID NO: 63713

SEQ ID NO: 70114 - protein, 712 aa, Aeromonas veronii; identical to SEQ ID NO: 63712

SEQ ID NO: 70115 - protein, 599 aa, Aeromonas veronii; identical to SEQ ID NO: 63713

SEQ ID NO: 70116 - protein, 712 aa, Aeromonas veronii; identical to SEQ ID NO: 63712

SEQ ID NO: 70117 - protein, 599 aa, Aeromonas veronii; identical to SEQ ID NO: 63713

SEQ ID NO: 70118 - protein, 712 aa, Aeromonas veronii; identical to SEQ ID NO: 63712

SEQ ID NO: 70119 - protein, 599 aa, Aeromonas veronii; identical to SEQ ID NO: 63713

SEQ ID NO: 70120 - protein, 712 aa, Aeromonas veronii; identical to SEQ ID NO: 63712

SEQ ID NO: 70121 - protein, 599 aa, Aeromonas veronii; identical to SEQ ID NO: 63713

SEQ ID NO: 70122 - protein, 712 aa, Aeromonas veronii; identical to SEQ ID NO: 63712

SEQ ID NO: 70123 - protein, 599 aa, Aeromonas veronii; identical to SEQ ID NO: 63713

SEQ ID NO: 70124 - protein, 712 aa, Aeromonas veronii; identical to SEQ ID NO: 63712

SEQ ID NO: 70125 - protein, 599 aa, Aeromonas veronii; identical to SEQ ID NO: 63713

SEQ ID NO: 70126 - protein, 712 aa, Aeromonas veronii; identical to SEQ ID NO: 63712

SEQ ID NO: 70127 - protein, 599 aa, Aeromonas veronii; identical to SEQ ID NO: 63713

SEQ ID NO: 70128 - protein, 712 aa, Aeromonas veronii; identical to SEQ ID NO: 63712

SEQ ID NO: 70129 - protein, 599 aa, Aeromonas veronii; identical to SEQ ID NO: 63713

SEQ ID NO: 70130 - protein, 712 aa, Aeromonas veronii; identical to SEQ ID NO: 63712

SEQ ID NO: 70131 - protein, 599 aa, Aeromonas veronii; identical to SEQ ID NO: 63713

SEQ ID NO: 70132 - protein, 712 aa, Aeromonas veronii; identical to SEQ ID NO: 63712

SEQ ID NO: 70133 - protein, 599 aa, Aeromonas veronii; identical to SEQ ID NO: 63713

SEQ ID NO: 70134 - protein, 712 aa, Aeromonas veronii; identical to SEQ ID NO: 63712

SEQ ID NO: 70135 - protein, 599 aa, Aeromonas veronii; identical to SEQ ID NO: 63713

SEQ ID NO: 70136 - protein, 572 aa, Pseudomonas sp. TTU2014-096BSC
MKIDYVYLNQYRNFADAHINLAKNSLVIGSNDVGKTNMIHALRLLLDKSLSDAEIEPTTHDFHCAQDGTQADYFFIRVAFSEVTQDAVLSQLKGLVSADGKFFLEFGATRANHSYEIAAGYDLATMEVIPSRYYLKYLHLKYIHSQRDLVRYIRSEKRHLLRLAQESRDQVQVDADTIQLQALAGLLESVNDGVKNLHYVAEATKDLNDELKALSHHHAGYNVSLDTGSIGIEQFIEQLELGASTNGSRVMLGGDGRNNQILLALWKAKSVLEHDQDSEVVIYCVEEPEAHLHPHQQRKLASYLIGALPGQTIVTTHSPQIAASYRPDSVVRLLRNNGATRAASQGCSDCIDSAWTGLGYRISILPAEAFFASAVMLVEGPSEMLFYAALARAHGYDLDHSNVSMLSVDGVAFEVYKRVLNALEIPWAVRTDNDISDVLLGSRGAQVVWRNLAGMNRALSLAGMPLLQHRPQPYDHLASLTDGTWQAVSAAVAPHGIFLSQIDLENDIAAELPTLLNGFKGHALPQAISYLQGKKAIRMQEFIDHCGTRLSALPNGHLLRPLIHCMTAAAQV

SEQ ID NO: 70137 - protein, 542 aa, Pseudomonas sp. TTU2014-096BSC
MATFTPSAEQAQAIQCTSDMVIVARPGSGKTSVLSCKVRNLVAGLRRHQGIIAISFTNKASDELESRCKADAFDVKSSFFGTIDDFCLREIVFPFARQLMPMPATVKTAKLRELPEAVVGMLPATPIQDGTIANTAEFLPFLQAALAQGIVPLEAVGILACYVVKHSPACRNYLVARYCAVYIDEYQDSGYFQHQLFLKLKSLGLTAVAVGDSDQSIYGFAHKDSRHLMALALPGSGFAYFAITTNFRSHPSINNFALRLLDPNHPITPTSDMRVLIKTVDGDQRAIGAWLNTAIPHLMLAYQVTSASRVAILCRHQHSARLIADHLGLAHHLVEESPFQTAPAAEASLFSDVLKLRFDQQLTAEALIEQPGVPKLAANERRMLRRALLNCRSCLVSDLVATVLNAATRLLGQQPSAEGAMELGVVCGDPDKLRRFKSPSRDAVQIMTLHKAKGLEFDLVFHADLYDHVIPTRSYPAGSYGQVIFENEAQCLNLHYVGITRAIKACVLMTSSFRINTQGAVKNGAPSQFIGRNGANATPIVW

SEQ ID NO: 70138 - protein, 687 aa, Peptoclostridium difficile; identical to SEQ ID NO: 64408

SEQ ID NO: 70139 - protein, 428 aa, Peptoclostridium difficile; identical to SEQ ID NO: 64413

SEQ ID NO: 70140 - protein, 766 aa, Paenibacillus sp. IHB B 3084
MHIECVEIQNFKKLKSCRVEFTDKTTIFVGANNSGKTSAMDALRKFLDKKSDFTINDFTLSNWIEINRIGERWLSKCGETTDFLMEDIEKLIPTLDVWLQVSENEIHYVTHLIPSLDWDGGLLGVRLRLEPKDIEYLYKDFVESINSAKETLSAAKSTSSFSLWPRNLKDYLSKKFHTHFIVRAYILDPSKLLNIDPESGLARPQILPFDSDPINEDPFKKLFLVHYIGAQRGFSDSAKTSEEDESTSSLVGDLSTQLRRYYNTHLNPTESPDPTDIDALQAIESAQDIFDSKLRDGFENALIELQSLGYPGFSDPKITISTKFKPIDGLKHSSAVQFDLMPENKQFKEMHLRLPEHYNGLGYQNLISIIFKMMQFRDEWMKVGKLAKSTPSTKNDFFIPPLHIVLVEEPEAHLHIQVQQVFIRHVYDILCNNDRLKGQDFFKTQLIVSTHSGHIAHEIPFSSLRYFRKQFSLSDNEVPISTVVNLSNVFGENNETERFVTRYLQITHFDLLFADAAILVEGPTERMLIPHFIRRHFNVLNQKYISLLEIGGSHAHTLKPLIESLGLTSLIITDLDSIDRKSKLAKPPLRNKRYITGNDTLRTWVPCRTEIDELFDLKCNEKVKRYQRAGFSIRVAYQYPIKILMVPDGPEVEALPYTFEDALVFENLTLFKSLEGTGLINKFKNAITKKETIAGLGKQFFDDLRKGKKAEFALQLIYLENLKDIKVPKYINEGLAWLEEQLQKKQPDSIIHQNSVDILVEEMVMN

SEQ ID NO: 70141 - protein, 627 aa, Paenibacillus sp. IHB B 3084
MNEIEENKDNCIDNHVDEEISSCLNLKELRSFFLFAGAGSGKTKSLVYALNQIREKYYHQLQHRGQQVSVITYTNAACNEISRRVDYDHLFNISTIHAFIWGLIKGFDADIRDWLYTNLQSQIEDLKLKQEKGRMGTKTFIERQQSIEAKENRIQNIKHIKKFTYNPNGLNQEKASLSHTEVISIGAYFITNKTLMQKILTNQYPILFIDESQDTNKDLINALFEVEQKNIGVFSLGLFGDTMQRIYSDGKVDLGVDLPENWKKPVKKMNHRCPPRIINLLNKIRFTVDGQEQKARTDKEAGFARFFIFPSTAEKGKAEKMVADRMSEITADKEWSSIDANYTSLILEHHMAANRLGFLEFFRPLYQIDRLRTGLLEGTLSDLFLFTQIILPIVEANKIGDKFAIASVVRKHSPLLKIAKNEVGQQLKIKKAQEAINQLLSLWNADVEPRCIDVLQCVEKLKLFNIPDTFYPFVTNSKYDQTNKEDIKEENEYSSMEAWAECLNAPFSQISAYDSYINGKLNFMTHQGVKGLEFPRVLVIIDDSEARGFLFSYEKLFGVKEKTKTDIENESVGKDTSIERTRRLFYVTCSRAEKSLAILAYSENPELVKMHVLNEKWFKEEEVEVFL

SEQ ID NO: 70142 - protein, 653 aa, Aeromonas schubertii
MKIEKIKLQNFRCFGHEVVELNFEEELTILVGGNGSGKTAMLQAVSRLFGTSPAQRSVQRRDFHIPIDRQELQSGDSLFVEAVLSFPELEEQDASPLDAVPEFFNQMAASGEGEPLKARVRLQATWTDDGTPEGAIEEDIRWIRVLDDNFEWDDCSRVQAVERSSIQFIYLPANRDATTQVTALLKGRLWQAAKWSTAFRDASSDNAGQIQSSFEEEEPSKFLLERLSKRWQQVHEADTDTKPRLRLIENRFEELVRKAEFTFTPDEEGQERRLSELSDGQRSLFHIALTAATLESEREAFSLPAEDSSFEQDKLRRIHLTILAIEEPENSLSPFFLSRIIKQAREIGTLPSAQVLLSSHSPAILSRIEPEEVRYFRMDRSARCSSIRELTLPEDGNEANVYVRLAVKAYPELYFARFVILGEGDSERVVIPKIAEEMGVSLDPSFVPVVPLGGRFVEHFWRLLNDLEIPHATLLDLDLGRRHGGANAMRSCLQNLADIGSDWGSRSRASAVQLSDQQLYNEGPQGPWLQAFRREGVFFSYPIDLDFAMLFAFPTAYQVANPGGNGPQSSAAAIQAKKVSTLKTGGNPALYTAHYDDAFKWYPYLFLSRSKPETHLAAFSRIPDGDVSASAPAELRALIEYVMHKLNLPGVGE

SEQ ID NO: 70143 - protein, 297 aa, Aeromonas schubertii
MTFDAFTKGLLDRFRPALPEPFNSPGTYQIVTPFRRDYEDFLERHGYHGVRVQQLEGRLLLTDLPIDLSNGSEVHRALADYWHEQFFGGDEISLSFPMINRLVKLLLQENAYIRRALQATYPIVFLDEYQDTTYAQYDLLQTAFDGSDAVFTAVGDDKQRIMGWAGAMNDAFDQFENDFGARRITLLSNWRSHADLVLIQHEIARRIDGNVEAVQAQGTREIEGEVSAIWQFRNADDENNYLAEWVRREVQSGRVAPHDVAILIRMRADQVEGEIAPAFAARGLRIRNAARSVGEIR

SEQ ID NO: 70144 - protein, 598 aa, Paracoccus sp. MKU1; identical to SEQ ID NO: 62588

SEQ ID NO: 70145 - protein, 608 aa, Paracoccus sp. MKU1; identical to SEQ ID NO: 62589

SEQ ID NO: 70146 - protein, 580 aa, Paracoccus sp. MKU1
MLGFPELDEEEDEDASAVPDFFNHMAASGPDEPLKARMRLIARWIEDGTPDGTVEEDIRWITTLGNEFEWETLPKVSAVDRASIQVVYVPALRNAADRVTELLKGRLWRAALWSADLGARATEGAELIQNQFDQEAPASFIIERLTHRWQQVYEGDTDTTPNLRLIESRIEDLVRRAEFVFHPDEAGRNRILTDLSDGQRSLFHIALTAATLETEQAALALAAAESPFDQEKLRRTHLTILAIEEPENSLSPFFLSRIVTLAREIGEMSTAQALISSHSASILSRIEADEVRYFRLDRQTRRASVRLLTLPEDDVQASTYVRLAVRSYPELYFARFVILAEGDSERVVLPRLAEARGVPLDPSFVPVVPLGGRYVSHFWRLLTDLGIPHATLLDFDLGRTHGGAKMIRTAFAALEEVDRDLTANPLVIDGTISLDDLEDLDDEDVLEDWAENDWLQALRHEAVFFSDPIDLDFAMLEAFPAAYQHPNPGGRGPRTTAEAIAEKKRVVLKTNGNPDIYDGEQWDDSFTWYPYLFLSRSKPETHLAALSRIARRNLARRAPPELRALIDHVRDVLFPEPAED

SEQ ID NO: 70147 - protein, 622 aa, Paracoccus sp. MKU1
MPVAPEDWRPQGVDDLEPRVWDALRETAQSVCVTAGAGAGKTEFLAQKAAYLLQTGLCPAPKRILAISFKRDAAQNLAARVRQRCPADQARRFHSMTFDAFTKHMLDHFRLAIPYAYRPPADYSIAFPSRQDIEVFLRRHGRPDVSADRFERAVARTPLPLEETVENPRARELLRAYWDDQYAMPDGALVSFAMINRVVEYMLRANPRIKRALRLTYPFVFLDEFQDTTYAQYSLVDAAFSESDAVFTAVGDDKQKIMGWAGAMDNAFDEFTADFNAVRHALLRNWRSHGTLVAIQHVIARQIDPDVEEVEARGELAIEGDTAAIWRFDSREQEAEQIARWIRSEVDDGRIAPHDVAILVRMRANNVEDELAPALRAHDLALRNLARNVGEIAIQDLLAEPLTEVLLPLLRLGASVRDPDAWNATQERLQTLAGISPEDEAGQERLQRDIGEFSRNLRQTMRDEPPDPAVADRLFAQALDFAGIERLRQTYPEYRRDADFQRVRNGFQVLLRECVENAADWSGVLDHFEGKDQVPLMTIHKSKGLEFHTMIFFGLDAKTWWSLSPERGEELNSFFVAFTRAKQRAFFAYCSERGNAIDWLEQLLLPAGVEQIDGANIVAADR

SEQ ID NO: 70148 - protein, 674 aa, Candidatus Tenderia electrophaga
MHIQKVTVKNFRLLADVELVLEDQTTLVVGRNNSGKTSLSEAIRRFLVDHNPKFEIEDFSNASYDDFCEALKAKNRGEQDDIVRALLPSIELRLLFRYDPDQLDLGPLSDFIIDLNPDCNEALVVARYELRDGAIDSLFADQRDGDLTDKERLAFFQVLRDRVPALFIARVWAEDPSDPINQKQMTVSALRVLLKTGFVNAQRGLDDDSSRDTDVLAKILEGLFTAAKAPTANEGEQRIAEALQEAVRDIQQSIDRGFKEELRKLMPTLRTFGYPGLDGSELETETTLDVERLLSRHTKVRYAGHHGILLPESYTGLGVRNLIFILLQIVSFYRTFRAETSAPGVHLVFIEEPEAHLHPQMQEVFIRQVSKIAQQLSADEGAPLPWPVQFIVSTHSSHVANAAGFEAIRYFLPTSVDSVRQTKIKDLREGLRKTPEEHRKFLHQYLILTRCDLFFADKAVLIEGTGERLLLPVIIEKLEESEPDVPKLSNQYMTTIEVGGAYAHIFFSLLDFLELRTLIITDLDSVVAAGGGACPVHQGVATSNACLNTWFEGGDCSPAALIAKDDDSKVAGLRRIAYQIPEAQGGPCGRTFEDSFMLANMEMFGIDGDTPDEQAMCAGRKVDNIKKSEFALKYAIDETSWTAPGYILDGLRWLAASGTPETNATTGQAGVDDG

SEQ ID NO: 70149 - protein, 581 aa, Candidatus Tenderia electrophaga
MAEVVGHFNPAKEAGERALTNVYGCLERKESFLVEAGAGAGKTYALVKALHFLIDRYQHTFPQRHQKIACITFTNVAKEEIVARTDRSPLIYCNTIHAFCWSLISGFQRQLRELLPKLRHWSDRISEVGDFGERAVEYELGHRSINDRRVSIHHDDVIVLTITLMDNAKFRRIMREKYPIILIDEYQDTDADWIDSIKSHFLGQEGAPQFGFFGDHWQKIYGDGCGKIEHPSLTVVGVQANFRSVSTIVDCLNRMRPELPQHVVDPNEQGDVHIFHTNTWKGGRQTGGHWGGDLPSEAADRALQMVVDRLAEENWDLSPESTKILMLTHRVLASKQGYHSIPTVFTFNDSFTNKEHPHIAYFTDCLEPACEAYLSRKYGEMFRALGSNVPAVRAQADKKKWSEAMGKLIELRDRGTVGDVVDYLLAVRRPRLPDAVERLERELRELNPEAGEEVPRALKELGDLRAVAYQEIVALCRYLSGHSPFETKHGVKGSEFENVLVVVGRGWNRYNFNEMLELAGQGANIPANKQDSFERNRNLFYVTCSRPKRRLTILFTQQLSNVAMQTVRNWFGNDAIEALNF

SEQ ID NO: 70150 - protein, 689 aa, Salmonella enterica
  subsp. enterica serovar Panama str. SA20030878
MHIHQVNIKNFRLLADVELMLEDQTTVIVGRNNSGKTSLSEIMRRFLADSNATFQLEDFSSVCYEYFERALNLLKQGAEENVIRDLIPAIELRLKLQYDPVRPQFGPLGPFVIDLDPDCTEAQVVIRYELKDGQLAQFFENQPKEPLTQETRIAFFRTLRERVHSNFCMKIWAEDPNDQDNRRELQPGALRSLVKTGFINAQRGLDDVTYRESDILAKTVEGLFATASSASADAADKQIAEALKVAVEDIQTQIDTSFGGQLKSLIPALKTFGYPGLGGQELHTETQLDVRKLLSNFTKVRYAGYGGITLPESYNGLGARNLIFILLQLAGFYKAFRAEVAEPGVHLIFIEEPEAHLHPQMQEVFIRQLAKIAQQLVDSSEDKRPWPVQFVVSTHSSHIANAAGFENIRYFLGVPVPGTLEGIRKTKIKDLRKGLKDIPSEDKKFLHQYMTLTRCDLFFADKAILVEGLSERLMLPVIVAKLEVSEPEGSKLSSQYVTVMEVGGAYAHLFLDMLRFLELRSLIITDLDAVDFPGGKACPVHSGTYSSNACLRAWFSEDDPFTLAGLLVKKDSDKVLKGNRIAYQCAEVENGPCGRTFEDAFILANPKLFGLVEKDANAQEIEARSKAEGWKKSEFALKYSISNTDWISPKYIVDGVRWLASEGMSSPDLALALAKEVSACVVEGEASNV

SEQ ID NO: 70151 - protein, 577 aa, Salmonella enterica
  subsp. enterica serovar Panama str. SA20030878
MFDAQSPAETASQRALESMYACLNTGKSFRLEAGAGAGKTYSLIKALQFLIARNNDAFQKQSQQIACITYTNVAKDEIAARIDRSPLVFCETNHAFCWSLISGFQKLLRTQIEAMPAWKEKIEEIGGTLGQRVIEYNLGHRSIRDHNVSIHHDDVLPLTISLMAHEKFHRIIADRFPIILVDEYQDTNNEWIEAIKTHLLGKPGAPLFGFFGDHWQKIYGGGCGKLEHPCLTEIGKEANFRSVKVIVDSLNRMRPALQQFVKDPDAEGEVRIFHTNSWQGERRKGGHWGGDLPASVSLTTLEHVKTMLAREGWDLSPCHTKILMLTHKLLANQQGYSNLAAIFRYSESFTKKENQHIAFFVDKLEPACDAFAAHKYGMMFEALGGFSPLLRSHADKASWHNAMTQLLAICDTGTVGDVIEHLRTWKKPRLPDTVEKRERELRDFDKTAGFEMPRVLEELEKLHQIAYSEVKTLRHYLDGHSPFETKHGVKGAEFENVLVVVGRGWNQYNFAEMLELAGAQVISAAKEDAYERNRNLFYVACSRPKKRLAILFTQCLSPKALATLERWFGKETIMPAP

SEQ ID NO: 70152 - protein, 689 aa, Salmonella enterica subsp. enterica serovar Weslaco str. 247K; identical to SEQ ID NO: 70150

SEQ ID NO: 70153 - protein, 577 aa, Salmonella enterica subsp. enterica serovar Weslaco str. 247K; identical to SEQ ID NO: 70151

SEQ ID NO: 70154 - protein, 650 aa, Pseudomonas brassicacearum
MKITKISAVNFRALQNVTLELRDSLSLLIGRNNSGKTSLLVLFEKFYEPGVSFNYHDFPLAVRKDLAAIDHKTDMLPLSISMRVEIEYDEKDSLRHLSEFMLDLDSEINNVKILFECVVNKDLLLRDIEQFEGERERFLRKNLDRYLQVNVYAYADEDDLLLENRSKLVKKEIAAVRDLINFQIIHAKRDVASSEGGKKMLSKLTTQYFNKANKDVTDFDPINNLLLKIDESLESSYKDFFEPFLKTSKAFLGIEDIKVVSNLESNEVLENSSQVVYGDRSEFLPETFNGLGHMNILYLLLSVEIKKESFAKTGKNINLLFIEEPEAHTHPQMQYVFANQIKSILNDIENIQAVITTHSSHIVSQCDFKDIRYLQNSDGCTRVKNFYSELKAKYGKDEDSFKFLEQYLTLNSCELFFASKVIFIEGVTERMLWPYFVELFDKSKVQSKDHISLFSQNVTILEVGANAKAFKHFLDFLEIKTLVITDIDTTKKTIDTKKANPRTIYPSFKVAGADHTSNATLKHYYDAPDFSEEAKFSSWFEKLVAHELKHSYPKIHIAYQKKEEGYHARSFEDAFVHLNRDVIKKKIDNINGLKNAHEFDGALDAYDLIETVLDKKSAFASSLLYLALTDDEVTWRIPAYIGEALEWISE

SEQ ID NO: 70155 - protein, 664 aa, Pseudomonas brassicacearum
MDIGMTPFENIISCLERGESFVLQGGAGSGKTETLKKLLDYISKHMPEKRVACITHTNLAADEIKARAGELHAISTIHSFLNGIINSFRIDLHKVIHELFLLPEFKVGQAMDDDKEYKKREHERYKKAYGKYADKAYLILKIKEAKVLGKPMYDKDPQAANTVLNEKIKHLNASVLEHIKKASPQKVCYNETAFDSFRDLSFGHDGLVKLAVSLMCERKKLRKILADKYDYIFVDEYQDTSPDIVKAFLDYVVKDQNIVFGFFGDSMQGIYEDGVGDVENYVQADAIEKINKEDNYRCSEQVVKLINNLRDDGLEQSVAFKTRENGDLETLADRQGRVKLVYAICDDKPTQHSPREDKDSYLKKLNKLIETARGVDSYKMLMLTNKAVASEAGFSQLYEIFNSRFGQATNENLEKVLAICHFSELYELHEDYGNKRYAKVIRFVKKSGFVLDSVFHKDELLVAFKSVFDLNSPAHNAIHESFKLKLLKQSDSYERFVRRREEFFEAAMGNSRYSAFKDQYVSGFDSLSKLNKAGFDVDEYEFGDLERDVKRELFYNDFFGGKITLGEVFKYYDYLSEKTNFITMHKTKGSGIENVLVVADEFFWRDYKFGNVFSAGDITAENRKIMYVACSRAIKNLTCVRIMSTEESSTIKDYFNEIECVSLD

SEQ ID NO: 70156 - protein, 616 aa, Pseudomonas aeruginosa; identical to SEQ ID NO: 66182

SEQ ID NO: 70157 - protein, 549 aa, Pseudomonas aeruginosa; identical to SEQ ID NO: 66183

SEQ ID NO: 70158 - protein, 798 aa, Pseudomonas aeruginosa; identical to SEQ ID NO: 64594

SEQ ID NO: 70159 - protein, 643 aa, Pseudomonas aeruginosa; identical to SEQ ID NO: 64595

SEQ ID NO: 70160 - protein, 798 aa, Pseudomonas aeruginosa; identical to SEQ ID NO: 64594

SEQ ID NO: 70161 - protein, 643 aa, Pseudomonas aeruginosa; identical to SEQ ID NO: 64595

SEQ ID NO: 70162 - protein, 769 aa, Pseudomonas aeruginosa; identical to SEQ ID NO: 63108

SEQ ID NO: 70163 - protein, 648 aa, Pseudomonas aeruginosa; identical to SEQ ID NO: 63109

SEQ ID NO: 70164 - protein, 650 aa, Pseudomonas aeruginosa; identical to SEQ ID NO: 65324

SEQ ID NO: 70165 - protein, 555 aa, Pseudomonas aeruginosa; identical to SEQ ID NO: 66205

SEQ ID NO: 70166 - protein, 643 aa, Pseudomonas aeruginosa
MKLQTIRLSNFQSFGAEPTEIRLEEITYLIGPNGSGKTAALQALCRLFAFDPSLRRILRSDFHVPFNEAAPPAERQLWIEADFLFPELDDDDDEDNSTIAPHFGHMRLDEVDGTPRVRFRLTANMGLDGDIEENMVYVLDINADGSPLTTGQVPRSERNHIHVHYLPARRDPADHIAYGANALLGRMLRSVKWDAERAVIKGLTDQISDSLAANPSINAFSTSLKSAWSALHKGSFFVDPKLTFVASEIEALLRHMSVSFTPGHDEQLVDFSRLSDGQKSMLYLSLVLSSQAIGRAVLAEDDDSFDADKLRPPVFTVVVVEEPENSLSPHYLGRIVNALSEMTRDGDAQALIATHAPSMLRRVAPERIRYLRLTHERTSRVAHIQLPDAAEEAHKFVREAVQAFPEVYFSRLVVLGEGDSEEIVLPRLLQVKGAPIDESAVTIAPLGGRHVNHFWRLLSALQIPYLTLLDLDVARYAAGWGRIKVVNDQLAKFEPAKVLPKDWDLPKWNTKEAPVRTHCHFGEEKKNVFRALERRGIYFSAPMDLDFAMLLAFPEAYGVEREEPDEATIKAVLGKKHHDTSQYSQDEQKLFSTYHQRFKLGSKPAAHIEALAQLTDEELLADMPVSLSRLADTVIAKLAELPE

SEQ ID NO: 70167 - protein, 558 aa, Pseudomonas aeruginosa
MIAVDAWKPADGLILEPNALAAAEERACSLALTAGPGAGKTEMLAQRADFLLRTGTCRYPKRILAISFKVDASSNLKERVKRRCGSELASRFDSYTFHAFAKRIIDRFRPVLTGEYALDVGYKIADRKPGPSRTLIEFSDLVPFAIQILRQSAVARNAIRQTYSDVFLDEFQDCTNLQYELLRIAFQGTRIRLTAVGDTKQKIMGWAGAMDGIFQAFVADFDAAPLNMYRNFRSKPRLLRLQNEIIRKLDPLSVMPDEQLAGDEGEVLAWRFEDSRQEADYLAGLIEGWIKTEQLPPAEIAVLIRNQLDLYADHLMAALEARGIPFRNEQQMQDITVEPAARLIVDYLSCLYGKREPKAWIRLMNQLIPFADEEIQSNARKDLDRLVKQQRKEIAIAELVDEPYSGWWELVRAFLRQVSIETLVSLSPDYESRDRLKEVVRDTQARIEELLKLESDLPKALERFSDDQAVRILTIHKSKGLEFDSVIIMAVENEIFFGDQDENRCAYFVGVSRAKNRLVLTHADQRERPAGHSRRWDVQRTAQNEYFGYATPFCKKEQ

SEQ ID NO: 70168 - protein, 712 aa, Pseudomonas aeruginosa
MHISKLSLVNYRNFSNTKILLQKGINTIIGENGSGKTNLFRAIRLLLDDNMIRSAYRLDSTDFHRGLGRWQGHWIIISLEFEEISADEAVQALFRHGTGGIDDETIGKATYNLIFRPKKEIRLRLSQLDDGDHAGLAAILAPVTLDDYETIFTGRSDADFNDEAFYKEVVGDFENARFNEEIEYPAIGAKIPSVLSVSKEISFTFVQALRDVVSEFHNNRTNPLLSLLKGKSGDIDPVAFQLITDGVKALNDSIEALPDVQVVRTDIRDTIKDAAGEAYSPSSLSIKSDLPDEADKLFQSLKLFVGESGESHEGPIHELSLGGANLIFLTLKLLEFKYQKAKQSIANFLLIEEPEAHIHTHIQKTLFDRLQYDDTQIIYSTHSTHISEVSNVQNVNILGRERDRCEAYQPSTGLSSEEIGNIQRYLDAVRSNLLFAKSVILVEGDAEEILIPILVKKVLGISLDELGISLINIRSTGFQNVAVLFHDDRIRKRCSIVTDLDKSIIDTTPAGGDPEEVLRRKKKYQASQDKGIARKALLDESFKDNPWVSPFFAPHTFEVDFVAAGNANKVVGILPDIYKDAPTIATAKAELESPDIALYGQRVLTMAGNYGKGWFAILLGKKIDPQTAIPSYILDAIAFAHPVVTKEVWFNVLSYRVNYIDAEDLVTASAVFDGFRAKLLAFRKGDLDFVDIRNEMLATFPDDRINDVLKVF

SEQ ID NO: 70169 - protein, 599 aa, Pseudomonas aeruginosa
MFTWDKDDLNPEQEAAILEPGSVFLIACPGSGKTRTLTYKIAYELSRLKSNKQFVVAITYTHRAADEIHERIEGLGVDTSRLWIGTIHSFCLEWILKPYGIYHEALERGYRVIDQHEREKILEALCKPYQKPKITFWDCEFYFTETGYVLSCPQAWKHTGLHAILGQYFEKLQESRQIDFELILYYAYQLIASRPAISVLLGQLFSFVLIDEYQDTKRIQYSIITAILKAGQGATKAFIVGDPNQAIYQSLGGYPIAFEDFKTMAGIDLKKLELSKNYRSSERIIDYFGNYNVHDTCIEAASYDKAYPSLVSFDATVNKTGLEAELIRLIRFNIETVGIAPHEVCVLAPQWTHLASMTRRLCASMPEYSFDGPGMVPFARDTENFWYRLSKIALTQASPGMYVRRLRWAGEILADLEAAGASVSKLTRKSLLRECNAIQVDETDGLTYLSTFFERLFSSLAIDFRLLTTLREHHTAFFDSSQARINRLKSEGSEFIGDIGTFRKVFQSRTGITISTIHGVKGAEFDVVIAYALLEDMVPHFNDPNGQESAMKLLYVIGSRARKNLHLISERGRIRQYSGEEYQITRKLAACNFGYDQVP

SEQ ID NO: 70170 - protein, 777 aa, Pseudomonas aeruginosa
MHLKKLAVRNFRRLRNVVIDLASDISIFVGANNSGKTSVGHALQLFTGGGRFNIHDFSADLWADIVAFGEGDGEASLPTMEIDVWFEIGPDDVHRVIDLLPSLAWEGKLVGMRIAYAPTNPAATHARYIEVRQRVLDAVAKGEDGAPAFDPSPRNLREFLRDRLHDEYELRYFVLDPARFDAKMVAEAGYDPATLTGRDRSGREILKGLLHIDFLNAQRHLSDGPGGSRAEDLSRVLSRFYGRNLEQKGEDIEALRALAASEVSLNEHLERVFEPTLKSLSKLGYPGLSNPRMMIRSALDPAQIMSGRDGAIVHYALGADDGKPDPPTLPDRYNGLGFKNLIFMVVELLDLHAQWLAVEENRPPVHLIFIEEPEAHLHAQLQQAFIRKVMDILALKGEDRTHYTSQVVVTTHSTHILYERGFRPIRYFRRSRAQNVSTSDVLNLSVFYDSTDPDIRSFLERYLKLAHCDLFFADGTVLVEGNVERLLLPQMIANAAPRLQSTYLTVLEIGGAFGYRFKTLIEFLGLTTLIITDLDSVFGPLGQDGEGAAPAGQPEAAEPAAENAQAAGAHAEDIDDDEEDLPAAAEKPGKACIAGHPGAATSNQTLLQWLPKCDAVAALWEATAEQKIQARTDDNDALVRVAYQCRTDVTWGGETLALAGRTLEEAFALENLGWCQDKNRKPLQLRIAKADEKNLTTLAERIHKRVQAKSFSKTDFALALLAEDPSSWSVPTYIAEGLSWLETEIAPPEPDEDLPHEDQPHGEAPQGAPAAANEVAA

SEQ ID NO: 70171 - protein, 625 aa, Pseudomonas aeruginosa
MTSRVGSPDTQADLDVRACLDLTPPRSFVVVAGAGSGKTTSLIKAIAHLAETRGPALRRAGQQIACITYTEVAVGEISADVGASPLFHISTIHSFLWSVIRPFHSDVATWVATRIDEKIAERRAHYDKPRTQAKTKARLEQEIADLEAELTAISEVEKFVYGTGSSYAEGILGHDDILKLTPACVAAHPLLRQLVAKRFPYIFVDESQDTNPEVVEALRHIAGEHPGLCVGFFGDPMQKIYMSGAGAVPLNDGWAEITKPENFRCPTSVLGVINAIRAPGDGLEQVRGRTITVDGIEQPLAGTSNLFILPADAERSARLAAVRQWLATETGDALWLSDVREGDVRLLVLVHRIAANRLGFPNLYAALNDRAPMSLSEGLSDGTAWPLRPLVQHILPLVVAAQAGDRFTVISTLRSECPRLEPARLRGQATAPVLTALQQALDGLVGLLAAGSQATIRDVLTHVRDHELLRLDDRFAMHLVAEPVDDGSSGFENVQAYLACGVDELWAYRRYFTEESPFATHHGVKGAQFERVLVVIDDEEAGFRQYSYGKYLGYVPLSDKDEANLAAGEESVLDRTRRLFYVCCSRAMKDLAVVVFVPEVAAARNAIVAQNLFPEAIIRGAEHLG

SEQ ID NO: 70172 - protein, 712 aa, Pseudomonas aeruginosa
MHVSKLSLVNYRNFANTKLLFQKGINTIIGENGSGKTNLFRAIRLLLDDNMIRSAYRLDSTDFHRGLERWQGHWIIISLEFEEISADEAVQALFLHGTAGIDDEAIGKATYSLIFRPKKEIRLRLSQLDDGDHAGLAAILNAVTLDDYETIFTGRSDADFNDEAFYKEVVGDFENARFNEEIEFPAIGAKIPSVLSVSREISFTFVQALRDVVSEFHNNRTNPLLSLLKGKSGDIDPVAFQAITDGVKALNDSIEALPDVQVVRADIRDTIKDAAGEAYSPSSLSIKSDLPDEADKLFQSLKLFVGESGEGHEGPIHELSLGGANLIFLTLKLLEFKYQKAKQSIANFLLIEEPEAHIHTHIQKTLFDKLQYDDTQIIYSTHSTHISEVSNVQNVNILGKERGRCEAYQPATGLTPEEVGNIQRYLDAVRSNLLFAKSVVLVEGDAEEILIPILIKKVLGVSLDELGISLVNIRSTGFQNVAVLFHDDRIRKRCSIVTDLDKSIIDTTPVAGDSERLLRRKKKYQASQDKGIARKALLDESFKDNPWVSPFFAPHTFEVDFVAAGNARKVVGILPDVYTDAPTIVTAKAELESADIARFGQRALTMADNYGKGWFAILLGKKIDPETAIPEYILDAIAFAHPIVTKEVWFNVLSYRVSYIDENEIFTAPAVFTEFREKLLAFRKGEIDFVSIRNEMLATFPDDRINDVLKVF

SEQ ID NO: 70173 - protein, 599 aa, Pseudomonas aeruginosa; identical to SEQ ID NO: 64599

SEQ ID NO: 70174 - protein, 650 aa, Pseudomonas aeruginosa; identical to SEQ ID NO: 65324

SEQ ID NO: 70175 - protein, 555 aa, Pseudomonas aeruginosa; identical to SEQ ID NO: 65325

SEQ ID NO: 70176 - protein, 650 aa, Pseudomonas aeruginosa; identical to SEQ ID NO: 65324

SEQ ID NO: 70177 - protein, 555 aa, Pseudomonas aeruginosa; identical to SEQ ID NO: 65325

SEQ ID NO: 70178 - protein, 596 aa, Pseudomonas aeruginosa
MHLAELNISNFRKLREAKLCFQAGLNVLVGANNVGKSAVVDALRALLAGHEEPYPRFDVEDRHRPQEGEPEGDIDFHYVFRDLSHDDEADFLAALKPGLGGQMEAHIHVRYSDADMTGRFRVKRWCGDHEDVPLSSDMMENLRGVYLQPLRDASQSLRPSRNSQLSRLLHLFTDGAGREGINEALRDLDEQLKQHAPILNTQAAIVTRHSDMLGDQLAQALAVGLSASDFQRLSSRLSLSVDAFEIEQNGLGFNNLIFMAVVLSELAKNTDATYRGLIVEEPEAHLHPQLQAVLLRYLASLSVVAGEKPVQLFVTSHSTNFASNAKLDCLACLVESEDRVETFFPRKVQFKKGKREKLERYLDVTRAELFFARRVIFVEGAAELMLVDALATKAGFDLRANGVSLISVEGLNFDSFLPLFGENALRIPVALITDADPQAQAEKAEDEGDEGDEGDEEAKRQKTKALYPALGDEVVVSRNTAKMKAQEDRYVKVFHGVKTLEYDLALHEINREAMLTALADPHPKIAKALRKAVEAEEDNTSKARVLFRSMFERRQNNVQKGRFGQALAQVISDGANCEVPDYIRKAIEHVCQVEER

SEQ ID NO: 70179 - protein, 575 aa, Pseudomonas aeruginosa
MDLSAEQQAIVDAPLVPLAVIACAGSGKTATAVRRLVEMRRLLAEDRGRVALLSFSNVAVNTFRRGYQGLAQKLPDSAGRGRVDIDTLDGFITSHILRPHAFRTMGAFQAAFLVTGSEPFLAGFTCKTGNFPIPINQVKVGIQGGEPFFYYDYRGNPELLDQNAAKQVVTRLGRTGAYTHDLGRYWCYQTLRNQPEVLRALVRRYPHVLVDESQDIGTLHQAILELLADTGVQMSLIGDPNQGIYEFAGADGNFLRNYGNRGGVDAYALTRNYRSLPPILNLANNLSGRHDEPNREAEVGTNGAYFIGYSEAELPRLVDAFLAEVASLGLRTEDAAILCRGASLADQLAGVIAPSGRGTVKLFVEAALHRDMHSHFLDAFKAVSRAVISLLENPPKELLTKLISPSQDASLRELRRRLWTFTRDPELGLPSSELAAATEWHRLLLEHVRTLLNGIQQDFGLAPIDRLGNKLARTELPDGPLNGGVDLAGEARPRIRIDTVHQAKGESIDAVLYVATRQHIQAMLDGVQTELGRIGYVAVTRARNLFWLGVPSKALKALRPALLAAGFQEAGKRKV

SEQ ID NO: 70180 - protein, 650 aa, Pseudomonas aeruginosa; identical to SEQ ID NO: 65324

SEQ ID NO: 70181 - protein, 555 aa, Pseudomonas aeruginosa; identical to SEQ ID NO: 65325

SEQ ID NO: 70182 - protein, 650 aa, Pseudomonas aeruginosa; identical to SEQ ID NO: 65324

SEQ ID NO: 70183 - protein, 555 aa, Pseudomonas aeruginosa; identical to SEQ ID NO: 65325

SEQ ID NO: 70184 - protein, 634 aa, Pseudomonas aeruginosa
MKLQTIRLSNFQSFGVQPTELGLDDITYLIGPNGSGKTAALQALCRLFAFDPSLRRILRSDFHVPFDEEIVPEERQLWIEADFLFPELAEDEDNSTVAPHFGHMRLDEADGIPRVRFRLSATMGPVGDIEETLVYVLDINADGSPLNTAQVPRSERNHIHVHYLPARRDPADHIAYGANALLGRMLRAVNWDAERDVIKGLTDQISDSLAANPSVDAFSTSLKAAWDTLHKGSFFTDPKITFVASEVEALLRHMSVSFSPGHDEQLVDFSRLSDGQKSMLYLSLVLSSQAIGRAVLAEEDKSFDVDKLRPPVFTLVAVEEPENSLSPHYLGRIVNSLNLMTGNGDAQALIATHAPSMLRRVAPERIRYLRLTEGRTSRVTHIQLPDTADEAHKFVREAVQAFPEVYFSRLVVLGEGDSEEIVLPRLLQAKGAPVDESAVSIAPLGGRHVNHFWRLLSALKIPYLTLLDLDVARHQAGWGRIKYVNDQLGKYRLDQQLPKDYGIPKWDSTENMVRDFDNYLEALEDRDVYFSYPMDLDFAMLLAYPDAYGVVREKPDESTIKAVLGKSHHDASQYSEDEQKLFGTYHRSFKLGSKPAAHIDALAKLSDEGLLANMPESLGRLADAVIAKLAELPE

SEQ ID NO: 70185 - protein, 558 aa, Pseudomonas aeruginosa; identical to SEQ ID NO: 62801

SEQ ID NO: 70186 - protein, 650 aa, Pseudomonas aeruginosa; identical to SEQ ID NO: 65324

SEQ ID NO: 70187 - protein, 555 aa, Pseudomonas aeruginosa; identical to SEQ ID NO: 65325

SEQ ID NO: 70188 - protein, 650 aa, Pseudomonas aeruginosa; identical to SEQ ID NO: 65324

SEQ ID NO: 70189 - protein, 555 aa, Pseudomonas aeruginosa; identical to SEQ ID NO: 65325

SEQ ID NO: 70190 - protein, 778 aa, Pseudomonas aeruginosa; identical to SEQ ID NO: 63720

SEQ ID NO: 70191 - protein, 625 aa, Pseudomonas aeruginosa
MTSRIGSPDTQADLDVRACLDRMPPRSFVMVAGAGSGKTTSLIKAMAHLAETRGPALRRAGQQIACITYTEVAVGEISADVGASPLFHISTIHSFLWSVIRPFHSDIAAWVAIRIDEKIAERRAHYDKPRTQAKTKARLEQEIADLEADLAAISEVEKFVYGTGSSYAEGILGHDDILKLTPACVAAHPLLRQLVAKRFPYIFVDESQDTNPEVVEALRHIAGEHPGLCVGFFGDPMQKIYMSGAGTVPLNDGWAEITKPENFRCPTSVLGVINAIRAPGDGLEQVRGRTITVDGIEQPVAGTSNLFILPADAERSARLAAIRQWLAAETGDGLWLSDVREGDVRLLVLVHRMAANRLGFPNLYAALNDRAPMSLSEGLSDGTAWPLRPLVQHILPLVVAAQAGDRFTVISTLRSECPRLEPARLRGQATAPVLTALQQALDGLVGLLAAGSQATIRDVLTHVRDNELLRLDDRFAMHLVAEPVDDGSSGFENVQAYLACGVDELWAYRRYFTEESPFATHHGVKGAQFERVLVVIDDEEAGFRQYSYGKYLGYVPLSDKDEANLAAGEESVLDRTRRLFYVCCSRATKDLAVVAFVPDVAAARTAIVAQNLFPEAVIRGAEHLG

SEQ ID NO: 70192 - protein, 634 aa, Pseudomonas aeruginosa; identical to SEQ ID NO: 70184

SEQ ID NO: 70193 - protein, 558 aa, Pseudomonas aeruginosa; identical to SEQ ID NO: 62801

SEQ ID NO: 70194 - protein, 634 aa, Pseudomonas aeruginosa; identical to SEQ ID NO: 65026

SEQ ID NO: 70195 - protein, 557 aa, Pseudomonas aeruginosa; identical to SEQ ID NO: 65027

SEQ ID NO: 70196 - protein, 784 aa, Pseudomonas aeruginosa; identical to SEQ ID NO: 64790

SEQ ID NO: 70197 - protein, 650 aa, Pseudomonas aeruginosa; identical to SEQ ID NO: 64791

SEQ ID NO: 70198 - protein, 616 aa, Pseudomonas aeruginosa; identical to SEQ ID NO: 66182

SEQ ID NO: 70199 - protein, 549 aa, Pseudomonas aeruginosa; identical to SEQ ID NO: 66183

SEQ ID NO: 70200 - protein, 765 aa, Pseudomonas aeruginosa
MRIQHLELANFRKLKSVRIDLAAETTLLVGANNSGKSSAMLALRKFLVKPTTFRLQDLTLCHIATLDAIGREWEQADESFTIPKTNTWADWLPTLDVWIHAAQGELHHIRDLIPNFSWSGGMVGMRFRLEPDDLPMLYSDYRKERTRVAKLLEEIQNQAADGQERPPLQLWPQNLHDYLNRRLVKTFKVRWYRLNPSELSPPNPKTRTAPLQALADTAVPLDRNPLLNLIRVHEINAQRGFGDSADEGQEESKAGSGRKLSEQLRTYYRRHLDPGDSPDVSDLEALRAIEAAQSAFDSRLTSSFAPALREVAGLGYPNNSDPSIKVATRLGPTDGLDHEAAVLFELDSVAGAPGEPRLSLPETSNGLGYQNLISMIFRLMAFRDDWLRKSRTPEERSAANVEPIHLVLVEEPEAHLHVQVQQAFIKHAYHVLCNDPLLEEFPNLRTQLVVSSHSSHVAHEIEYEHLRYFRRLPSGMADIPIPVSTVSNLSTVFGQAGKTKEFVTRYLRAHHADLFFADAVILVEGAAERMILPHFLRQHFKFLDQCYITILDIGGSHAHRLRPLIDALGIATLVITDLDAGKNKAAQPVARGADQVTNNPTVRHWMRGTGLGHDVDTLLDLDDSHKVEEIDDLYSIRIAYQTPVTIRLPKSGAEAEALPNTFEDSLVLSNVQRFTGKPRRGLMRAFSEAIQNADTVQALGVALFEKLRTGDKAEFALEVLGDPDFGQLVVPAYIHEGLTWLQSKLELKRKDLLVVPPAIVEVTEE

SEQ ID NO: 70201 - protein, 623 aa, Pseudomonas aeruginosa
MNPATTEHGDHIRNADEVIRDCLDLDHPQSFFLYAGAGSGKTHSLVTAVSELKSREHKRLTFEGRQVAIITYTNAACEEIARRLEHDPLVVVSTIHAFSWRMIQGFNDDIREWLRIKLAEDIAELNDKLARARGDNKTARANRASLESKTRRLAALGDVINFTYSPTGENRGRQALNHAEVVQMAAAFIQRPPLLDVMADQYPILLIDESQDTYGPLMDAFLTAQSLIPKRFCLGLLGDTMQRIYNDGKEHLEQAIPAHWAIPEKPVNRRCPTRVVELINIIRRAADDHQQTPRPGAIRGAVRMFCTRQVAAGGFELEAQIAQRMSQVTGDEQWAAGTSARKTLILEHKMAGRRLGFEGVFTPLYAAEHLRTSLLDGTLPVLRLFFEGLMPILDAANSSEFALMEAVRLRSPLLDAEHMRVAPNQLALLQQVGAACQTLCGLFSDNDPPLAEIVRVLAETGLLEIPDRLRAALVLGVTDEEPPETVDREALEVHAYRVLLGRHYSEMAAFAGYAQGLSPFDTHQGVKGLEFPRVMVILNDEEAGGFLFSYEKLLGVEPPSANDIKNQRAGKDDALSRTRRLLYVTCSRAEESLAIVVYTAQPELAKQRVIEAGWLEPEEVEIV

SEQ ID NO: 70202 - protein, 778 aa, Pseudomonas aeruginosa; identical to SEQ ID NO: 64580

SEQ ID NO: 70203 - protein, 625 aa, Pseudomonas aeruginosa; identical to SEQ ID NO: 64581

SEQ ID NO: 70204 - protein, 594 aa, Pseudomonas aeruginosa
MRVSRVRLINFANFSDVDVETGESIVIVGENKVGKSNFIRGLQLILDPGLSERDRQLGLEHFWDGLGEDKVGATIEVSVDLTDFTNDPRLMAHLNDCVIDPGPPMVARLTYRFQPKAGLGRAPESLKDYEYVIFGGNDPEMRIGGALRRMLPIDVQVALRDAEKDLASWRNSPLRPLIEDLAASLDDDAREEIQNQVDQAQRELAGHEEVVATAERISERLIAIAGGQHAVPVSLGLAPTRVDALLRSLRLLIDNGVRGVGDASLGTANLIFLALKSLELDRLVSEGERDHTFFVVEEPEAHLHPHVQRLVYRYFLGTRAEDEDEAPPLTTILTTHSPHIASVTPIRSIVLLRHNATDGKTVAVSTANTPFTQRDEDDLQRYIDVTRGEILFSRGVILVEGDAERFIIPAFADALGIPFDILGITVCSVGGANFTPYVKLLGPKGLNIPHVILTDRDPVNGKPPLAHRRLINLLNEVDDEYGYDDLDIDEVLKYAAEFGYFVNESTLESDLFAAGMTEAMKSVIEQELPLRQVTRDALQEWVDDPDQVDEDRLLKLIERIGKGRFAQALAPSVSEDVCPAYIRSALEHIRDAVA

SEQ ID NO: 70205 - protein, 445 aa, Pseudomonas aeruginosa; identical to SEQ ID NO: 64703

SEQ ID NO: 70206 - protein, 798 aa, Pseudomonas aeruginosa; identical to SEQ ID NO: 64594

SEQ ID NO: 70207 - protein, 643 aa, Pseudomonas aeruginosa; identical to SEQ ID NO: 64595

SEQ ID NO: 70208 - protein, 634 aa, Pseudomonas aeruginosa; identical to SEQ ID NO: 63582

SEQ ID NO: 70209 - protein, 558 aa, Pseudomonas aeruginosa; identical to SEQ ID NO: 62801

SEQ ID NO: 70210 - protein, 802 aa, Pseudomonas aeruginosa
MKLQAYRLQNYRRLRDVVIELDDEISIFVGANNSGKTSAVQGLYSMLRGEAKKFELFDFSAALWAEIDAVGRTPPGDEDAPKRLPSILLDLWFRVGEDDLATAMSLLPSTEWDGKCVGIRVAFEPRDAHELVWKFHELHEKANNAAVALAAKRKAAGEQAVEAGAEDAAAVVADAGEYKPWPESLTKYLTRELSKEYTFRYYVLDERAFVGYQAKEADYEPLPLGKEPGGAAILKSLVRVDFLRAQRHLDDPDAGSSDRAESLSRRLSRFYHRNLEKRGDDHAALKALDTSEKELNFHLKEVFNDTLTRLAKLGYPGVNNPEIVIRAALDPTTVLGQDAKVHYVIPGVASAQLPDSYNGLGFKNLVYMVVELLDLHEQWKAEEDKRAPLHLVFIEEPEAHLHAQIQQVFIRNVLRLLEDANDHATLFHTQLVITTHSPHILYERGFSPIRYFRRVSDQLGHHTDVRNLSLFKTDASDAPAREFLQRYLKLTHCDLFFSDAVILVEGNVERLLLPAMIELVAKRLRSSALTILEVGGAFAHRFQELIAFVGLTTLVITDLDSVTVKTDAEKAAAQGAGADDGDDEDDDLKPFELEDDDEAEPGGKKKSKKRGSTCHAHVEGAVTSNQTLISWIPKKRSMAELWEVTAKQKTLSLAEDSSAEVRVAYQTKVSVTVGATTSLLCGRTLEEAFGLENADWCQAEANRSVGLKLKRAPSSPEELAEKLHDRVVGKNFDKTRFALEVLASGPLNGWKVPAYIAEGLTWLEAKVAHELEADAAIATEVATIEPTTADVVAIIVDPGQTA

SEQ ID NO: 70211 - protein, 641 aa, Pseudomonas aeruginosa
MSRRIDSPDTDADREIHACIVATPPQPFVVRAGAGSGKTTSLIKALDWVISEHGASMRARKQKVACITYTDLATNEILADVNDDPLVHVSTIHSFYWSIATTFQADIKVWLQNDIRRRISELEEEFENYSSRVRQTTRDRNKADQERYARSLEAVASVRTFNYGVGSDYAKGILGHEDILQLADFLLQNRPLFRRVVALSYPFVFIDESQDTFPGVVKSFKEVEAQMQGKFCLGFFGDPMQSIFMRGAGDIQLEDHWRAITKPENFRCAKQILDVANAVRAQGDGMEQVRGLHEKVDGNLKLVEGSARMFVLPNTLNRTEALARVRAWSSATNNDEGWTTPDIAVKILVIVHRMAANRLGFGGIYSALNDKTSDAMKQGMQDGTGWPVRPFLSFVLPIIAAVKAGNEFAAMSLLREFSPRLAPAALTGRRAADVLRELHAAVSRLVAMLDEAGTTIGDIALHLSNTGLFEFDERYARVLGFVRDIADTIQEPEAADAVPAEGLSSDAAMAKFFHCSAQELWPYERYVSEGSPYATQHGVKGAQFERVMVVMDEEESDYRTYNYERVFASAEARAADRARALDGDENTWSRTLRLLYVCCTRAQRGLVLAFFVADPATTLENVVASGILPRSAVFTQDVLVG

SEQ ID NO: 70212 - protein, 769 aa, Pseudomonas aeruginosa; identical to SEQ ID NO: 63108

SEQ ID NO: 70213 - protein, 648 aa, Pseudomonas aeruginosa; identical to SEQ ID NO: 63109

SEQ ID NO: 70214 - protein, 712 aa, Pseudomonas aeruginosa; identical to SEQ ID NO: 70172

SEQ ID NO: 70215 - protein, 599 aa, Pseudomonas aeruginosa; identical to SEQ ID NO: 64599

SEQ ID NO: 70216 - protein, 634 aa, Pseudomonas aeruginosa; identical to SEQ ID NO: 63582

SEQ ID NO: 70217 - protein, 558 aa, Pseudomonas aeruginosa; identical to SEQ ID NO: 62801

SEQ ID NO: 70218 - protein, 650 aa, Pseudomonas aeruginosa; identical to SEQ ID NO: 65324

SEQ ID NO: 70219 - protein, 555 aa, Pseudomonas aeruginosa; identical to SEQ ID NO: 65325

SEQ ID NO: 70220 - protein, 634 aa, Pseudomonas aeruginosa; identical to SEQ ID NO: 70184

SEQ ID NO: 70221 - protein, 558 aa, Pseudomonas aeruginosa; identical to SEQ ID NO: 62801

SEQ ID NO: 70222 - protein, 712 aa, Pseudomonas aeruginosa; identical to SEQ ID NO: 70172

SEQ ID NO: 70223 - protein, 599 aa, Pseudomonas aeruginosa; identical to SEQ ID NO: 64599

SEQ ID NO: 70224 - protein, 634 aa, Pseudomonas aeruginosa; identical to SEQ ID NO: 63582

SEQ ID NO: 70225 - protein, 558 aa, Pseudomonas aeruginosa; identical to SEQ ID NO: 62801

SEQ ID NO: 70226 - protein, 616 aa, Pseudomonas aeruginosa; identical to SEQ ID NO: 66182

SEQ ID NO: 70227 - protein, 549 aa, Pseudomonas aeruginosa; identical to SEQ ID NO: 66183

SEQ ID NO: 70228 - protein, 535 aa, Pseudomonas aeruginosa
MAGHEESYPRFSVDDRHRPKVGQPDGDITFHYVFRGLDANDEADFLAALQPGNDGKLEAHVWIRYSDADKGGRFRIKRWCGAHEDVGLTSDMMENLRGVYLQPLRDASQGLRPSRNSQLSRLLQLLADEAGRAGINEALRRLDDELKAHAPIVRTQDAISTRHSSMLGKQLAQLLEVGLSASDFQRLSSRLSLTVDSFEIEQNGLGFNNLIFMAVVLSELAKNPEATYRGLVVEEPEAHLHPQLQAVLLRYLESIQIIDGEKPVQLFVTSHSPNFASIANLDCLTCLVETGEGVETFFPRTIKFGKGKREKLERYLDVTRAELFFARRVIFVEGAAELMLIDALATKAGHNLREHGVSLISVEGLNFDSFLPLFGEQALKIPTALITDADPVAEAADGEEPEALYPGADDVVQVSDNTAKMKALEDKFVQVRHGVKTLEYDLALYADNRDAMLKALAEMHPKIAVAVKAAVDAAGSDAEKARALFSGMFERPQNNVQKGRFGQELAQVLKDGAACVVPAYIREAIEHVCQVRVAP

SEQ ID NO: 70229 - protein, 578 aa, Pseudomonas aeruginosa; identical to SEQ ID NO: 65391

SEQ ID NO: 70230 - protein, 778 aa, Pseudomonas aeruginosa; identical to SEQ ID NO: 64580

SEQ ID NO: 70231 - protein, 625 aa, Pseudomonas aeruginosa; identical to SEQ ID NO: 64581

SEQ ID NO: 70232 - protein, 594 aa, Pseudomonas aeruginosa; identical to SEQ ID NO: 62698

SEQ ID NO: 70233 - protein, 445 aa, Pseudomonas aeruginosa; identical to SEQ ID NO: 64703

SEQ ID NO: 70234 - protein, 634 aa, Pseudomonas aeruginosa; identical to SEQ ID NO: 63582

SEQ ID NO: 70235 - protein, 558 aa, Pseudomonas aeruginosa; identical to SEQ ID NO: 62801

SEQ ID NO: 70236 - protein, 650 aa, Pseudomonas aeruginosa; identical to SEQ ID NO: 65324

SEQ ID NO: 70237 - protein, 555 aa, Pseudomonas aeruginosa; identical to SEQ ID NO: 65325

SEQ ID NO: 70238 - protein, 650 aa, Pseudomonas aeruginosa; identical to SEQ ID NO: 65324

SEQ ID NO: 70239 - protein, 555 aa, Pseudomonas aeruginosa; identical to SEQ ID NO: 65325

SEQ ID NO: 70240 - protein, 634 aa, Pseudomonas aeruginosa; identical to SEQ ID NO: 63582

SEQ ID NO: 70241 - protein, 558 aa, Pseudomonas aeruginosa; identical to SEQ ID NO: 62801

SEQ ID NO: 70242 - protein, 807 aa, Pseudomonas aeruginosa; identical to SEQ ID NO: 62542

SEQ ID NO: 70243 - protein, 643 aa, Pseudomonas aeruginosa; identical to SEQ ID NO: 62543

SEQ ID NO: 70244 - protein, 616 aa, Pseudomonas aeruginosa; identical to SEQ ID NO: 66182

SEQ ID NO: 70245 - protein, 549 aa, Pseudomonas aeruginosa; identical to SEQ ID NO: 66183

SEQ ID NO: 70246 - protein, 594 aa, Pseudomonas aeruginosa; identical to SEQ ID NO: 62698

SEQ ID NO: 70247 - protein, 445 aa, Pseudomonas aeruginosa; identical to SEQ ID NO: 64703

SEQ ID NO: 70248 - protein, 807 aa, Pseudomonas aeruginosa; identical to SEQ ID NO: 62542

SEQ ID NO: 70249 - protein, 643 aa, Pseudomonas aeruginosa; identical to SEQ ID NO: 62543

SEQ ID NO: 70250 - protein, 581 aa, Pseudomonas aeruginosa
MYLAELNIRNFRKLKAAKLCFQAGLNVLVGANNVGKTAVVDALRALLAGHEESYPRFSVDDRHRPKVGQPDGDISFHYVFRDLDADDEADFLAALQPGNEGKLEAHIWIRYSDADKGGRFRIKRWCGSHEDVGLTSDMMENLRGVYLQPLRDASQSLRPSRNSQLSRLLQLLADEAGRAGINDALKRLDDELKAHAPIVRTQDAISTRHSSMLGKQLAQILEVGLSASDFQRLSSRLSLSVDSFEIEQNGLGFNNLIFMAVVLSELAKNPEATYRGLVVEEPEAHLHPQLQAVLLRYLESIQIIAGEKPVQLFVTSHSPNFASIANLDCLTCLVETDEGVETFFPRTIKFGKGKREKLERYLDVTRAELFFARRVIFVEGAAELMLIDALATKAGHNLREHGVSLISVEGLNFDSFLPLFGEQALKIPTALITDADPVAEAAEGEEPETLYPGADDVVQVSDNTAKMKALEDKFVQVRHGVKTLEYDLALYADNRDAMLKALAEMHPKIAVAVKAAVDAAGSDAEKARALFSGMFERPQNNVQKGRFGQELAQVLKDGAACVVPAYIREAIEHVCQVRVAP

SEQ ID NO: 70251 - protein, 576 aa, Pseudomonas aeruginosa
MNELSPEQRAIVDAPMAPLAVIACAGSGKTGTAVHRVVEMRRRLGEERGRVALLSFSNVAVETFRKGYQSLAQVLPAGAGRSRVDIDTLDGFITANVLRPHAYRTMGATQSAFLVIGSEPFLNGFTYWTGQYPLPVTKIQVAFHEGAPIFYYDVFGKPELLNQAVARKLVDRLGRVGAYTHDFGRYWVYRTMQEQPAILRALARRYPHIVVDESQDIGTAHQAILDLLAGAGVQISLIGDPNQGIYEFAGADGTFLKGYHARAGVAAFALTRNYRSLPSILDLANRISGRGDTPGREAGEEGGGAYFIGYAKAELPQLMDAFHAEVANLGLRPEKSAVICRARAQADELAGVDAPAGQGVVKGFASAAVLRDKQRDYHSAFKLVASCIVALLDSPPDGLLSKLAKPAHFPEVKGLHRLLWAFTRNAGVGLPSSELVAAKEWHAALLERIRNLLDRVQADFGFRPVGNLGRKLAKRGLPETPLALAEDLAADRGTRIRVDTVHQVKGESIDAVLYVATKEHVLAMLDGVGTELGRIGYVAITRARNLLWIGVPANALKELRPALLAAGLQEAGAIAT

SEQ ID NO: 70252 - protein, 623 aa, Pseudomonas aeruginosa; identical to SEQ ID NO: 65246

SEQ ID NO: 70253 - protein, 551 aa, Pseudomonas aeruginosa
MALGGPGAGKTHVALVKARDEIRSGLLKPGQKILFLSFARPTVARIIEKASELISREDLKQLEVSTYHGFAWSILRSHAYLLNGRPSLQLLPPPEAAAHLADIDKAQHENEKRRLFEHEGRLHFDLFASLVSELLSRSDRLSAIFSDAYPVIILDEFQDTNCDEWALIQQLGKRSRLIALADPEQRIYEFRGADPRRVGDFLEIFGAAHFDFAGENHRSSGTDITTYGNDLLTGANKGKVYQQVKISRYGFMHGKSLHFNAKAAVLSALDRLKAIPDKSIAILVPSKRLMLELSDYLSSAADGLPELHHDVAMDAEPPALAAGVIATLLEGGTAGDVASRMLNALHSHIRGRRGGKPTPQSELDLAGALSGFLSSGKIRGAKRQLIVSEVQRIAELRQQLQLTGDPAEDWLQLRGLLQASAAVALKQVATDARYLRLLHRGSVLRANLGALWRAQGEYKGAEEAVRSALMQEHFAAGQKDWRGIHLMTIHKSKGKEFDEVIIYDGLFQRIAKAPQDPKICAQDLLVLRVGVTRAIRRTTILTPKRDTCPFL

SEQ ID NO: 70254 - protein, 650 aa, Pseudomonas aeruginosa; identical to SEQ ID NO: 65324

SEQ ID NO: 70255 - protein, 555 aa, Pseudomonas aeruginosa; identical to SEQ ID NO: 66205

SEQ ID NO: 70256 - protein, 650 aa, Pseudomonas aeruginosa; identical to SEQ ID NO: 65324

SEQ ID NO: 70257 - protein, 555 aa, Pseudomonas aeruginosa; identical to SEQ ID NO: 66205

SEQ ID NO: 70258 - protein, 623 aa, Pseudomonas aeruginosa; identical to SEQ ID NO: 65246

SEQ ID NO: 70259 - protein, 551 aa, Pseudomonas aeruginosa; identical to SEQ ID NO: 70253

SEQ ID NO: 70260 - protein, 689 aa, Pseudomonas aeruginosa; identical to SEQ ID NO: 64680

SEQ ID NO: 70261 - protein, 579 aa, Pseudomonas aeruginosa; identical to SEQ ID NO: 62643

SEQ ID NO: 70262 - protein, 634 aa, Pseudomonas aeruginosa
MKLQTLRLSSFQSYGPVPTDVGLEAITYLIGPNGSGKTAALQALCRLFAFDPSQRRIQRSDFHVPADEKDFPGERQLWIEVDFLFPELASDGDNSTVAPHFGHMRLDEPDGIPRVRFRLSAAMGPEGDIEETFVYVLDVNPDGSPLTTAQVPRAERNHIHVHYLPARRDPAAHIAYGANALLGRILRAVQWEEERDVIRGLTDGISNSLAANPSVNAFSVHLQKSWTSLHKGSFFADPKITFVASEIEALLRHMSVSFTPGHDENLVDFSRLSDGQKSMLYLSLVLSSQAIGRAVLAEQDKSFDPDKLRPPVFTLIAVEEPENSLSPHYLGRIVSALNAMTSQGDAQALIATHAPSMLRRVEPEHIRYLRLTEERQTRVTCIQLPEKTDEAHKFVREAVQAFPEVYFSRLIVLGEGDSEEIVLPRLLRAKGAPIDESAIAIAPLGGRHVNHFWRLLEALQIPYLTLLDLDVARHQAGWGRFKYVNDQLRAFRADKVLPEGHGIPKWNSDEHKVRDYPSYLGAFEERGIYFSDPLDLDFAMLLAYPDAYGVELEAPDAGAIKAVLGKSHHGSSQYSEDELKLFGTYHQHFKLGSKPAAHISALAQLSDQELLKDMPASLSRLADAVIAKLAELPE

SEQ ID NO: 70263 - protein, 557 aa, Pseudomonas aeruginosa
MIAVDAWQPADGLTLEPNAKLAAKEQEHCLALTAGPGAGKTEMLAQRADFLLRTGTCRYPKRILAISFKVDASKNLKERVQRRCGSDLGSRFDSFTFHAFAKRVIDRFRPVLTGNDALDAGYTIIDRKVGFSRTQIAFGDLVPLAIKILQTSKVARNAIRQTYSDVFLDEFQDCTNLQYDLIKLAFQDTSIRLTAVGDTKQKIMGWAGALDGIFEAFAADFAAVPLNMYRNFRSQPRLLRVQNEIIRVLDPASAMPDEQLAGDGGEVFAWQFEDSRKEAECLADLIANWIRVEQLPPSEIAVLVSKQLELYADHLMAALEVRGIPFRNEQQMQDITVEPAARLIVDYLSCLYGQREPKAWVRLMNQLIPFADDEIQSSTRKDLDRLIKQQRKAAVVAELLDVPFSGWWESVRAFLKQVSIETLVALSPDYESLNRLKEVVRDTRMRIEELLKIEPDLLKALERFADDQAVRIMTMHKSKGLEFDSVILLGIENQTFWGKADEERCAFFVGVSRAKRRLVMTVCERRETPPAKPYKWREQRVPHAEFLSYTTPFLSNA

SEQ ID NO: 70264 - protein, 634 aa, Pseudomonas aeruginosa; identical to SEQ ID NO: 63582

SEQ ID NO: 70265 - protein, 558 aa, Pseudomonas aeruginosa; identical to SEQ ID NO: 62801

SEQ ID NO: 70266 - protein, 712 aa, Pseudomonas aeruginosa; identical to SEQ ID NO: 70172

SEQ ID NO: 70267 - protein, 599 aa, Pseudomonas aeruginosa; identical to SEQ ID NO: 64599

SEQ ID NO: 70268 - protein, 634 aa, Pseudomonas aeruginosa
MYLAELGIKNFRKLRDAKLEFQPGLNVLVGPNNVGKSAVVDALRTLLAGHEEPYPRLDISDRHRPHEGEPGGDISFHFVFKDLSHEDEADFIAALKPCPDKTMEAHIHVQYTDPEQTGRLRVKRWCGDHQDIALTSDMMENLRGVYLQPLRDAARGLRPSRNSQLARLLHLLTDEPGREAINAALKALDEQLQENEAIKSTHAAISTRHASMMGEQLAQVLSVGLSATDFQRLSARLSLTAESMEIEQNGLGFNNLIFMAVVLSELAKNPDAAYRSLIVEEPEAHLHPQLQRVLLSYLAGIPTKEGEKPVQLFVTSHSPNFASNSKLEALVCLVENEAGVETFFPRDIQFAKGKREKLERYLDVTRAELFFARRVIFVEGAAELILVDALARLMGFDLREYGVSLISVEGLNFDSFLPLFGEKGLRIPVAVVTDADPFEAEEILEEAVADLTDAQLEEELLDEAAFLDEVDAQDEDDAEELPQEEADADPKKKKRVKRKAAYPSLGEKIRVSSNTLKMKSSEDKYVKVYHGVKTLEYDLALLEENRGAMLDALADLHPRISKALREIVNRAPDNTAKAKALFCGMFERKDSSSNVQKGSFGQALAEQIAKVPGCKVPEYLEQAIRHVCQGADKP

SEQ ID NO: 70269 - protein, 573 aa, Pseudomonas aeruginosa
MKLSEEQKAVVNAPLQPMAVTACAGSGKTETAIRRLISIRQKLEDHRGRVVLLSFSNVAVNTFNKGYAKLASDLPDGAIRKRVEVDTLDGFFTQHVLRPHAYRTMGANQAAYLVSGSEPFLNGFQYWKDEKGQRPIPVKDLQVSFVNGDLVFSSDSYGKVETLDSKKAIEVIEKLGRTGAYTHDLGRYWVCRTLIDQPAILRALATRYPQILVDESQDLGTMHQVLLELLMDAGVQVSLIGDVNQGIYAFAGADGTFLEAFASRQGVKGYNLTRNYRSLPSIIDIANQLCGRNDESDRQPQQGGAFFVGYKDAELPQLVDSFKAHLNGLGMQDIDAVILSRGSDRAAKLSGKTAAPGQGTVAMFAEASLMRDQERRFQDAFRLVCKAVVGLTENAPPGLSSALQGTPQDEWMLALRRMLWTFTRNEETGLPLSSLEAKVKWHPQLLKNLRDLLAKIEKEFGLRTVETFGQRMAKRGLEDTALAGAEAAEQTGPGIRVETVHQVKGESIGAVLYVATKANINALLEGTGTEEGRIGYVALTRAKNLFWLAVPNSCLGAMRGRLIKAGFAELLAQ

SEQ ID NO: 70270 - protein, 763 aa, Pseudomonas aeruginosa; identical to SEQ ID NO: 64796

SEQ ID NO: 70271 - protein, 636 aa, Pseudomonas aeruginosa; identical to SEQ ID NO: 64797

SEQ ID NO: 70272 - protein, 640 aa, Pseudomonas aeruginosa
MRLCSLFVSNFQSFGPAMEEVSFEDVTYLLGPNGAGKTAALQALCRMFSVDPSLRRIRRSDFHVPVAEAEQPEQRQLWLEADFTFDETLDDEDNDTVPPFFGQMAMRKAGESPRVRFRLEATMYEDGEIEEQFLFVTKTDENDDPVSKQAVPKRHRDTIHLHYLPARRDPSDHVAYGATALLGRLLRAANWNDDRETVRELTEQITDCLVENESVKTLSDSLTSAWQRLHKGDFFASPRLTFENSEIEALLRHLTVSFSPGHGENQVDFARLSDGQKSMLYLSLVLSALTIGREVRSGENKAFDPHKLKPPAFTILAVEEPENSLSPHYLGRIVNSLKSSVDLDAQALIATQAPSMLRRVEPENIRYLRLNGDRCTQVTTIQLPPRLTDAYKFVREAVQAFPEVYFARLVVLGEGDSEEIVLPRILQAKGAPVDEFAVAIAPLGGRHVNHFWRLLSAIGTPYITLLDLDVGRHQGGWGRVKYVRDQLDQFAPQDSLPAGWTYHEWNDPQTPVRTHYWFEGGKVSLFNELEKRNVFFSNPLDLDFAMLCAFPDAYEAEAIPATLKCHTKVLGDSHFNPDQYDEEEQGWFEAYHKLFKLSSKPAAHLGALGRLTDQELLDGLPDSLDRLADKVIERLDESPE

SEQ ID NO: 70273 - protein, 556 aa, Pseudomonas aeruginosa
MIKPERWVPSPGIRLETNAWEAIRERERSVVLTAGPGAGKTEVLAQRADFLLRTNACRYPKRILAVSFKTDASRNLKQRVQLRCGWDYASRFDSVTFHGFAKRIIDRFHPVLVDEALSQDYEIGPEYIRGQQITFGHLLPFALRIVKESAIARNAIRQSYTHVFLDEFQDCTADQYELIKLLFHGTPAILTAVGDTKQTIMGWAGALEGIFKTYADDFDARALRLFLNFRSQPALLRMQNDVIREIEAEAVMPDDLAKGEGGEILAGHFRNAAEEAEAIANLIQRWITQDGIPPSEIAVLMPRQVEEYGEFLMLRLTDLGIAHRNDHDLQDLLKEPAVSLVVDYLTCLYGQGEAEAWSRLMDHFTPFEEDDSQSSAQRIFEETYRAHLKKVKQERKTANPYESWWDMANEFLKKLGLSSVSALSADYRSKARLLEVVREVRDRIRALLAIEPDLLRALARLSDDSAVRFLTMHKSKGLEFHSVVVLGVEKQTFWGQLDQERCVFFVGVSRAKHSLVLTTADYRPRPKSVRRWDEHRAPHAEFVSHVVRHLTSQHFK

SEQ ID NO: 70274 - protein, 712 aa, Pseudomonas aeruginosa; identical to SEQ ID NO: 64604

SEQ ID NO: 70275 - protein, 598 aa, Pseudomonas aeruginosa; identical to SEQ ID NO: 64605

SEQ ID NO: 70276 - protein, 634 aa, Pseudomonas aeruginosa; identical to SEQ ID NO: 63582

SEQ ID NO: 70277 - protein, 558 aa, Pseudomonas aeruginosa; identical to SEQ ID NO: 62801

SEQ ID NO: 70278 - protein, 634 aa, Pseudomonas aeruginosa; identical to SEQ ID NO: 63582

SEQ ID NO: 70279 - protein, 558 aa, Pseudomonas aeruginosa; identical to SEQ ID NO: 62801

SEQ ID NO: 70280 - protein, 634 aa, Pseudomonas aeruginosa
MKLQTLRLSNFQSYGPGPTEVGLEAITYLIGPNGSGKTAALQALCRLFAFDPSLRRILRSDFHVPINEKDIPEERQLWVEADFLFPELAKDEDNSTVAPHFGHMRLDEPEGTPRVRFRLSAAMGPDGDIEETFVYVLDVNPDGSPLTTAQVPRAERNHIHVHYLPARRDPADHIAYGANALLGRILRAVQWDKEREAIRGLTDDISDSLAANPSVNAFSEHLQSAWASLHKGSFFADPKITFVASEIEALLRHMSVSFTPGHGENLVDFSRLSDGQKSMLYLSLVLSSQAIGRVVLADQDKSFDPDKLRPPVFTLVAVEEPENSLSPHYLGRIVSALNAMTSQGDAQAFIATHAPSMLRRVEPEHIRYLRLTEERQTRVTRIQLPEKTDEAHKFVREAVQAFPEVYFSRLIVLGEGDSEEIVLPRLLRAKGAPIDESAIAIAPLGGRHVNHFWRLLEALQIPYLTLLDLDVARHQAGWGRFKYVNDQLRAFRADKVLPEDHGIPKWNSDEHKVRDYPGYLGAFEERGIYFSDPLDLDFAMLLAYPDAYGVELEAPDAGAIEAVLGKSHHGSSQYSEDELKLFGTYHQHFKLGSKPAAHISALAQLSDQELLKDMPASLSRLADAVIAKLTELPE

SEQ ID NO: 70281 - protein, 557 aa, Pseudomonas aeruginosa
MIAVDAWQPADGLTLEPNAKLAAKEQEHCLALTAGPGAGKTEMLAQRADFLLRTGTCRYPKRILAISFKVDASKNLKERVQRRCGSDLASRFDSFTFHAFAKRVIDRFRPVLTGNDALDAGYTIIDRKVGFSRTQIAFGDLVPLAIKILQTSKVARNAIRQTYSDVFLDEFQDCTNLQYDLIKLAFQDTSIRLTAVGDTKQKIMGWAGALDGIFEAFAADFAAVPLNMYRNFRSQPRLLRVQNEIIRVLDPASAMPDEQLAGDGGEVFAWQFEDSRKEAACLADLIANWIRVEQLPPSEIAVLVSKQLELYADHLMAALEVRGIPFRNEQQMQDITVEPAARLIVDYLSCLYGQREPNAWVRLMNQLIPFADDEIQSSTRKDLDRLIKQQRKAAVVAELLDVPFSGWWESVRAFLKQISIETMVALSPDYESHDRLKEVIRDTRMRIEELLKIEPDLLKALERFADDQAVRIMTMHKSKGLEFDSVILLGIENQTFWGKADEERCAFFVGVSRAKRRLVMTVCERRETPPTKPYRWREQRVPHAEFLRYTTPFLSNA

SEQ ID NO: 70282 - protein, 711 aa, Pseudomonas aeruginosa
MHISRLQLVNYRNFKCANVVFNKGVNTIIGENGSGKTNLFRALRLLLDDTLLRAAYRLDEKDFHRGLGDWRGHWIVISLEFDEVSQDEAIQSLFLHGTGNIANAAIGKATYNLIFRPKAAVRRTLADLAAGDMVGLAEARSKITILDYETIFTGKSTANFLDPETYKQLAGDFDAVIFPQELTNPAIGGVIPGMLSISREVCFTFVQALRDVVSDFQNNRTNPLLTLLKCRSGEIDPQSFEPITALVKGLNDAIEGLPDVGTIRTDIRDTITDAAGETYSPRSLSIRSDLSDEADRLFQSLKLFVGESEEEYEGAIHELSLGGANLIYLTLKLLEFKYQKQKESFANFLVIEEPEAHIHTHIQKTLFDRLSFDDTQIIYSTHSTHISEVNNVLNINILGRHHGRCEVFQPSAGLDAGQIGNIQRYLDAVRSNLLFAKSVVLVEGDAEEILIPILVKKVFGLSLDELGISLINIRSTGFENVAVLFHNERIRKRCAIITDLDRAFIDTTKDILDSDDKAAAKKKALGAQIAGLQREAALKVLCDGNPWLTAHFADHTFEVDFVSAGNVGTVVSVLGDVYKDGGTIATSKMELESGDITRFGTRVLTMARYAGKGWFAIILGRMITPETVIPDYILDAIFQAHLPVSIHTWARVLDYRVSVLAESQLHAAVDIDAMRAQIRRYYSGEIDFAGVRAEMLQAFPADGINTILAGF

SEQ ID NO: 70283 - protein, 598 aa, Pseudomonas aeruginosa
MFVWDRKDLNDAQVAAIEHPGSVFLVACPGSGKTRTLTYKIARLLSELKSDKKRVVAITYTHRAADEIHERIEQLGVDTSQLWIGTIHSFCLEWILKPYGIYHSALKLGFRVINAHDTELMLEEFCSAVQGTKLSSFDCAYYFAPNGYVLTCNKTDKHQAIEGVLQAYWKALDAERQVDFELILFYAYQLIEKNPSISVLLGSIFECVLLDEFQDTREIQYAILASILKASKGGASAFVVGDPNQAIYGSLGGYAITAADFGRQCGIAFKEMELSDNYRSSSRIVSYFGNYNVFPSKVEAVGKDKDYASVVSFDHQTHRDALEEELVRLIKFNVETLGIAQHEVCIVAPWWVHLASMTRRLVAALPTYSFDGPGMVPFARDIDNFWYKLARIILTEASPQLYVRRMRWAGEVIAGLSDAGVEVPDLDRKTLLRACNAITITETDGLVYLRAFFDQLCSTFEIDRRSCAALQEHHDAFFECSQKRIDKLIKEGAEAIAELAMFRKVFANRTGVTVSTIHGVKGAEYDAVIAYGLLEGMVPHFSDPNQAETAKKLMYVVSSRARKNLHLISERGRSRGWSGDYQPTGVLAGCAFRYDQFS

SEQ ID NO: 70284 - protein, 689 aa, Pseudomonas aeruginosa; identical to SEQ ID NO: 64680

SEQ ID NO: 70285 - protein, 579 aa, Pseudomonas aeruginosa; identical to SEQ ID NO: 62643

SEQ ID NO: 70286 - protein, 634 aa, Pseudomonas aeruginosa; identical to SEQ ID NO: 63582

SEQ ID NO: 70287 - protein, 558 aa, Pseudomonas aeruginosa; identical to SEQ ID NO: 62801

SEQ ID NO: 70288 - protein, 634 aa, Pseudomonas aeruginosa; identical to SEQ ID NO: 63582

SEQ ID NO: 70289 - protein, 558 aa, Pseudomonas aeruginosa; identical to SEQ ID NO: 62801

SEQ ID NO: 70290 - protein, 650 aa, Pseudomonas aeruginosa; identical to SEQ ID NO: 65324

SEQ ID NO: 70291 - protein, 555 aa, Pseudomonas aeruginosa; identical to SEQ ID NO: 66205

SEQ ID NO: 70292 - protein, 634 aa, Pseudomonas aeruginosa; identical to SEQ ID NO: 63582

SEQ ID NO: 70293 - protein, 558 aa, Pseudomonas aeruginosa; identical to SEQ ID NO: 62801

SEQ ID NO: 70294 - protein, 689 aa, Pseudomonas aeruginosa; identical to SEQ ID NO: 64680

SEQ ID NO: 70295 - protein, 579 aa, Pseudomonas aeruginosa; identical to SEQ ID NO: 62643

SEQ ID NO: 70296 - protein, 634 aa, Pseudomonas aeruginosa; identical to SEQ ID NO: 63582

SEQ ID NO: 70297 - protein, 558 aa, Pseudomonas aeruginosa; identical to SEQ ID NO: 62801

SEQ ID NO: 70298 - protein, 634 aa, Pseudomonas aeruginosa; identical to SEQ ID NO: 63582

SEQ ID NO: 70299 - protein, 558 aa, Pseudomonas aeruginosa; identical to SEQ ID NO: 62801

SEQ ID NO: 70300 - protein, 634 aa, Pseudomonas aeruginosa; identical to SEQ ID NO: 63582

SEQ ID NO: 70301 - protein, 558 aa, Pseudomonas aeruginosa; identical to SEQ ID NO: 62801

SEQ ID NO: 70302 - protein, 634 aa, Pseudomonas aeruginosa; identical to SEQ ID NO: 63582

SEQ ID NO: 70303 - protein, 558 aa, Pseudomonas aeruginosa; identical to SEQ ID NO: 62801

SEQ ID NO: 70304 - protein, 763 aa, Pseudomonas aeruginosa; identical to SEQ ID NO: 64796

SEQ ID NO: 70305 - protein, 636 aa, Pseudomonas aeruginosa; identical to SEQ ID NO: 64797

SEQ ID NO: 70306 - protein, 594 aa, Pseudomonas aeruginosa; identical to SEQ ID NO: 62698

SEQ ID NO: 70307 - protein, 445 aa, Pseudomonas aeruginosa; identical to SEQ ID NO: 64703

SEQ ID NO: 70308 - protein, 807 aa, Pseudomonas aeruginosa; identical to SEQ ID NO: 62542

SEQ ID NO: 70309 - protein, 643 aa, Pseudomonas aeruginosa; identical to SEQ ID NO: 62543

SEQ ID NO: 70310 - protein, 763 aa, Pseudomonas aeruginosa; identical to SEQ ID NO: 64796

SEQ ID NO: 70311 - protein, 636 aa, Pseudomonas aeruginosa; identical to SEQ ID NO: 64797

SEQ ID NO: 70312 - protein, 634 aa, Pseudomonas aeruginosa; identical to SEQ ID NO: 63582

SEQ ID NO: 70313 - protein, 558 aa, Pseudomonas aeruginosa; identical to SEQ ID NO: 62801

SEQ ID NO: 70314 - protein, 634 aa, Pseudomonas aeruginosa; identical to SEQ ID NO: 63582

SEQ ID NO: 70315 - protein, 558 aa, Pseudomonas aeruginosa; identical to SEQ ID NO: 62801

SEQ ID NO: 70316 - protein, 616 aa, Pseudomonas aeruginosa; identical to SEQ ID NO: 66182

SEQ ID NO: 70317 - protein, 549 aa, Pseudomonas aeruginosa; identical to SEQ ID NO: 66183

SEQ ID NO: 70318 - protein, 650 aa, Pseudomonas aeruginosa; identical to SEQ ID NO: 65324

SEQ ID NO: 70319 - protein, 555 aa, Pseudomonas aeruginosa; identical to SEQ ID NO: 65325

SEQ ID NO: 70320 - protein, 600 aa, Pseudomonas aeruginosa; identical to SEQ ID NO: 62594

SEQ ID NO: 70321 - protein, 550 aa, Pseudomonas aeruginosa; identical to SEQ ID NO: 62595

SEQ ID NO: 70322 - protein, 594 aa, Pseudomonas aeruginosa; identical to SEQ ID NO: 62698

SEQ ID NO: 70323 - protein, 445 aa, Pseudomonas aeruginosa; identical to SEQ ID NO: 64703

SEQ ID NO: 70324 - protein, 650 aa, Pseudomonas aeruginosa; identical to SEQ ID NO: 65324

SEQ ID NO: 70325 - protein, 555 aa, Pseudomonas aeruginosa; identical to SEQ ID NO: 65325

SEQ ID NO: 70326 - protein, 634 aa, Pseudomonas aeruginosa; identical to SEQ ID NO: 63582

SEQ ID NO: 70327 - protein, 558 aa, Pseudomonas aeruginosa; identical to SEQ ID NO: 62801

SEQ ID NO: 70328 - protein, 634 aa, Pseudomonas aeruginosa; identical to SEQ ID NO: 63582

SEQ ID NO: 70329 - protein, 558 aa, Pseudomonas aeruginosa; identical to SEQ ID NO: 62801

SEQ ID NO: 70330 - protein, 650 aa, Pseudomonas aeruginosa; identical to SEQ ID NO: 65324

SEQ ID NO: 70331 - protein, 555 aa, Pseudomonas aeruginosa; identical to SEQ ID NO: 65325

SEQ ID NO: 70332 - protein, 650 aa, Pseudomonas aeruginosa; identical to SEQ ID NO: 65324

SEQ ID NO: 70333 - protein, 555 aa, Pseudomonas aeruginosa; identical to SEQ ID NO: 65325

SEQ ID NO: 70334 - protein, 634 aa, Pseudomonas aeruginosa; identical to SEQ ID NO: 63582

SEQ ID NO: 70335 - protein, 558 aa, Pseudomonas aeruginosa; identical to SEQ ID NO: 62801

SEQ ID NO: 70336 - protein, 689 aa, Pseudomonas aeruginosa; identical to SEQ ID NO: 64680

SEQ ID NO: 70337 - protein, 579 aa, Pseudomonas aeruginosa; identical to SEQ ID NO: 62643

SEQ ID NO: 70338 - protein, 634 aa, Pseudomonas aeruginosa; identical to SEQ ID NO: 63582

SEQ ID NO: 70339 - protein, 558 aa, Pseudomonas aeruginosa; identical to SEQ ID NO: 62801

SEQ ID NO: 70340 - protein, 599 aa, Pseudomonas aeruginosa
MKLTRIYVSNFRNFRDADIVVDGSVVIVGENRVGKSNLLHALRLVFDPSLPDSGRQLGQGDFWDGLGEPLEDEEITVFVELQEFEDDLDLLAQLTDFRLDDDPHTVRLTYKFRPIPGLEGAPECDDDYEFICFGGEVETKRFGHEVRRRIAMDLLPALRDAEGDLATWRRSPLRPLLERAFASVSGEDLAGVRNAVQAATGQLADFPSVQNLEQALQQLFASMSGPKQDIEPSLGFGTTDVTRLFRNLRLLIDGGLRTISEASLGSANVAFLTLKALELRQLMGENRRDHTLLAIEEPEAHLHPHLQRSVYSHLFEGLAGEEENESLSLLLTTHSPHIASVAPLRSLVLLRDTVDEGTVAASAASIDLTDEEEDDLARYLDVTRAEMLFARGIVLVEGDAEKFLLPVFAASMGYDLDHLGITVCSVAGTNFTPYSKFLAALGIPFSIVTDWDPQGDRTPLGYNRSWRLVKTIEEVRTGEDQRGLIEEIKRIEQYSDFSDRCEGYGVFTNLDTLEVDLFEYEDFTAAIIETLREQRLSEERQAWVNQWEDDPETLDRENYLKLIEAVGKGRFAQRLASRIEGIAPPPYIARAITYVVDRV

SEQ ID NO: 70341 - protein, 595 aa, Pseudomonas aeruginosa
MSDRAAYLRAAAQLQRNAGQWAAYESRGHCVVLAGPGSGKTKTLVTKLARMLAEDVPESRGIACITYNNECARELEVRLASLGVAPGGRVFVGTVHSFSLTQILLPYAKVARLGLPEGFGVATRAERQAALAEAVNLTIEAPGNPQDWEFRLGNYRRSILNRDSQEWSNTDPELARLVETYEAQLRRRGLIDFDDMPLLAVRALRDNPWLRRALLAKYPILVVDEYQDLGVALHRMVMGLCFRAGMRLFAVGDVDQSIYGFTGARPDLLRRLSERDDVETVRLRLNYRSGNRIVLASRVALGEERDYEAADAAAQGTVYIHPTGGTYEQQADHLVGELLPQALRRHPQLGYRNAAVLYPAAWIGDAVAGAAQAAGIPIVRTDGNALYPRSSRVMQWLELCGQWCCGGWRTGKPRFAQLAREGRRLFAESIHSDGQAMDFHRRLIATLWDSRDANLNLHGWLARLSIDVIQPFASECPALRDEMDTLAVFAARIAPAGDRADMVLGELAGDGEHLNRLTLSTLHSAKGREFDVVFMFGLDRGRLPRNGVGPQQVVEARRLFYVGFTRAKSEIHLVHTAERSSPFVEEIENHLAEGA

SEQ ID NO: 70342 - protein, 689 aa, Pseudomonas aeruginosa; identical to SEQ ID NO: 64680

SEQ ID NO: 70343 - protein, 579 aa, Pseudomonas aeruginosa; identical to SEQ ID NO: 62643

SEQ ID NO: 70344 - protein, 594 aa, Pseudomonas aeruginosa; identical to SEQ ID NO: 62698

SEQ ID NO: 70345 - protein, 445 aa, Pseudomonas aeruginosa; identical to SEQ ID NO: 64703

SEQ ID NO: 70346 - protein, 616 aa, Pseudomonas aeruginosa; identical to SEQ ID NO: 66182

SEQ ID NO: 70347 - protein, 549 aa, Pseudomonas aeruginosa; identical to SEQ ID NO: 66183

SEQ ID NO: 70348 - protein, 594 aa, Pseudomonas aeruginosa; identical to SEQ ID NO: 62698

SEQ ID NO: 70349 - protein, 445 aa, Pseudomonas aeruginosa; identical to SEQ ID NO: 64703

SEQ ID NO: 70350 - protein, 651 aa, Pseudomonas aeruginosa; identical to SEQ ID NO: 63686

SEQ ID NO: 70351 - protein, 556 aa, Pseudomonas aeruginosa; identical to SEQ ID NO: 63687

SEQ ID NO: 70352 - protein, 777 aa, Pseudomonas aeruginosa; identical to SEQ ID NO: 70170

SEQ ID NO: 70353 - protein, 625 aa, Pseudomonas aeruginosa; identical to SEQ ID NO: 70171

SEQ ID NO: 70354 - protein, 778 aa, Pseudomonas aeruginosa; identical to SEQ ID NO: 64580

SEQ ID NO: 70355 - protein, 625 aa, Pseudomonas aeruginosa; identical to SEQ ID NO: 64581

SEQ ID NO: 70356 - protein, 712 aa, Pseudomonas aeruginosa; identical to SEQ ID NO: 63712

SEQ ID NO: 70357 - protein, 599 aa, Pseudomonas aeruginosa; identical to SEQ ID NO: 63713

SEQ ID NO: 70358 - protein, 616 aa, Pseudomonas aeruginosa; identical to SEQ ID NO: 66182

SEQ ID NO: 70359 - protein, 549 aa, Pseudomonas aeruginosa; identical to SEQ ID NO: 66183

SEQ ID NO: 70360 - protein, 778 aa, Pseudomonas aeruginosa; identical to SEQ ID NO: 64580

SEQ ID NO: 70361 - protein, 625 aa, Pseudomonas aeruginosa; identical to SEQ ID NO: 64581

SEQ ID NO: 70362 - protein, 634 aa, Pseudomonas aeruginosa; identical to SEQ ID NO: 63582

SEQ ID NO: 70363 - protein, 558 aa, Pseudomonas aeruginosa; identical to SEQ ID NO: 62801

SEQ ID NO: 70364 - protein, 634 aa, Pseudomonas aeruginosa; identical to SEQ ID NO: 63582

SEQ ID NO: 70365 - protein, 558 aa, Pseudomonas aeruginosa; identical to SEQ ID NO: 62801

SEQ ID NO: 70366 - protein, 778 aa, Pseudomonas aeruginosa; identical to SEQ ID NO: 64580

SEQ ID NO: 70367 - protein, 625 aa, Pseudomonas aeruginosa; identical to SEQ ID NO: 64581

SEQ ID NO: 70368 - protein, 807 aa, Pseudomonas aeruginosa; identical to SEQ ID NO: 62542

SEQ ID NO: 70369 - protein, 643 aa, Pseudomonas aeruginosa; identical to SEQ ID NO: 62543

SEQ ID NO: 70370 - protein, 616 aa, Pseudomonas aeruginosa; identical to SEQ ID NO: 66182

SEQ ID NO: 70371 - protein, 549 aa, Pseudomonas aeruginosa; identical to SEQ ID NO: 66183

SEQ ID NO: 70372 - protein, 634 aa, Pseudomonas aeruginosa; identical to SEQ ID NO: 63582

SEQ ID NO: 70373 - protein, 558 aa, Pseudomonas aeruginosa; identical to SEQ ID NO: 62801

SEQ ID NO: 70374 - protein, 711 aa, Pseudomonas aeruginosa; identical to SEQ ID NO: 70282

SEQ ID NO: 70375 - protein, 598 aa, Pseudomonas aeruginosa; identical to SEQ ID NO: 70283

SEQ ID NO: 70376 - protein, 616 aa, Pseudomonas aeruginosa; identical to SEQ ID NO: 66182

SEQ ID NO: 70377 - protein, 549 aa, Pseudomonas aeruginosa; identical to SEQ ID NO: 66183

SEQ ID NO: 70378 - protein, 634 aa, Pseudomonas aeruginosa; identical to SEQ ID NO: 63582

SEQ ID NO: 70379 - protein, 558 aa, Pseudomonas aeruginosa; identical to SEQ ID NO: 62801

SEQ ID NO: 70380 - protein, 634 aa, Pseudomonas aeruginosa; identical to SEQ ID NO: 63582

SEQ ID NO: 70381 - protein, 558 aa, Pseudomonas aeruginosa; identical to SEQ ID NO: 62801

SEQ ID NO: 70382 - protein, 778 aa, Pseudomonas aeruginosa; identical to SEQ ID NO: 64580

SEQ ID NO: 70383 - protein, 625 aa, Pseudomonas aeruginosa
MTSRIGSPDTQADLDVRACLDRMPPRSFVMVAGAGSGKTTSLIKAIAHLAETRGPALRRAGQQIACITYTEVAVGEISADVGASPLFHISTIHSFLWSVIRPFHSDIAAWVATRIDEKIAERRTHYDKPRTQAKTKARLEQEIADLEADLAAISEVEKFVYGTGSSYAEGILGHDDILKLTPACVAAHPLLRQLVAKRFPYIFVDESQDTNPEVVEALRHIAGEHPGLCVGFFGDPMQKIYMSGAGTVPLNDGWAEITKPENFRCPTSVLGVINAIRAPGDGLEQVRGRTITVDGIEQPVAGTSNLFILPADAERSARLAAIRQWLAAETGDGLWLSDVREGDVRLLVLVHRMAANRLGFPNLYAALNDRAPMSLSEGLSDGTAWPLRPLVQHILPLVVAAQAGDRFTVISTLRSECPRLEPARLRGQATAPVLTALQQALDGLVGLLAAGSQATIRDVLTHVRDNELLRLDDRFAMHLVAEPVDDGSSGFENVQAYLACGVDELWAYRRYFTEESPFATHHGVKGAQFERVLVVIDDEEAGFRQYSYGKYLGYVPLSDKDEANLAAGEESVLDRTRRLFYVCCSRATKDLAVVAFVPDVAAARTAIVAQNLFPEAVIRGAEHLG

SEQ ID NO: 70384 - protein, 711 aa, Pseudomonas aeruginosa; identical to SEQ ID NO: 70282

SEQ ID NO: 70385 - protein, 598 aa, Pseudomonas aeruginosa; identical to SEQ ID NO: 70283

SEQ ID NO: 70386 - protein, 704 aa, Pseudomonas aeruginosa; identical to SEQ ID NO: 63366

SEQ ID NO: 70387 - protein, 142 aa, Pseudomonas aeruginosa; identical to SEQ ID NO: 63365

SEQ ID NO: 70388 - protein, 594 aa, Pseudomonas aeruginosa; identical to SEQ ID NO: 62698

SEQ ID NO: 70389 - protein, 445 aa, Pseudomonas aeruginosa; identical to SEQ ID NO: 64703

SEQ ID NO: 70390 - protein, 616 aa, Pseudomonas aeruginosa; identical to SEQ ID NO: 66182

SEQ ID NO: 70391 - protein, 549 aa, Pseudomonas aeruginosa; identical to SEQ ID NO: 66183

SEQ ID NO: 70392 - protein, 650 aa, Pseudomonas aeruginosa; identical to SEQ ID NO: 65324

SEQ ID NO: 70393 - protein, 555 aa, Pseudomonas aeruginosa; identical to SEQ ID NO: 65325

SEQ ID NO: 70394 - protein, 650 aa, Pseudomonas aeruginosa; identical to SEQ ID NO: 65324

SEQ ID NO: 70395 - protein, 555 aa, Pseudomonas aeruginosa; identical to SEQ ID NO: 65325

SEQ ID NO: 70396 - protein, 778 aa, Pseudomonas aeruginosa; identical to SEQ ID NO: 64580

SEQ ID NO: 70397 - protein, 625 aa, Pseudomonas aeruginosa; identical to SEQ ID NO: 64581

SEQ ID NO: 70398 - protein, 593 aa, Pseudomonas aeruginosa
MYISRIVVKNFRSLKHLDVPIESGSSAIIGENSVGKSNLFHAVRVCLDGQLSSSYRALLKDDIHCQVDLAAPFQVLIGVEFSGFQGNENQEALLHGAEIAEDRARLFYRFRPKRMVREEWARGELQRPLILEDYSWELAGGGNPAVDLAAIEWSDELQDLGATSIHLQYLQSYLIVFLPALRDVEADLQSRRSTLTRLIETFQIGADEQRDLVEAVEAANIEIEGSATIQGIAESIDRAFKDITGPAFSLDVDLGLSSPTFQSILRNLIVLLSSELVSKFEPRRNGLGLNNILYIATLVEYFRKRAEVGRSAGELLLIEEPEAHLHPQLQNTLLEALRSMPFQSLVSTHSTQVTAKVPLANYVVMTMQADGTPFAVAPASNHRLSLSEQQDLSRYLDATKSNLLFARKVMLVEGAAEMLLIPPLVKQVLNIDLEREGISLVAIHGVHFSSFARLFAADCLPKRCAIVGDADREVVPDPLDDDVPVPPNLDLLRGPYVEVFLGATTFEIELTTEENLPMLIAAATELGAPRLRQALENHQLIGPPVSAELRNKVLRTAKRFGKGRFAQVTARHVALAGSVPEYIVDAINWLREQ

SEQ ID NO: 70399 - protein, 518 aa, Pseudomonas aeruginosa
MQEGDELHLSVSTIHAFCLQEVLRPYGWLLPDYRGASRVLTRDNPDFETIANYAAQRVTDDPLRTQDYDAFESLNLNAAGELIGPAVENPTVAGAASFFWQRCVELGYLDFSLIIYRSYLILRDHPRVARTLCSKFAWFLVDEFQDTTELQIEILRRLHDVGNSRFFLVGDLSQSIYAFTGARPELVAPFGQYIQARADLSLSQNFRSSAHIVQHGERLFPRQPAMTAVGGNRTFALEPVLVRGMTAFQAITEHFLPMLEEQGIELGNATILGREWRGLIELARQLRDFGTPVVGPGARPYRRSRLFVTLAEQLCGAVVETQPGTMRQLERAVFNTILDITGQPRLDIFTYEGRILIMRMLHAAIRHAQHGGALAWLDRMSREVGRLLFETGYIDQAQSALFLASVHEMNADMVRQGIDAENLQIEDLGLFASPTRALRLSTIHYAKGREYGAVAMIGLKRGSFPHFRADTPEAIAGDRRLFYVGVTRAERVLMYIAERDRWNNPPSIFLGADGVGML

SEQ ID NO: 70400 - protein, 634 aa, Pseudomonas aeruginosa; identical to SEQ ID NO: 63582

SEQ ID NO: 70401 - protein, 558 aa, Pseudomonas aeruginosa; identical to SEQ ID NO: 62801

SEQ ID NO: 70402 - protein, 594 aa, Pseudomonas aeruginosa
MRVSRVRLINFANFSDVDVETGESIVIVGENKVGKSNFIRGLQLILDPGLSERDRQLGLEHFWDGLGEDKVGATIEVSVDLTDFTNDPRLMAHLNDCVIDPGPPMVARLTYRFQPKAGLGRAPESLKDYEYVIFGGNDPEMRIGGGLRRMLPIDVQVALRDAEKDLASWRNSPLRPLIEDLAASLDDDAREEIQNQVDQAQRELAGHEEVVATAERISERLIAIAGGQHAVPVSLGLAPTRVDALLRSLRLLIDNGVRGVGDASLGTANLIFLALKSLELDRLVSEGERDHTFFVVEEPEAHLHPHVQRLVYRYFLGTSAEDEDEAPPLTTILTTHSPQIASVTPIRSIVLLRHNATDGKTVAVSTANAPFTQRDEDDLQRYIDVTRGEILFSRGVILVEGDAERFIIPAFADALGIPFDILGITVCSVGGTNFTPYVKLLGPKGLNIPHVILTDRDPVNGKPPLAHRRLINLLNEVDDEYGYDDLDIDDVLKYAAEFGYFVNESTLESDLFAAGMTEAMKSVIEQELPLRQVTRDALQEWVDDPDQVDEDRLLKLIERIGKGRFAQALAPSVSEDVCPAYIRSALEHIRDAVA

SEQ ID NO: 70403 - protein, 445 aa, Pseudomonas aeruginosa
MLNRNSVAWRSEEELAAWAEAYEAALRDDGLIDYDDMVVFGQRLIAEHDWVLPLVQAKFPVLAVDEYQDLGVALHRIVKRLAFDGGVRLFAVGDADQSIYGFTGADGALLMELAARRDIEPVQLQLNYRSGAGIVTASEMALGEARGYQASDPARQTTIEFVLRPGGMADQAAHAVAQIIPAALASKPGRTLGDIAILYKDYRAGDIVAEAVATGGLDYIRVDTAAPYRKVALTSWVEDCAAWCAGGWRVGRPQLRGLLDRYRAFHRASLDDSQAKREEQELTALLWELRADQQPAREFVASLRNGVVDHLLAAELALADQKEQLDRMTAALAEGGALASLDITSLGGRDGSPDHLNLLTLHSAKGCEYDVVIMVGLDLGNLPWRNETPEKLRESRRLFYVGLTRARDEVHMLYSGFVDGRYGPMRFGRSPFLDELEARMRAAGI

SEQ ID NO: 70404 - protein, 650 aa, Pseudomonas aeruginosa; identical to SEQ ID NO: 65324

SEQ ID NO: 70405 - protein, 555 aa, Pseudomonas aeruginosa; identical to SEQ ID NO: 65325

SEQ ID NO: 70406 - protein, 616 aa, Pseudomonas aeruginosa; identical to SEQ ID NO: 66182

SEQ ID NO: 70407 - protein, 549 aa, Pseudomonas aeruginosa; identical to SEQ ID NO: 66183

SEQ ID NO: 70408 - protein, 634 aa, Pseudomonas aeruginosa; identical to SEQ ID NO: 63582

SEQ ID NO: 70409 - protein, 558 aa, Pseudomonas aeruginosa; identical to SEQ ID NO: 62801

SEQ ID NO: 70410 - protein, 650 aa, Pseudomonas aeruginosa; identical to SEQ ID NO: 65324

SEQ ID NO: 70411 - protein, 555 aa, Pseudomonas aeruginosa; identical to SEQ ID NO: 65325

SEQ ID NO: 70412 - protein, 598 aa, Pseudomonas aeruginosa
MQIAKVKVEKFRGIESGIVTLSGHSVFLGDNNVGKSTLLEAIDLVLGPERLSRRPVIDEHDFHAGRYLDEEGNPVLIRIEVIVSDLSAEQQRHFRDHIEWWSATEKTLLVGPPPEDTDAPDVSAALRVFFEGRYDKEEDDFTGNTFFATPVLAEGTHPTFKTTDKRKCGFLYLRTLRTGARALSLERGSLLDVILRLQDKRVTMWEDLLNELRKLPVADKPELGIAPLLKDVQDAVRRFVPSDWAEEPHMRVSDLTREALRKDLTVFMGTGAKRPDGSTYCAPYHHQGTGTINTLVLALLSIIAGLKQNVIFAMEEPEIALPPHTQKRIVNSVRETSAQALFTSHSPYVLEEFAPSEMHVLRRDGGKLSAMLATYPPAVKPKAYKAEFRARFCEALLARYVLVVEGRTEFDAIPAAARRLNELNPTEYKTLEALGVAVIDAQTDAQVAPLGKFFSDLGKTVFAVFDKQEPAASATIKAAVHHSFESAEKGFENVVLRHTAEAALRRYALSLVAENTWPNHLIAKAPNETHTLEQIRDALRQFFSWAKGSGDAGDLLGCCTEAEIPQYVRDTLRAIHVTVEPPPLPQLPPVFAPFEDEL

SEQ ID NO: 70413 - protein, 550 aa, Pseudomonas aeruginosa
MGGPGSGKTHVALIKARDEIRSARLLPGQRILFLSFARPTVARVLEKAKELITPDDLNLLEVNTYHGFAWSILRSHGYLLNNGKPLQLLPPPEGAARLAHYAKEQHHQEKLRLFHEEGLLHFDLFALLTSELLGRSQRLAGIYIATYPILVVDEFQDTNADEWAMIRELGNGCRIIALADPDQRIYEFRGADPLRLKEFVDQFDPLPVEFEGENHRSAGTDIATYGSDLLTGKNKGAVYTNVSVVEYGVYYGRGPHFHVKAQLIQAIKRLRKESAWSIAVLVPSKAFMLQVSDYLSAESDGLPNLRHEVAMDAESPALAANVIATLMEGGPSELLAARLLSALHTHIRGRSGTKRPAQAELDMADAIDQYLVSGKIRGKNRQALISECARLAALRQDVVFTGHPEEDWLTARGLLAMSAVGQLSRVAADAKYLRLLHKGSNLRASLSELWRSQGQYVGAIEAVRGALLQEHFTAAAKEWRGVHLMTIHKAKGKEFDEVLIYEGRYAGRIVPANADTSRQSQALLALRVAVTRAMKRATILTPSGDRSIFL

SEQ ID NO: 70414 - protein, 650 aa, Pseudomonas aeruginosa; identical to SEQ ID NO: 65324

SEQ ID NO: 70415 - protein, 555 aa, Pseudomonas aeruginosa; identical to SEQ ID NO: 65325

SEQ ID NO: 70416 - protein, 650 aa, Pseudomonas aeruginosa; identical to SEQ ID NO: 65324

SEQ ID NO: 70417 - protein, 555 aa, Pseudomonas aeruginosa; identical to SEQ ID NO: 65325

SEQ ID NO: 70418 - protein, 650 aa, Pseudomonas aeruginosa; identical to SEQ ID NO: 65324

SEQ ID NO: 70419 - protein, 555 aa, Pseudomonas aeruginosa; identical to SEQ ID NO: 65325

SEQ ID NO: 70420 - protein, 650 aa, Pseudomonas aeruginosa; identical to SEQ ID NO: 65324

SEQ ID NO: 70421 - protein, 555 aa, Pseudomonas aeruginosa; identical to SEQ ID NO: 65325

SEQ ID NO: 70422 - protein, 650 aa, Pseudomonas aeruginosa; identical to SEQ ID NO: 65324

SEQ ID NO: 70423 - protein, 555 aa, Pseudomonas aeruginosa; identical to SEQ ID NO: 65325

SEQ ID NO: 70424 - protein, 634 aa, Pseudomonas aeruginosa; identical to SEQ ID NO: 63582

SEQ ID NO: 70425 - protein, 558 aa, Pseudomonas aeruginosa; identical to SEQ ID NO: 62801

SEQ ID NO: 70426 - protein, 593 aa, Pseudomonas aeruginosa; identical to SEQ ID NO: 70398

SEQ ID NO: 70427 - protein, 518 aa, Pseudomonas aeruginosa; identical to SEQ ID NO: 70399

SEQ ID NO: 70428 - protein, 623 aa, Pseudomonas aeruginosa; identical to SEQ ID NO: 65388

SEQ ID NO: 70429 - protein, 551 aa, Pseudomonas aeruginosa
MALGGPGAGKTHVALVKARDEIRSGVLKPGQKILFLSFARPTVARIIEKASELISREDLKQLEVSTYHGFAWSILRSHAYLLNGRPSLQLLPPPEAAAHLADIDKAQHENEKRRLFEHEGRLHFDLFASLVSELLSRSDRLSAIFSDAYPIIILDEFQDTNCDEWALIQQLGKRSRLIALADPEQRIYEFRGADPRRVGDFLEIFGAVHFDFAGENHRSSGTDITTYGNDLLTGANKGKVYQQVKITRYGFMYGKSLHFNAKAAVLSALDRLKAIPDKSIAILVPSKRLMLELSDYLSSAADGLPELHHDVAMDAEPPALAAGVIATLLEGGTAGDLASRMLGALHSHIRGRRGGKPTPQSELDLAGALSGFLSSGKIRGAKRQLIVSEVQRIAELRQQLQLTGDPAEDWLQLRGLLQSSAAVALKQVATDARYLRLLHRGSVLRANLGALWRAQGEYKGAEEAVRSALMQEHFAAAQKDWRGIHLMTIHKSKGKEFDEVIIYDGLFQRIAKAPQDPKICAQDLLVLRVGVTRAIRRTTILTPKRDTCPFL

SEQ ID NO: 70430 - protein, 634 aa, Pseudomonas aeruginosa; identical to SEQ ID NO: 65026

SEQ ID NO: 70431 - protein, 557 aa, Pseudomonas aeruginosa; identical to SEQ ID NO: 65027

SEQ ID NO: 70432 - protein, 778 aa, Pseudomonas aeruginosa; identical to SEQ ID NO: 64580

SEQ ID NO: 70433 - protein, 625 aa, Pseudomonas aeruginosa; identical to SEQ ID NO: 64581

SEQ ID NO: 70434 - protein, 623 aa, Pseudomonas aeruginosa; identical to SEQ ID NO: 65246

SEQ ID NO: 70435 - protein, 551 aa, Pseudomonas aeruginosa; identical to SEQ ID NO: 70253

SEQ ID NO: 70436 - protein, 650 aa, Pseudomonas aeruginosa; identical to SEQ ID NO: 65324

SEQ ID NO: 70437 - protein, 555 aa, Pseudomonas aeruginosa; identical to SEQ ID NO: 66205

SEQ ID NO: 70438 - protein, 650 aa, Pseudomonas aeruginosa; identical to SEQ ID NO: 65324

SEQ ID NO: 70439 - protein, 555 aa, Pseudomonas aeruginosa; identical to SEQ ID NO: 65325

SEQ ID NO: 70440 - protein, 598 aa, Pseudomonas aeruginosa; identical to SEQ ID NO: 70412

SEQ ID NO: 70441 - protein, 550 aa, Pseudomonas aeruginosa; identical to SEQ ID NO: 70413

SEQ ID NO: 70442 - protein, 650 aa, Pseudomonas aeruginosa; identical to SEQ ID NO: 65324

SEQ ID NO: 70443 - protein, 555 aa, Pseudomonas aeruginosa; identical to SEQ ID NO: 65325

SEQ ID NO: 70444 - protein, 650 aa, Pseudomonas aeruginosa; identical to SEQ ID NO: 65324

SEQ ID NO: 70445 - protein, 555 aa, Pseudomonas aeruginosa; identical to SEQ ID NO: 65325

SEQ ID NO: 70446 - protein, 588 aa, Clostridium butyricum
MYISEVKIKGFRNFKEDTINFKLNSLIIGENDIGKSNLIYALRILLDKSISEADLEPKDKDFYAFEETNEFHIQIKFDNITEECIQSKFKGSISEDGIMYISFNAQKNSDDNSIIYYFSQGKDEGSLLRESNRFESRYYLKILNIEYVKSNRDLKRFINKEKKNLLSDMMKKREEKQKEEDNKKIELVKENLINVNNNMRELSYIKNATNVINKDLDNLSIHNKNQVFQFSTIAESIDDIQNNVELVSKFDEKELSIGGDGRNNQIFMSLWCNKYNNIKENCLSVTIYCIEEPEAHLHPHQQRQLSKYLLNLLNGQIIISSHSPQIASEFRPDSIIRLHKSKYTTISANNGCSTVVEDAINDFGYRMNIIASEAFFSRVVLLVEGPSEEIFYKTLAHELNIQLDKNGISIIDVNGVGFNEYMKLLKSLNIKFVFRTDNDIFKIPNKNKYRCAGIQRAIDFYKNHYEHNEKIDEILKREDEFNNLPDKVLSNDVKELMNQLITELNKIGIFISDVDLENDIYDSGISDELKTYYGTTTKQDTVSKMQEKKAINLYYFLKNNQGALKKIEESSIVEPLKKCVVMSDEEDE

SEQ ID NO: 70447 - protein, 532 aa, Clostridium butyricum
MNEIDLSEEQKKVFNYDGNVVVIANPGSGKTFIVCEKIKFIINKLLDYQGVIAISYTNKASKELKDRLKNVNLKSSFFNTLDTFLLMEIIYPFGQHVFGNAKEEFQIYDNKDKSSNEVNEFRSKSTIYSYEEKYIKLGELYLNGKIMLEYISELAVYIINRSKACKNYLKARYKYIFIDEYQDCGEGQHNIFLKIVSLGIIGVAVGDPNQSIYGFSGKSSKYLLQLKENSNFEIFYLTRNYRCHKSIIEYSSRLLDKDTLMECDDKRIFYKKVNGNQIDICKYIDSEIDKIKSLFSIKNYNDIAILVRGDVTGKIVNNNLNTEHRYFQTTELDKDSSLWSGLFKRLLRYKMNSGNKYAFVEEFFYEDDDKFKILYNELREFDEIDIKKEDCKTNFIRIAELIYPHGKNDKAIRLLEEILKDDNLYNSYKEADKNQVQIMTLHKSKGLEFRIVIHLDMYRFILPNEKKENGIWKIIGFNQALNLHYVGITRAIDACFIITSTKRINGSNSELSAEDSILLSYHNVKELRKLYS

SEQ ID NO: 70448 - protein, 672 aa, Clostridium butyricum
MYLRSFEINNFRKFGRTNNIVEFSNEIKQYSQRKSEKVNIAQTTTLIVGKNNSGKTSIIQALDKLIRENSFNSNDFNFFYLKELLSKYNSSSDTLEAPYMEFVLTVGIDNENTDLITNIISFMTLEDVDNAQIDIIIKYEIEDYETFTVEVKKILREKYNENILFAKFLELIDNLKFKINYYNKSRENIEKFRLIDLMDLTSIKANNISSEHCLSKAFSKIVKYRYNNLLGNDKKDLEESINSINSTLTKKISNNHTTYINNSLGEIISKDKLKVLLSADLSFQKLMNDLVKYEYVEGKINVPENQFGLGYTNLMEIISEIIDYMEKYPENSFNSKINLISIEEPETFMHPQMQELFIKNINNAINTLLKDKNKNVNSQLIMTTHSSHILNSKIHSGNTFNNINCINTQNNCARVVALNDEKITPEGDDSEDDLKFIKNHIKYKVSELFFADAIILVEGATEDTILPYYIDKNEKLNKYYVSIFNINGAHGLVYRKLLKLLKVPTLIITDLDIKRDDDEKEKYKQINNLKDRVTTNQTIIKYNNGSDKLDHIPEYIKDENIIITYQGSIKRSFATSFEEAFILTNFDNDILNKVLNKIKPNIYKEIVGNKNTKNNIKESYKWQRKLSKSKSEFANELLYNLIIEDDKKKIPLLPKYIENGIKQLVNQLKEKN

SEQ ID NO: 70449 - protein, 686 aa, Clostridium butyricum
MVLKNISPLKKTKEDDILKSIYKAIDVKMNTIFNSGAGSGKTYALIECLRYIVNQYNDNLKYHNQKIICITYTNIAAYEVKRRLGNSSTVIISTIHERIWDFIKNYKKELVEIHKENLLNQIEILKEQICKANEYKKYNELNDEQRDNFNKLINENRELYYKYYSCSAKQFKEKLNCFESKFPGILSNVANFKKIVNTIFKINKYSICIDNIKSKRTNFTSIKYDPMYNNDQLNKMRISHDTLLEYGLKIIEKYDLLKQIIVDKYPYILIDEYQDTDEKVIKIINCLHQYSIKIGHEIFVGYFGDSAQNIYKKGVGKRIFNIHKNLLKINKIYNRRSTKEIIDIANNVRSDEIIQESIYEDSSGGSMKFFYGDKNDISRFIEKYLVEWNITKENPLHCLALTNKSVAKYSGFENLYDTLSNTQIYSGIGREQLNTELLSNDLSKLGEIPSVLYRIIKFIVDIENSKTQLKEILPLEIYGISIEELKELIELLKTINGNTLEEYIKVIYKIYSEDRIGNYRILVKKIFDLNDITMDNFYNYLLEKLYPNLIDGEEDDAKNMIKSILEINIDEYKRWYKYILNEFDDRIIYHTYHGTKGLEFNNVIIVMENSFGKTSHYFDFFFKVCKGTNTLSDNERLKFEEIKNLLYVSVSRAIINLRVLYVDDISEFKDGIKYIFNEIYPYNNAN

SEQ ID NO: 70450 - protein, 688 aa, Sphingobium baderi; identical to SEQ ID NO: 63456

SEQ ID NO: 70451 - protein, 590 aa, Sphingobium baderi; identical to SEQ ID NO: 63569

SEQ ID NO: 70452 - protein, 687 aa, Staphylococcus aureus; identical to SEQ ID NO: 63306

SEQ ID NO: 70453 - protein, 582 aa, Staphylococcus aureus; identical to SEQ ID NO: 63307

SEQ ID NO: 70454 - protein, 572 aa, Lactococcus lactis subsp. lactis; identical to SEQ ID NO: 66128

SEQ ID NO: 70455 - protein, 501 aa, Lactococcus lactis subsp. lactis
MELTDTQKKIVDTAGNLIVRASAGTGKTHTMVAKIAKEIDENKDHRVIAAITFTIKAAREIKERLSVDITGYFIGTNNSFAIEEVIKPFMKDAYGVQFDCEMTTDYSLKFDNYEEGLNFISENCTLGSYEDNNKNFIFELALKILRKSEVARLYLQAKYFKIYVDEYQDCDTAMNEFFMYLTDSLTIDLFIVGDDKQSLYTWRGANPEAFKSIIGKRNFEKFFMVDNFRSNKQIQNYSNLLFEETSSLYDQQTSIENIILLNCTEQDWIEKIKCFWDADKSSALLRFSNSNAKSAADILCANDMDFKFIPKAPIEDISNDAGWLYYAIAQYLLVDTYSVFDFIYDIPSGTEEDSKIKSKLERFLQGLKTNVVDENQFKEKVSELATFLGYEAQPKDLSALYETISTDRYIEAFKSDNINHRAMTFHSSKGLQFDQVILFVEDYNLRDEVSFYNHYVATTRAKSKLIFISIKENYGTRLFYQNIAKRLGASGLTLDKLVTIY

SEQ ID NO: 70456 - protein, 693 aa, Lactococcus lactis subsp. lactis
MKIKTIEISGFRQISNAKFNLEDRLTFLAGGNNSGKTSLVELLNCVFNFGAEKLSGEDFSVVNTQQWVNDVYPQILNYFQNDTQKENIISNICNLIFLGTDEKNRTIIEPIKLKIQVDYDVENDDIRNFADYIMDLDPSSSSFYFIYEYNVDNSLFRKNLINNYDKLEHRIRKIISTSENNIDKNIKKIILKVYFESLSETIRFTDSKFENGGKINRKDFASLFNFQKIMAARTLDDTSTDRNKILSKNIVDIASEDENWEKTIESLPDTILEAIENKNIEQIIKDTSIDSLKEMMSSILMTNGGQTNEIIINMDITEDSLKSLLKNITCAQYMLDDHYLNESSQGLGYSNLVYMHLQLEKFNKTIDPLLVNLFVIEEPESHMHPQMQYVFSQYLQTYFDSRPKLQGFITTHSHEVVRGAKLSQLRIFRKVNSFKCSLYDLRSFHNNLEDKPELLDFYSYFYAISFPDIIFADKVILYEGDTERMLINSLLKLDQTPFPKLKSQYISFVQVGGAYAVNYVPILKYLDIKSLIITDIDYGKECNTKDEIEVSESTNDSINKLLNSKVETESTKNIKEIYSYRESNEPFVLIKDNICLTFQGDKDGYTRTLEEAMLCKLYSIKSFDMKTKDWWKKKRKSDNLKYSIPNNTSIGVRKIINSTAKNKTDFMYSVVLNNKLMDTLPYYIEEGLKWLEK

SEQ ID NO: 70457 - protein, 650 aa, Lactococcus lactis subsp. lactis
MVRKIENFFIVNAPAGSGKTTTIREMINKIISINSKDNVLCITYTNRAAEELSKSFSSPNISISTIHSFLNNFMKQYFGSPEIIDLYFDTYQDSLQQRIDNKEAKENQNESNQKYIEKYGDLSIDVLRKNIKNIYYNENSFNSLYYGGLSHDDLISFSSKIFLKYKMIQNRLSYKFQYIFIDEYQDTTADVLNIFYESLREKRTILYLFGDKMQQIYKNYDGSFELQFLKFDSSKALTTNYRSVPQIITLLNNIYNDSSFVQNVSEHMVKISPNFDPRVIISSDVDERLSQILDKYPNSLTLFLSNQSRFQKIGCPSLYRTFSKMDLYSFSKKYGVVDVLTDNTKDNPDSLMRLIFLVAYINNNYTSNNYGVIVQKIKDEQSMIGLKNWKLSSHQDKVTLNAILEELSLIISSPKKSIKDVLIFLKGKIAQTTVTFSEIMEDESYSDALDVPIEEVIKLYNYLESPKVSTQHGVKGESHDEVIFVADDSYNPHVSMYNFFDIWSDTELSLSTLEEFYYQYSVELNKIIEAVGMKINDLKKEGFITHEDYLIEAASSIITRFQGDDLFSNLCLQDYQKFISKPNVTNAKKCFRESQIYGILSAYKLFYVGCSRARKDITVLLDSNKIKGNIDLQIQKFEQLGFKVHNESLI

SEQ ID NO: 70458 - protein, 572 aa, Lactococcus lactis subsp. lactis; identical to SEQ ID NO: 66128

SEQ ID NO: 70459 - protein, 501 aa, Lactococcus lactis subsp. lactis; identical to SEQ ID NO: 70455

SEQ ID NO: 70460 - protein, 710 aa, Staphylococcus epidermidis; identical to SEQ ID NO: 63510

SEQ ID NO: 70461 - protein, 590 aa, Staphylococcus epidermidis; identical to SEQ ID NO: 63511

SEQ ID NO: 70462 - protein, 698 aa, Leisingera aquaemixtae
MRLHSISVRNFRRLKSIDLDFEEKETVFVGPNNSGKTSATAVMRSFLGNRDFKVHDFSVSSISAIDAYVNGEEQSLPSIDLDLWFKVDPDAVSFGRVFALATTLSTDFSEIGIRCALTVDDVNELWRQYDLAFPVDQNGERKRSLSHFLDLEGNLKKHFSVQFSSLERTDNDLLPTPLDPKDGKKILSSLVRVDFVDAQRNIDDENAARSNRLSEAFATYYRRNLEKAELAEEAIAIIEQNNENLNSHYSQRFAPLMTMIGGLGLPSDNDRAMKVVSTLSSEDALRGNTELFYVDANTSHELPEAYNGLGFKNLVFMAIQIDHFYRQWLATEEDRPLCQVIFVEEPEVHLHAQVQQTFIRQMWDVLTEGRPDGESTPQLAVTTHSSHILDTVDFSKIRYFRRKSINDVQNGESFHGTTVHSLAQFQPEPIDLDGEVISPEAALSFLKKYLRLTHCDLFFSDAAILVEGSVEKLLLPRMIDFAANSLNKKYLTVLEVGGAYGMRFAGLLEFLEIPYLIITDIDSVDPANSRKNCIATADNAVSSNATLGYFFDDSSVKALAAKTKADREQADGMRFISYQTPVSIDVEGQAQIFHGRTLEETFVYENLVLFRNDALSIGIDLPDDLAALHQDVWKRIKSSTFKKTEFAMNVLAYEPPQQQDEEEGANNGVAQLHWNVPQYIFEGLVWLDGQLSQNAEEA

SEQ ID NO: 70463 - protein, 613 aa, Leisingera aquaemixtae
MEAVLKPTEADKRIIKCISEEKSFSVIAGAGSGKTTSLVEALKSIRDEHGKELRKNGQRVVCITYTNRAVDVISSKLGFDDLFLVTTLHGFLWSEIFRFQNAMREALCEDVIPRHIAKAQKDDNGGTSQRARNAREKIQRLSQELEALKEEPPVRYEETTISDYAKCILNHDDVIDVASFLISNRPILRKGLGFKYPFFFVDEAQDTFPQVMAALNAICAKEGLPIIGYFGDPMQQIYDKRAGGFSGPEGAEVIPKEENFRCSTSVIDLLNNFRSDLRQVPGGKNTDIEGSVEITVVQAPDPSGPRNTYTAEQLDDVTSKYSNAVVQWGWENLPSVKNLFLARRMIARRLGFTKIHSLFTGTYSSSRSQSDYEDGTHYLFKPFVDGVFELVEASRTGDAKRIVETLRRISPAFSDNGKNKSKSLKAMLDHAVQHTEKLSELWDTRTVKEVLEYCRDNDLCTISERLAYQMDRNPREEFDRDNEDHQREKGDWLADEFFALGTEELERYFSFLDESSPFSTQHGAKGEEYENVLVMIDDIEANWNTYSFSKFLTPNVAGQPTDRQRELTEKLAYVCFSRAEVNLRVLFFSKDAKAAGAELIDAGLFRKDQVSYL

SEQ ID NO: 70464 - protein, 709 aa, Bacillus sp. KACC 18228
MFISDVTVRNFRNFSNATFSFARGVNSLIGENGSGKSNILYAMRLLLDGNLPQRASVLTEDDFNRDLIDWRGHWIIIHLTFKDISKNELGSFMAHNISSVDSKDDKGTYTFYFRPNFKIRNSLYELSKDPEKNEDKFEELKTKITIDDYESIFTFRGEANFADEKVYENIIGNFSKIEFPDPKNDDKRLIGETTSFITSMRKEMVCTYIKALRNVVNDLKGRKSPLLTLLRGEAKELELSEINEMKTKIQELNNLIGTMDEITDLSTRVSKTLENTVGFTYAPSVAIKSEFPEDINKIMQSLTLWIGDGFNNKFDGRIEDLSLGGANLIYMTLKLLEYELKQPREEKIAHFLLIEEPEAHVHNHIQKTLFDNYHFENTQVFVTTHSTQISSVSRISSMNILLKNDLKTLVCQPSKGLLKDECKKIERYLDATRSNLLFAKGVILVEGDAELILIPTMFQKVFGLSLDEIGISIINMSSAFFKHIANLFHDDRIHRKCAIITDLDRSIKKLPNDPKMDTPLQKKYRSSQKKGFQRREFLNEFCSNNCWLKPFYAEHTFEIDTFKDNLNLIIETLTEVYSQKMKIAEKENKLKSSNLEEVYETILQVAEKEGKGWYSLMLSEKVEFDFYFPQYILAAISFASSHLDERHLQKMMYYRLSEGKKFSQQELLDLDKKFQSEKERLSKLYDIYSTHFSDPNDSFNRLKGLLDDE

SEQ ID NO: 70465 - protein, 585 aa, Bacillus sp. KACC 18228
MNDILKGLNNEQKKAVLATDNALVIACPGSGKTRVLTRKIAYELNQITSSKQMIVAFTFTTNAAEEIYSRVEEMDLSTENLWIGTFHSFCSQWIIKPYGMYHNELNLGFSYATDYYQNKVLKEIKAESGLKFFDNVNTKFNRAGEYTNKIHKFNEVAKLYHQRLKEEKLIDYNQIIYFSYQLIKTHPKISINLSNLFKYILVDEYQDTQDLQYGIIGEIIKNSHGKSKLFMVGDPEQNIYSSIGGIAKTKDEIQKDLGDNKLVEVKLNGNYRSTQRIVDFCKSFQLEQREVVSLAVLKNSRGIITFDDKIHSNEVTDEIANLVRSYITKGHAPNEICIAAPQWFMLNQGVRKLKQALPDIAFAAPDLTPLPKQTDNFYSKLSRILCTPSSPKMYLHRLRWSKEIVEQLNETCNSSWPNNKSSCIKLLNLMKRCKSHQSNIREYLEQSFEMIMVELNLDFYTYPDLALMYQLFFEQLDEKLKIPEYPQDINSILNLHEPKTGIAIKSFHGVKGEEYETVIAFGLLEGYIPHWNEISDRTVSKRLLYVLCSRAKKNLHLFSETNRCTGKGYPYKTNRELKNVEFEYD

SEQ ID NO: 70466 - protein, 641 aa, Klebsiella pneumoniae
MKLETIRLSGFQSFGQEPTELNLEEITYLIGPNGSGKTAALQALCRLFAFNPALRRILRSDFHVPFNEENAPGERLLWIEADFSFPELAEDVDNSTVAPHFGHMRLDEVDGIPRVRFRLTATMGPDGDIEENLVYVLDVDADGNPQNTPQVTRADRNHIQVHYLPARRDPADHITYGANALLGRLFRAVRWDNERSAIRALTDQISDSLATNPSVNAFSESLKAIWASLHKGSFFTDPKITFAASEIEALLRHMSVSFAPDHEGSLVDFSRLSDGQKSMLYLSLVLSSQAIGSAVLAGRDTSFDPDKLRPPVFTLVAVEEPENSLSPHYLGRIVSTLNNMAKNADAQALIATHAPSMLRRVAPEFIRYLRLTEERNTRITHIKLPAKTDDAHKFVREAVQAFPEVYFSRLVVLGEGDSEEIVLPRLLQAKGAPVDESAITIAPLGGRHVNHFWRLLSALQIPYLTLLDLDIARHAAGWGRIKYVNDQFAIFEPDRVLPVNCPIPRWDDSGTPVRTHHFFNNGTQDTFAELENRSVFFSFPMDLDFSMLLAYPEAYSVIREEPDESTIKAVLGKSHHDSSQYSQDELRLFSTYHRRFKLGSKPAAHIEALAQLTDAQLLGNMPASLSRLADTVIARLAELPE

SEQ ID NO: 70467 - protein, 556 aa, Klebsiella pneumoniae
MIAVEAWLPADGLTLEPNALRAVKECEHCLALTAGPGAGKTEMLAQRADFLLRTGTCRYPKRILAISFKVDASRNLKERIQRRCGPVLASRFDSYTFHAFAKRIIDRFRPVLVGQDALDADYTIVDRKSGASRTQIEFGDLVPLAIKILQCSRMAQNAIRQTYSDVFLDEFQDCTNLQYDLVKLAFQGTRLRLTAVGDTKQKIMGWAGALDGIFGTFVSDFNAEPLNMYRNFRSKPRLLQVQNDIIRQLDPASVMPDELLEGDEGEVYTHHFTDSREEAVCLANVIHDWIETERLPPAEIAILVSKQLDLYADHLMAELEIRGIPYRNEQQMQDITVEPAARLIVDYLSCLYGQREPKAWIRLMNQLIPFADEEIQSSARKELDRLIKNQRKEADIAELIDSRFSDWRECVSAFLAHISSETLMALSPDYESQTRLREVIRDTKVRIEELLQIEPDLPKALERFVDDQAVRILTIHKSKGLEFDSVIIMAVENETFFGNQDENRCAFFVGVSRAKRRLVLTHADRRERPANYTKRWDVVRSVQFEYLGYITPFVRQ

SEQ ID NO: 70468 - protein, 594 aa, Klebsiella pneumoniae; identical to SEQ ID NO: 64492

SEQ ID NO: 70469 - protein, 605 aa, Klebsiella pneumoniae; identical to SEQ ID NO: 64493

SEQ ID NO: 70470 - protein, 659 aa, Klebsiella pneumoniae
MKITEMEIKGFKSFDNVGQTININSFTSLIGGNGTGKTAVLLALTRMFGVKSSDRIVQVDDFYVPPGDEIEDQNEREISIRVRFEFAGLKDGEDDSVADFFKHLVSSEAEEIPYCIAKLKAKWTKTNLAEGDIESDLVWEIGDYEKNITAYERSKIHVHYVPAYRDPAQQLKQTAGTIMHRLINAVEWSEHMGATVDEVAVSIGNQFQEEVGVKTITTSLGRNWKSLFTGGYFEELQIKPVVNGIEDVLKHIDTVFLPSPDTQPLPTERLSDGMKSLFYLSLVKSAFDIEDEIINSEGKELSISVEALDPPNLTIILIEEPENHLSLQYLGRIVKLCEEISENDRAQVFLTTHAPSLLNRVEPENIRYFRLNDNKNTIVKEILLPSEDEDDADSVDTFTYVKEAVKAYPEIYFAKVVILGEGDSEEIVIPKIAQVNGIELDTSLITFAPLGGRYVNHFWKLLNELSIPHVTLLDYDFRRGGGGWGRIKYVIKQLIAIGYDKDKILKTSKGMLSDAELQEMHEWDENEAFEKSWIKFFESYNVYFSYPYDLDWIMLNAFPASYHSFIPDNGGPKILKKTDARYIDKTKNAIASVLKKDAEDIDVKSFEDHDQYYWYRYLFLGRGKPLSHNYVLNKLDNDSLKNNAPLVLKDLIKKVRGLL

SEQ ID NO: 70471 - protein, 615 aa, Klebsiella pneumoniae
MLTIEDADWVLKDIQEVEDEAMKVIRNSTEHNLVLAGPGSGKTELLAQKACFLIETGKCGNKKIIALSFKKDAAKNLQDRVNSRLDIKNRNKFESTTFDAFCKSIVDRFKGTLPKFYRPSDDYEIISLNKKEFIAEIKREALGFEGLTSFELNKIKHSNFEEKYIVVPYTKEARHTVNGRIRYFVWAHLLKGKSRISFKMINYLANRIIKKNSFLSNAINSTYKYAFIDEFQDTTSKQYEVFKSIFFDRAIKITVVGDTKQRIMGWAGALPNAFDLFRKDFAVEKHNELVRNRRSLKNLISYQRLMEAFMNEAEEKAELILNKDEGLARLMQFDEVDQEACYISLLIKKWIDEGIGPRDICILSKSVAEQYSQKIISKLDDSGVKCRIENDYQELLNEAIVQLVLQLLMFVCNRRSIECWGATMELLCNIRGVSKRGDVTRLEKELSNFIKANKEVKSDVVDYLKGLLTIFGIPELKSYFPQYMNGNGLEHNINTLSKYLEALDIKNNMSNAIDMLSGNKTVPFMTIHKSKGLEFKKVVIVGLEPDAYFGDEEGQIENQKTVFVGFSRAIDEVFMTRCKLRRDNFGNVSRQDFNRIPLITDMLTYCGIEAESYPG

SEQ ID NO: 70472 - protein, 694 aa, Klebsiella pneumoniae; identical to SEQ ID NO: 64638

SEQ ID NO: 70473 - protein, 577 aa, Klebsiella pneumoniae; identical to SEQ ID NO: 64639

SEQ ID NO: 70474 - protein, 634 aa, Providencia stuartii
MKLEAIRLSGFQSFGHESTELSLEDITYIIGPNGSGKTAVLQALCRLFAFDPALRRIQRSDFHVPFDEEEVPLERQLWIEADFLFPELEEDEDNSTVAPHFSHMRLDEPDGVPRVRFRLNATMGLDGDIEDTLVYVLEVDGDDLPLNVAQVPRAERNHIQVHYLPARRDPADHITYGANALLGRLLRAVRWDAERETIKGLTDQISDSLAANPSVNAFSESLKATWATLHKGKFFADPKITFVASEIESLLRHLSVSFTPGHDGSFVDFSRLSDGQKSMLYLSLVLSSQAIGRAVLAEEDVSFDPDKLRPPVFTLVALEEPENSLSPHYLGRIVSSLNVMTKNLDAQALIATHAPTMLRRVGPELIRYLRLNESRETCVTCIKLPDETDEAHKFVREAVQAFPEVYFSRLVVLGEGDSEEIVLPRLLQAKGVPVDESAITIAPLGGRHVNHFWRLLAALKIPYFTLLDLDIARYAAGWGRIKYVNDQFAIHQPRKKLPKDYGIPKWNDGEEKIRDFENYLDMLEERGVFFSYPMDLDFAMLLAYPEAYNVEEEKPDNATIKAVLGKSHYDSSQYRDDELVLFNTYHQRFKLGSKPAAHIEALTHLNDDELLDSMPDSLNRLADAVIAKLTELPE

SEQ ID NO: 70475 - protein, 554 aa, Providencia stuartii
MITVEEWQPADGLTLEPNAKRAAKARKRCLALTAGPGAGKTEMLAQRADFLLRTGTCRYPKRILAISFKVDASRNLTERVERRCGRELASRFDSFTFHAFAKRIIDRFRPVLTGEYALDAGYAIVDKKSEASRHEIAFVELVPYAIKILQTSKIARNAIRQTYSDIFLDEFQDCTNLQYDLVKLAFQGTKIRLTAVGDTKQKIMAWAGALDGIFQSFTKDFNAVPLNMYRNFRSKPTLLRVQNEIIRRLDPDSVMPDDQLEGEEGEVFALKFEDSQTEAIYLADLIDGWINKEQLPPAEIAVLVSKQPHLYADHLFKELEQRGIPYRNEQQMQDITVEPVARLIVDYLSCLYGQREPKAWIRLMNQLVPFADEEIQTSVRKGLDQLIRKHRKEVSGAKKTDTPFAEWWKFGRALLKHIGLQTLVALSPDYESHERLKQVIHDTRARIKYLLEIESDLPLALTRFADDQAVRILTIHKSKGLEFDSVIIMAVENEAFFGKEEENRCAFFVGVSRAKRRLILTHTNKRDEPANAMYWKFFRTAQLEYLDYILPFVR

SEQ ID NO: 70476 - protein, 594 aa, Klebsiella pneumoniae; identical to SEQ ID NO: 63538

SEQ ID NO: 70477 - protein, 605 aa, Klebsiella pneumoniae; identical to SEQ ID NO: 63965

SEQ ID NO: 70478 - protein, 324 aa, Clostridium butyricum
MHPQMQELFIKNINNAINTLLKDKNKNVNSQLIMTTHSSHILNSKIHSGNTFNNINCINTQNNCARVVALNDEKITPEGDDSEDDLKFIKNHIKYKVSELFFADAIILVEGATEDTILPYYIDKNEKLNKYYVSIFNINGAHGLVYRKLLKLLKVPTLIITDLDIKRDDDEKEKYKQINNLKDRVTTNQTIIKYNNGSDKLDHIPEYIKDENIIITYQGSIKRSFATSFEEAFILTNFDNDILNKVLNKIKPNIYKEIVGNKNTKNNIKESYKWQRKLSKSKSEFANELLYNLIIEDDKKKIPLLPKYIENGIKQLVNQLKEKN

SEQ ID NO: 70479 - protein, 686 aa, Clostridium butyricum; identical to SEQ ID NO: 70449

SEQ ID NO: 70480 - protein, 527 aa, Listeria monocytogenes; identical to SEQ ID NO: 64370

SEQ ID NO: 70481 - protein, 713 aa, Listeria monocytogenes; identical to SEQ ID NO: 65469

SEQ ID NO: 70482 - protein, 690 aa, Listeria monocytogenes; identical to SEQ ID NO: 62956

SEQ ID NO: 70483 - protein, 577 aa, Listeria monocytogenes; identical to SEQ ID NO: 62969

SEQ ID NO: 70484 - protein, 690 aa, Listeria monocytogenes; identical to SEQ ID NO: 62956

SEQ ID NO: 70485 - protein, 577 aa, Listeria monocytogenes; identical to SEQ ID NO: 62969

SEQ ID NO: 70486 - protein, 690 aa, Listeria monocytogenes; identical to SEQ ID NO: 62956

SEQ ID NO: 70487 - protein, 577 aa, Listeria monocytogenes; identical to SEQ ID NO: 62969

SEQ ID NO: 70488 - protein, 690 aa, Listeria monocytogenes; identical to SEQ ID NO: 62956

SEQ ID NO: 70489 - protein, 577 aa, Listeria monocytogenes; identical to SEQ ID NO: 62969

SEQ ID NO: 70490 - protein, 527 aa, Listeria monocytogenes; identical to SEQ ID NO: 64370

SEQ ID NO: 70491 - protein, 713 aa, Listeria monocytogenes; identical to SEQ ID NO: 65469

SEQ ID NO: 70492 - protein, 639 aa, Pseudomonas fluorescens ICMP 11288
MKLQSIRLCNFQSFGNEPTVITFEDVTYLIGPNGSGKTAVLQALCRLFAFDPSLRRIKRSDFHVPADEDLVPEERSLWLEADFEFPELLEDEDNSTVAPHFAHMRLDTAEGIPRARYRLSATMGIDGDIEENLVYVLDVDKDANPLSTAVVTRVHRNTIQMHYLPARRDPADHITYGANALLGRLLRAVNWEDDRERIKGLTDEISECLSGNQSVSAFSESLNLMWKRLHRGTFFTDPKLTFVTSEIESLLRHMSVSFSPGHDENLVDFSRLSDGQKSMLYLSLVLSSHAIGRAVLTGKDVSFDADKLKPPSFTLIAVEEPENSLSPHYLGRIVNALNSSIGGADSQAIIATHAPSMLRRVDPENIRYLRLAANRATKVTCIALPDKEDEAHKFVREAVQAFPEVYFSRLVVLGEGDSEEIVLPRILQAKGAPVDESAVTIAPLGGRHVNHFWRLLSALETPYVTLLDLDVARHQGGWGRVTNVNNQLAKFAPEKKLPAWNIAKWNDDLPVRTHHWFEEGKVSVFVELEKRGVFFSDPMDLDFSMLLAYPNAYDVSLSDPDESTVKAVLGKSHHKSDQYNAAEQQLFGTYHSKFKLGSKPAAHISALAKLTDEDLLKALPPSLDRLANAIIAALEDIPE

SEQ ID NO: 70493 - protein, 558 aa, Pseudomonas fluorescens ICMP 11288
MISADVWKVADGLTLETNALLAVRELGKSLALTAGPGAGKTEVLAQRADFLLRTGNCRYPKRILAISFKVDASINLKERIRRRCGLDLAARFDSYTFHGFAKRIIDRFRPVLTGGDSLEPNYSIGDEPIQGKQIKFAQLIPLATKILSNSVVARNAICQTYADVFLDEFQDCTTEQYALLKLVFMNKPIRLTAVGDTKQKIMGWAGALDGIFIDYAKDFDARPLNLYRNFRSKPRLLRMQNEIIRTLDPAAVMADDLIIGDDGELLARNYDNSHSEAAALANIIQKWIDVEKIPLPEIAILFPRQIDLYGTPLMEQLAARGIPFRNEHESQDLVNEPAARLIIDYLSCLYREREPKAWINLMEQLVSFNDEDGESELQRNFERLYLAQRKEVKKLARSDAPYSGWWELTMKFLKNIGLPVLTTLSSDYEAKARLNEVIKNTRQQIEKLLEQEPDLLKALDLFSNDQAVRFLTIHKSKGLEFHSVIMIGVETQTFWGKVQEERCGFFVGVSRAKERLMITTCDLRYRPASNPPRWNEHRTPHAEFVTYVTPFLSAQPNA

SEQ ID NO: 70494 - protein, 712 aa, Pseudomonas syringae ICMP 11293
MKVVRIEVNNFRLLKKFSLDLESNLSLVLGKNNSGKTSLLSALEKFINSSEKRQIVFDDFNVDLKAALIKLVSGADPIGPENTYTPLGITLKLYIEYDGIDNLSPVSQLIMSLDPDDNHIVLGFEYLVSYPQLTAMRNDYNDVKEKYDNDSSLFLKENQHIYFDQVRKKSFSYSDPEVFTDLTKENISLADVISFRSIGAKRSVTNKDNDKTLSSQTAIIYKKTSENQEQQEAVEGFKKQLRSTDKELSEIYQDMFSGLLGKVAKFGGSRLSETHIKIASTLQHRELLDGNTTVMYTHDNHDLPEHFNGLGYMNLISMIFEIEMLMTSFRRSSKENPAAINLLFIEEPEAHTHPQMQYTFIKNIKSLLEESRMREDGVEIHLQTIISTHSSHIVAECDFDDIKYLRKSPLANSVDAKNLKALKSEYSSDDVNDNAQAELHYKFLKQYLTLNRAELFFADKAILIEGDTEKILLPAMMRKFDQETPDAGAIPLLSQNISIVEVGAHAQIFEKFIHFIGIKALILTDIDSGIKELLFEKDGVTPQLYKKGTQKIETIKCRPDDPAADHTANGALIFYHGKVREDLGYFTSLNIEGKALSKVGGEWKVDVDGCIFLAYQTKDDGYHGRSFEDAFFSLNKALLGTDSEKFPSLTPKWFNKYINGECDAFEFAEKAVGKKPSLAIEILLNSIPDKKSDFSNWKTPHYIQEGLGWLRK

SEQ ID NO: 70495 - protein, 641 aa, Pseudomonas syringae ICMP 11293
MVAQMKNLEEVSDEAKKILDTICEGKSFLLSGGAGSGKTYSLVEVITNLVTLKPLARVACITYTNAAVREIEGRASHPNLHVSTIHDFLWGVIKHFQVELKEVLLALINDDKILGFKVLDGNGEPEKLDAIEGDVRYKEYVKFREGVISHDEVIVLANEMFKRYDKLCRILKDCYPYIMVDEYQDTQAEVVDILLTQLTRVGVPNVIGFFGDAMQAIYDEGIGDLDVYKGEGAGQVREIKKEENRRNPKNVIDLANKLRNDGLFQVPSKDLNAPNMTSDGCIKDGHIQFLYSSNDDVNIVKEYLGWEFSESSGAKELNLTHNLIAAKAGFSELMRIYDGDKILEYVRRIKSYIKKKEPAFNSEGKSFGEVLAELKYQKTGKALKEVDPTDGMAIYIAEHQAIYDRALDFPYGELASLYIDKDQLIDDQKSDRSELGRGGGNRDDLIKHLFKIQKNVQLYLDGNFNEFLRVTEHAVTSKSDKVRLKERIVNLSKVDDKTVQQVIDEANVNGLVRVDDRLQSFIESKRYIYNQVAALPFSQFQKLFEYLEGFTPFSTQHKTKGREFPDVLVVLNNGRWNSYNFDYLFTDRMDKESVVNRTRKILYVCCTRAKSNLALFYHSPSDAVVEKAKDWFGHENVKNLD

SEQ ID NO: 70496 - protein, 765 aa, Pseudomonas syringae pv. syringae PD2774
MQIQHLEIANFRKLLSVRVDLAAETTLLVGANNSGKSSAMLALRKFLLSKASIFRLQDLTLSHLATIDAIGEAWEAADDSFPIPVANEWADWLPTLDIWLEAAQGELHHIRDLIPNFAWKGGHVGMRFRLEPDDMPTLFVDYRKERARVKELQQEIQKQAALGTQPPSLPLWPQSLHDYLNRRIGKTFKIRWYRLDPGQLRAPNPATRKANRQPLAATATPLERNPLTNLIRVHEINAQRGFGDSADEGVLEGGHGSGRKLSEQLRAYYSRHLDPGDSPDISDLEALRAIEAAQTAFDTRLSTSFAPALKEVAGLGYPNNSDPSIRVSTRLAPTDGMNHEAAVLFELDSVGGAPGAPPLRLPETSNGLGYQNLISMIFRMMAFRDEWLKKYRSPEEQSATGVEPIHLVLIEEPEAHLHVQVQQAFIKHAYHVLCSDPLLAKYPNLRTQLMVSSHSSHVAHEIDYENLRYFRRLPSGMAGISIPVSTVSNLSSVFGESNQTKEFVTRYLRAQHADLFFADAVILVEGAAERMMLPHFLRQHFRFLDQCYITILDIGGSHAHRLRPLIDALGIVTLVITDLDAGLLQVGKPVERKKGQTTNNPTVRHWMRAAGLGHDVDSLLDLSFDNKAQQIDDLFSIRIAYQTPITVRLPKTGLDVEALPNTFEDSLVLSNTEHFANKAGRGLMRSFAKALREAETSLELGTELFTKLKDGDKAEFALHVLGDSNFATLKVPTYIHEGLAWLQSKLERKSKELLIVPSAILEVTP

SEQ ID NO: 70497 - protein, 623 aa, Pseudomonas syringae pv. syringae PD2774
MSRQPEAATDDVPDADQVIQECLSLDHPKSFFLYAGAGSGKTHSLVEAVKNLKSRERQRLTFEGRQIAIITYTNAASEEISRRLEHDPLVVVSTIHAFSWRMIQGFNTDIREWLRAKLTRDIGELNEKLGKARGQNKTFLANQASRDSKARRLDSLDEISTFIYSPTGDNRGRQALNHSEVIQMAAAFIQQPPLLNVMADLHPVLLIDESQDTYGPLMDAFLQAQSLIPDRFCLGLLGDTMQRIYNDGKVRLEEAIPRDWAMPEKRMNRRCPTRVVDLINVIRASADSHQQKPKPNAIKGTVRMFCTQQIPGQGFELEEDIARRMAAITGDGQWAIGKDGRKSLILEHKMAGRRMGFEGVFTPLYGVEHLRTGLLDGTLPILKLFFEQVAPILQAAKTNSFSLMEAVRLQSPLLDTKSIKEAPDQLALLDKAGAATESLCELFNANDPLIGKVAHVLFETGLLDLPDRLVTALLLGATSDAPPQTSDRDALETHAYQILLGRPFSEMAAFAGYTEGLSPFDTHQGVKGLEFPRVMVILNDEEAGGFLFSYDKLLGVKPASDSDVKNQREDKDDSLARTRRLLYVTCSRAEESLAIVVYTAQPATAKQRVIEAGWLKAEEIEIL

SEQ ID NO: 70498 - protein, 784 aa, Pseudomonas sp. ICMP 19500; identical to SEQ ID NO: 64790

SEQ ID NO: 70499 - protein, 650 aa, Pseudomonas sp. ICMP 19500; identical to SEQ ID NO: 64791

SEQ ID NO: 70500 - protein, 771 aa, Legionella parisiensis
MRISFIEVQNFRKLKSIRIDLSKNRTLFVGANNSGKTTAMIALRRFLVDQKFNAYDFTLSNWTQINKIGAKWEKADITPLDLTEWEGTLPLMDVWLDVEPNEIHYVQHLLPTLDWTGGLLGVRLRLEPKKLEELHNEYVVARHHAISTINSAKQDKDRDYKVPLWPSCMKDFLERSLSSRFRVHSYILDPNKLVAPKNGSAQPQLLSPTAEYMEENPFAGLIRIDEINAQRGFSDAHSNGDSFSERGEENIGRGDTRKLSNQLRSYYDKHLDPSEMPESGDVDALEAIHEAQEIFDKKLATSFSEVLKEVQNLGYPGISDPTLTISTRIKPMDGLNHPSALQYEVISNYEDVQGIPPRLPEQYNGLGYQNLISMVFRLMSFRNEWMQVGKIGKKAITKSSETAFPPPLHLVLVEEPEAHLHVQVQQVFIRRAYEILRNHQDLKENRTLTTQLVVSTHSSHIAHECEFECLRYFRRKPASNPGDVPTSTIINLSEVFGKQDETAKFVTRYLKSAHCDLFFADAAIFIEGAAERMMIPHFIRENFPNLNQRYLTLLEIGGSHAHCFRPLIEHLGLTTLIISDIDAAENKGRKPSQPIVKGGNQVTRNTTLRTWIPGKESIDDLLDSAPSDKIKIYSEANFLVRVAYQLPLKITLDPSAGEINIAANTFEDALVYENIDLFKTLEGNGLVKKFNEALNQNKTPADLTTAMFEALKSGSKAEFALDLLFLKDPKVFNVPTYIREGLEWLQEQVCNKEEVSENISLSSSDQGGVAQ

SEQ ID NO: 70501 - protein, 635 aa, Legionella parisiensis
MKDVLAAYDNNIDDKADTEIIDCLSSQTPKSFFLFAGAGSGKTRSLIKALQYLQTNHSRYLRLYGKRVGVITYTNKACEEIKRRTGFDPMVKVSTIHGFVWTLIQGFNEDIKSWLKVELENEITDLREKQDKGRGGKASIDREKSIEAKTRRLISLAEIREFTYNPNGENHGRDSLNHSEVIKISAAFLIGKPVMQQLLINKFPILLIDESQDTNKTLMDAFFLVQAQHPVEFRLGLFGDMMQKIYADGKADLGQNLPADWAKPEKVMNHRCPKRIITLINKIRTDVDKKEQKPRTDAAEGIVRFFILKASSPDKIAAEKLIASKMAEISGDIAWNKPQEVKTLILEHHMAAKRMGFHDMYEPLYRNDALRIGLLDGTLSGLKFFTDRVLPLVEARMINDAFAVAAIVRKHSPLLSKPMLKSVGDKQPAQIQKTKEAVESLWKLWEGNKTPRFIDILRNVAKTNLFEIPESLQPIASRSDEQQLLAEVETKKRIEDHRENETVLDNWDEFLLTSFDQAKSYVDYVNDRANFDTHQGVKGLEFPRVMVIIDDSAAKGFLFSYEKLFGVKAKTKSDLENEGAGKETGIERTRRLFYVTCSRTKESLAIAAYSNNPQGIKQHVITQEWFAENEIEIIE

SEQ ID NO: 70502 - protein, 746 aa, Legionella tucsonensis
MQIAHIDIQNFRKLKACRVELSQKETIFVGANNSGKTSAMDALILFLKCSKRRDISTSDFTLSNWVEINKIAESWIVNTDENKMLISTSSWVPFLPAIDVWIKIEDDEIHYVSHLLPTLDWTGDLLGVRLIFEPKNIEVLYNEFTEAYVSARDTTERHNVDKSEDQHLSISLWPKSMHDFLNRELHKYFIINAYLLDPEKQSDIQSLPLGIEPLDFEPFDGLIKIDIINAQRGFSDVNADEGSTNSNRRLSSQLKQYYSKHLDPTELPDENDLDALSAIDMARAAFDEKLKVSFNSALCELEGLNYPGFGNPQIVLSSKVDPLGGLNHNAAVQFSVITNDDLSGIMPLRLPEQYNGLGYQNLISMVFHLIRFRDEWMRVGKAGKKKSDSNKFMEPLHLVLIEEPEAHLHAQVQQVFIKNSYKVLRNHDSLGDNKHFHTQMVVSTHSSHIAHEIDFTCLRYFKRHPAEGDNPVPSATVVNLTKTFGSDADTSKFATRYLKTTHCDLFFADAAILVEGPAERMLIPHFICSKFPLLAKSYISLLEIGGSHAHRLKPLIEALGLLTLVITDLDSLIGREKAPPEIGKNQLTGNETLKKWIPQNDELDKLLNTSYENKETGDGKIRVAYQYSLAVTLENNKKQDVIPYTFEDALVLSNFEFFRSKKDARGLMKKMVEAVNKPTLKEACEKMFEDLKTGKKAEMALELLYSTDPSHLLPPKYIHEGLKWLEQKISLRNKDYIVQSETKIGA

SEQ ID NO: 70503 - protein, 637 aa, Legionella tucsonensis
MNETDYSMCVDEEIYNCLNLDNPKSFFLFAGAGSGKTRSLVEVLKKFREKNIQRLKLQRQKIAIITYTNAACDEIKRRLDFDPSFSISTIHSFAWELIKPYQSDIKKWLKDNLKSEIAELNEAQEKGRPGTKASEDRSRKINSKLDRINSLENTKKFIYNPNGDNTSKDSLNHTEVISITVDFLMTHPLMRKILVRTFPILLIDESQDTKKELIDAFFEIQKIHADNFSLGLFGDTMQRIYTDGKSNLGQNIPIAWAKPEKKINYRCPKRIIKLINQIRSEVDGQAQEPAKSNYGFVRLFIADTRKDLDKTAFEFRVSEKMAEITGDNNWKELNNEVKILTIEHHMAAKRGGFSDFFTPLYEIDKFKTGVLDGTLQGISWFSNQILPLINALRANDKFQVSRIVKKYSPLLSTEVIKNSLTPREKIRTANAAVQKLYNLWSEGNSPSLIQILNEIYQSHLFQIPDIYMPIAARLKTQENRQTISLENHSDEDKIINAWDNALKSSFIQFEAYFNYISDHSRFGTHQGIKGLEFPRVMVILDDEESRGFLFSYEKLFCAKELSEADKKNRLEGKETTVERTLRLFYVTCSRAEESLAIIAYTKDPIKVKNHAISQGWFDENEIIDNLQECYKLLEAPE

SEQ ID NO: 70504 - protein, 660 aa, Sphingopyxis sp. H050
MLIESVTLSGFRCFGPEAITVPIAAEITAVVGPNAAGKTALLQALAKLFGVSRAQRTVQRSDFHLGADDDPDDRKAKDLFIDVLIGLPELEDGTATAETVAPSFRHMQIEREGEAPVCRMRLEARWEDDGTVDGEVSQDLFWIHTLDDDPPEDKCHPVSAAERGLIQLYYTPASRDAAAQVRATTGALAARLLRAIEWSSETEDAVEEASENLAAAFEAETAIAAIGQALQARWSGLHDEIVDTKPRLSLVSRRFEEVVNKIAVVFEQGPDGHERGLDALSDGQQSLFYFALAAAVFDLERKVVAGDVEGFLDDQLRIPALTLFALEEPENHLSPYFLARIIRQVRSLTEEGGAQAIVTSHSPAVLSRVNPREVRYCRCDPKTRISTVKKIKLPTGTGEDAKFVRGAVLAYPELYFARFVLLVEGDSERIVLPRLAEALDLLIDPAFVAIVPLGGRHVQHFWRLLSDLGIPYATLLDLDLGRAGGGFGRVKTAIENLIEIGVSKATLLKVDGGILSDGDFAKMHTWQDTEDRKILKGWVDCLKPHGVYFSAPLDLDLAMLKAFPDAFEATVPAGGGPKLAADKAAEAVLGTAGPGLALYTGAFKDYPDLLPAYRYHFLTRSKPATHLAALTHIKTKALRDGMPTILSDVLQHVAKNLRRD

SEQ ID NO: 70505 - protein, 634 aa, Sphingopyxis sp. H050
MAVLARRVRADQWAPIGVDALESNAMAVVKSTDNRSVIAGPGAGKTELLAQRAAFLLQTGTSPPPRRILAISFKRDAATNLAARVGKRCHRSHAGRLDSMTFDAFAKGLVDRFGQALPERWRPRPDYEIMFPTEALYRGFLSQDVGAPPPIIGSYADLQAIASKTFERSMLLGKPIPEDGWPIPAVGQWAADRFWQSSLHEGMKTRLSFPMIGRLAELLLRVNPMARDALRLTYSHLFMDEFQDTTQVQYDLVRTIFKDTGTVITAVGDNKQQIMRWAMAMDDPFAAFDADFGAQCTPLYNNYRSSPELVRIQHILAQALDAHAVEPVSKTTGTISGESCAIWDFSTPEVEASRLAAFVTSEMKTHGLGPRDFAILVRQKAAEYAAVLEPAFEAAKIPLRNEDGAVGAVKLQELLTEEASQLAVQLLRLSTTKRAGRYWSAGLNALAALQGISIEDEAGHARLARDLDTFALKIAATYPAPPASTSESLTIAKKLIDFIGRERLVAVHPAYAQGGWLEKVIEAIALHLASSGKDAADWGEALDVYEGIDAIPLMTIHKSKGLEYHSVMFVGLDDGAWWSFAGDQIEATAGFFVGFTRAKQRVAFTYCSKRGRRTKIATLYGLLEKAGVQIVQVA

SEQ ID NO: 70506 - protein, 601 aa, Sphingopyxis sp. A083; identical to SEQ ID NO: 64110

SEQ ID NO: 70507 - protein, 587 aa, Sphingopyxis sp. A083; identical to SEQ ID NO: 64111

SEQ ID NO: 70508 - protein, 578 aa, Lactobacillus plantarum
MKIQKIEVKNYRGLDGVSVSFDSNESFIVGKNNIGKTSTLDLLNTILSGNDFRSSDFQDEERPITANAKFLLSEEEIGMLDDNFDSSEENSVTIQFSQVDPVSQVKIIAATSGENITKNQIQKSNYIGFSSSRKPIQENDLTRQIGSYKLIPHLVRKFSEDKSMEIPETDKDNKAIINYINERLLHIKPFRDNQIHVGMETNYFDYITRSLRVQSNEGVDFSKLGFGTQFSSLIPLVLIDQLISWSRYQHLDEHLCSDNNGGQELHIILGLDEPEVHLHPNLQFAVREDIETLLLGKDQEFNKLVKELFNIDKVTGQMIVVTHSPAVLSNDYHQYIRYSSEINGLQVTSGQNLALSSNQHKQLMMQLPNVKAALFADAVILVEGETEYGALPVFASKLGISLVRENINIVNASGVKSTTALKCLFNNLGIKCISIIDKDDGNKATEDVFVTSQRDFEDECFELMGLRNIHEYFKIFYGTIENSNYNGSFWDCYFSSDYKSGRIEVLKAQKDVHEYVENYFTDHIDSKLVNEDNILSNLRTPFIKGYLKKKSVLNGAIIAQCLEGVPETYKKALNEAAK

SEQ ID NO: 70509 - protein, 576 aa, Lactobacillus plantarum
MIRNVQRVNQNTSRPTLDSKQLMVVNAKDKRLIVEAPAGFGKTSTMISMISYWVESGMLPHYKKILCLSFSVSAATRMKDSITEHFAEQFTQKSPMYQIIVTNFHGFCRMVLRKYGHLIGIQNIEKIDTVDINSVKSSVNGNRKKFDSMLDLESDIKSGALSVKGLMSRTSTYVSGLMSLLIPRNQITYDGIIIMVLHLFQQFPTIRSGYQHIFYSLCIDEFQDTNILGWSLIQILLCDNSRFVAFGDQMQQIYGFQGALPNLIDKLIEKKYSYVRLETNYRFASNPDMLAMDSALREYKDAPGHYSAELRIPIKLIFGNTVSDEGIAIISNIRKIKKNNQKATFAILVGSRSVSTDKLIRIFQNEFDTMDATFNTEDEEFIAFQSECLTLFESTFQNLPLVRQRVASFLSKVEESILPGSNIESYMKLLKGLLTYTVEKVTVHSRKEHVISVLESGALRRSLSEVDSEITVSTIHGAKGLEWDYVFIANFEQFEFPVYPEMQKLNLKPRSEKIQVTNNNEEAVKEILNKLYVAFSRAKQQVYFAYAGERFNKTGKSINANLSVLASLPFLEKTFV

SEQ ID NO: 70510 - protein, 720 aa, Pseudoalteromonas sp. H103
MKITSFTLKNYRRLANVTLVLDDKTAVLVGANNSGKTSCIGALHTFLKSPDNLKVRDISKKNWKHIQNLGKEIEEKFPSIEKMKGLSDALISLLPSLDIEITAEASEAYKVRDILPDLEWKGGALSVRINYEVIDVTKLFSEFINTREVVAKHQGKVSLWPKDLCDFLEKGRNFSKFIKQKHYVLSKETDPSSNEILQPLKFEALKKLIRVDVISEQRGLGAEDNADQNGPYSEKQRLNKLLRGYYEGILNPEDYPEADDLKVLGQQQNLENDFTKRLNDQFKAPFEELESMGYPGIGGNPAVEIFAQISGTDALQKSSSVRYRFDKKDEEFLPESYLGLGYQNLIYLTFRLLEFRDKWMRVGKSASSRDNVEEQIEPIHLVLLEEPEVNLHAQVQRVLVSKAYDTLRNHTDLRDKHTKKDKSEYQTQLVISTHSSHIINDIDFKNLRYFRRNDANTSIAMDHTTIANMSELFAHAKDELLFVSKHLTLTHCDIFFADGVIFVEGQAERLLVPEFIVKSFPDLSNRYISMLEVNGAHTHKYKALVEKLGVTTLVLTDLDSVDNSGKSCFPERNSDQKSNNDTLKFWHPQKETLNELVDLPKNEHIKTSEGAPLYVAFQKPTQISEEEVLSRTFEDALILANFGQEYFQKKPKLKNAKSAHEDGSKSLSESLYEYVQGLKKGDFAFDCLFHLADNESNSFNAPEYISDGLKWLAVQLSPKE

SEQ ID NO: 70511 - protein, 641 aa, Pseudoalteromonas sp. H103
MSDGFYLADTKPIDHDSNVDEAIKACLRIGSGKSFITFAGAGSGKTYSLKNALDFLKNQHSEDFSRRGKKIAVLTFTNNAADEIKDRIEQNPIFAVSTIHSFCWDAIGGFNEDIRKWYLGKIPTDLEELKEKEDKGRAGKASDARKRDIIRLNKKMEWLAQSRSFNYDPNGINSSPNALSHTDVLKIFSNLLTSKPMMMEIIVNKFPFIFIDESQDTNKDVVSAFFELQKAKSYKVVIGLFGDTMQRIFGGGEPELGKTKPSGWTTLDKKMNHRSARRIVGLGNQVRSEDDKRKQFARDGAAEGYVRYFLLSHGVSDKDQVEEKIRETMAEVTGDKDWTDTQSKETAILLLEHKMAGRRLGFGELWDTLSRSEKIKDRIAEGENTELNFFSSIVFPLAEASRKKRRAELMYILRENKSPLLEANVIDTNKNDPLALARVAEHAFRDVVSNDMVSFREVLEILAEHKLLRIPEKLQSFVADLEKTETESDTGQMGAGTEIELEPKERDDSEIDAWAEALETSFFQIEKYKDYIDGNSIFRTHQGVKGNEFERVMVVMDDDEAGGFLFSYEQYFGVKELSKKSQKKRKAGEETGLDRTRRLFYVTSTRAKNSLAHVIYTSDVTKVRESLMDKKLAREGEIIKL

SEQ ID NO: 70512 - protein, 668 aa, Streptomyces sp. AVP053U2
MQLTCAKVTNFRVLQDVAVKIDKKATLVVGRNNSGKTSFANLFDKFFGSDDTKFVLEDLSVSRIKGIKSAVEAYRTARAVPEDSSETREEQLKAAEELIPAISLQVVIAYTVEDDLALLSGIILDLGEDCLEARLEAVLSVKRPRDLLEQADAALARQGPAFDWGKFLRKNFSTFYAPSYWAVSALDPNVRREITPAAARRVLSVKSIHAQPRIDDVPADRARTLSKTFETFYKANSADEERNQNIEGIEQALAVASKSIDTNYDLLFRPILDELRTFGVGTIAPLQTPEIISLIESGDILRGSTRIQYASPGSDHPLPEGHNGLGYSKLISTVVQVIGFYHAYLRLKPRPALQLLFIEEPEAHLHPQMQEVFISNINRLLEREEWAVQAVLTTHSSHIVASSGFGAVRYFDSNGPTLKVKDLSDFEHTTKQQTNGKTTLQFLAQYMHTHRCDMFFADRIILIEGTAERLLLRAMISKCAPELANQYISIIEVGDAYAARFKTLLEFLGVPALVITDLDSVDPATKKRCAPDTGGALTSNATLKDWMPKLSEVKALLQAPAGAKVCGNVRVAYEVPEADGGPCGRSFEDAMIIANADMFARNLGTLALKNAFTSEVGIMPSPEAIAAAAFPIAERLSRKKTDFAFDMVITEGWTVPRYIREGLQWLMR

SEQ ID NO: 70513 - protein, 524 aa, Streptomyces sp. AVP053U2
MEAGAGAGKTTALVEALLYLLDTRRSALEQAGKQIACITYTNVAKSQIKQRIADDPLVYVGTIHEFLWSLIQDHQRELLDALIEYNQGLPRPQDMAELASGLRIEYHDRGRRFADGKISHDEVLALASALIGSHSKLARIIAHRYPVVFVDEYQDTFPATVTLLLDHIATATGPACTVGFFGDSMQKIYNTGVGALERDDLITLTMHGNHRCAKPIVDVLNKIRPDLIQQPDMDKTAGEVRLILKLPGAEDENPVQRARAVLDTCGWPATGVKYLSLTHRSIAAAHGYPNLLQLYSKRGSHGRDDLLEGTEPYAQFMKSIEELCAAYEAQEYAHLTSLLGTGPLTIRKHSDKARINGILQEITAVRATGTVGDVLDAVTRAKLITPPGRVKSIERTIGAEDLDERAQRDADFAAGLRAIKYQEVVRLTEYRNELTPFSTQHGVKGDEFENVVVMIDDSAWNQFNVDRMLTGDDHRKERASRSRNLFYVCCSRAIRRLAVVFVTPLTPPSEAVARQWFSGATVHD

SEQ ID NO: 70514 - protein, 675 aa, Xanthomonas translucens pv. translucens
MRIEKITIENFRLLQCTEMSLERTTTLIVGRNNSGKTSITEFFAHVLGDEPKKLRLEDFSAARREAFLDAKQLRREGKDEKDVLAALPVIVATVLVSYDPAQELGTLAPFVIDLNPECKTAKVRIEYRPAQEALALLLDAPVPVGGADDAAHLFKNLKEVVPKAYEYKVTAVDPNDSTNQRTVELKQLGKLFQCGLVSAQRSLDQHKRGEPNVLGKLLESLFTTATSATATTTDQAIAAELKAAVSNIEKSMHEGFNEKLTALLPKIKSFGYPGLNDPDLRTETALNVVSLLSEHTKVFYTGAHGVHLPEGYNGLGARNLIYILLQLLSFHKSFRVNSIFPAVHLIFIEEPEAHLHPQMQEVFIKQLNAAVQVFSAEYPDQEWPVQFVVTTHSSHVANAAPFDAVRYFLAKTVNDGETRHTIIKDFRKGTDNIKEPDRRFLHRYMTLTKCDLFFADKAILIEGPTERLLMPRIFQIIDEALDDPKKLSHQYVSTVEVDGANAKIFSPLLDFLELRTLVITDLDSVKMGDKGRYVKCPYSQGERSLNTTLRDWFKINDGEALTLDFLKAKTPEEKIKGYQRVAYQIHEAESNFCARTYEDAFILANPALFALKEGDDWGDLSFKLASDMGKVETALKYGLSEDAWKVPAYINEGLLWLADSTPLPLPSVALPQMEA

SEQ ID NO: 70515 - protein, 579 aa, Xanthomonas translucens pv. translucens
MALEKLSPAAEAAQKAQQHVNQCIDHHQCFRLEAGAGAGKTYSLVQALNRLISERGSAYLRRGQKVACITYTNGAKSEISQKIDEHPVVLVETIHSFCWGCIAQFQSILRNEVGQIQRHAEKIAEAGGVGNRNIEYDLGYFGIHDDRITLYHDDIPELMARFLAMPKFQQIFTGSYPVVLIDEYQDTNEKFMSALATHFLEPKKGPLIGLFGDHWQTIYRDDFDLAALPNVEGIDKGSNFRSVPAVVDMLNRLRPALPQVVDDETATGEARAFHANSYTGERTDTAHSKLDTPPDITRAYVAALRKQLQDEGWDLSPGVTKVLMLTHAALAAEQGYPSVAEIFKSHQDAISKLDDATLEFLGRVIEPACAAYKAKKYGLMFDVLGQATTLRKHSEKLAWADDMMSLDALRENGTVGEVLDLLKKTRRPRLPDNVIRREEDMAAFDPAAEEPEKRSVDRHRRLREVKYQEIVNLVRFVDGFTPFATQHSVKGAEFENVLVVCGGGWNQYNWPRMLEYMDAGAKPTAAHQKGFNRARNLFYVGVSRPKRRLAVLFTQTMNDKSLAVLNTLFANKVAEVNLP

SEQ ID NO: 70516 - protein, 650 aa, Pseudomonas aeruginosa; identical to SEQ ID NO: 65324

SEQ ID NO: 70517 - protein, 555 aa, Pseudomonas aeruginosa; identical to SEQ ID NO: 65325

SEQ ID NO: 70518 - protein, 765 aa, Enterobacter hormaechei subsp. oharae
MRIKHIEIANFRKLKAVHIDFSEKTTIFVGANNSGKTSAMIALRRFLVERSGFSINDLTLSYWPQIDAAAMQWEAAPDDQEPIQWDRFSPFLDVWLDVPPNELHHVQKILPTLDWDGESIGVRLRFEPKDPDALQHEYLTAKRAAAEVMAQAKEYGEQVSSTTAFALWPRSMMEFLAQRMRSTFEIRAYLLDPSKLKMPEEGRASPQTLPESSDPIDGGDPFNGLIRIDEISAQRGFGHSDQTGYTRGNESREDMAEPRMGKKLSSQLRNYYSQHLDPFDTPEPKDLQALMALHEAQTAFGTRLADCFSDALTELENIGYPGVTDPKLTITTNIRPIDGLNHPSAVQYEVPTHVTGSFGAHRLPEDSNGLGYQNLVSIVFALMAFRDNWMKVGKAGKSKVAEETLIPPLHLVLIEEPEAHLHAQVQQVFIKQAYGVLRKHDKLKDSSRLQTQLIISTHSSHLTHEAEFSSLRYFRRLPALAQSGAVPLTSVINLSEVFDGKDKTERFVKRYLKATHCDLFFADGAILVEGPAERILVPHFVREREAYAYLKRSYITWLEIGGSHAHRLKNLIEHLGLNTLIITDIDAKDGTTIAAVVPKRGMGQRARNETVKTWLPKEESFDALLDMESERKVLAEPGGYAIRVAYQTPIFMPFKSEEALEAVANTFEDALVYENPGLFANLDGYGLIAKFREALKESADLSELARKIFEALKNGTKAEFALDVLFSEEIERLKVPQYIDEGLVWLAEQLKRKEYDVLGKTEVGE

SEQ ID NO: 70519 - protein, 610 aa, Enterobacter hormaechei subsp. oharae
MPADAEIRKCLDLDTPKSFFLFAGAGSGKTRSLVSALQYVRDTFGDELRLKGQRVAVITYTNAASEEIQRRLDFDPTIDVSTIHSFAWSLIEGLNRDIREWLRAKITTDITKLEAEEAKGRKGTEASRTRLKKIASRTKRLQNLDNVKRFVYSPTGENLGRDSLNHAEVIHLTAYFLTTKPTMQNILIGRNPILLIDESQDTNKFLIEALFAVQAQHKETFVLGLIGDMMQRIYSDGKDGLDKNLPADWATPGKQMNHRCPKRIVKLINTVRSAVDKQIQRPRTNSLEGSVRLFVLPNHTVDKPAAERKIAMYMAEVADDEQWRNLALCKCLTLEHHMAASRLGFLELFAPLYSVKSWRTNLIDGSLPCVRFFTDEMLPLIQAKFAEDRFSIARILKKRSSLVSPDALQYAADQRSQLKLASAAMERLMALFAQGSDPSLGDVLRFVADSALLPIPESLQLCIASDNTLPSVTPYVDESDADHQSERTMAIGEFLLAPFSQVEKFASYVSGKAPFDTHQGVKGLEFERVMVIMDDEEARGFMFKYENLFGAKSVTDPSVEAVRRLFYVTCSRAQQSLALVAYAASPEQVRRFVMDQGWFNADEIVIGIPE

SEQ ID NO: 70520 - protein, 798 aa, Enterobacter hormaechei subsp. oharae; identical to SEQ ID NO: 65816

SEQ ID NO: 70521 - protein, 622 aa, Enterobacter hormaechei subsp. oharae; identical to SEQ ID NO: 65817

SEQ ID NO: 70522 - protein, 591 aa, Enterobacter hormaechei subsp. steigerwaltii
MSILISSVRISGFRGIKEIEVELGRIAVLLGTNNAGKTSFLKSLQLALGDYQRYFSDEDLHIDSSGLKVNEVIVDLKIIPTDEHYNKTEEFDEKWIDVFGDNIAVDANGHEFVAIRTKVQPDEIKGGFNTQRYYLNEWGEFEGWKEIVVNERRKVRTKVDAIPYICIEAQRDIHHELKDKSSYIGKVLSYIKYEDEDVTALEEMISSINETAVSRSEPLQSLKNSLQGLNQSFLGSSHTEITPFPKKIRDLSKQFTVHFGDEENHSFSMEYHGTGTRSWASMLTVQSFLSFMHERHELENKALHPIVGAEEPEAHLHPNAQRTLFKQLSSSQGQIILSTHSPYLSAMAEIEDIRSFIKKGDGVTVNCLKKRIEHDEKNALKREIMLTRGELLFSRALILCEGVTEEQLIPSMFELYFGRTMFSVGVNCVSVSGKNYPPFIKLASNLGIPVCIISDNDGDTHGEINRQVARLVREDGLVLNPDCFSLEFLKETNDIEAELYNELNIREEIIESLVLSETKASPNERYRDAKKREIEALQDGAIIEKMRDSKASYAGYLGVILAQNANGKRIEELLPESVIIAFNKVRGWLEL

SEQ ID NO: 70523 - protein, 632 aa, Enterobacter hormaechei subsp. steigerwaltii
MIDNLSQSQIEVVKAPMGGAIQVLASAGSGKTRVLTERVRFILNNSARGSVVALTFTNKAADEMLERLDDGSENRDRIWIATIHSVAQRVLESYGYTIGLPKELHIFERDQDRMEVFLHSLREQGVNIDEYLDVEDVREKRNREKIISQYLNVFSMIKRELLTEDEVKIKFSSNPRIWNIYQDYQSALLESGGVDFDDILLYAHKILLNQDSVARIYQKKYVALFVDEAQDLNRAQYEFIKVLCGDKIKDVMMVGDSDQMIYGFNGSSSDYFIKSFVKDFTPKTYYLNENYRSSKAVIELANKLKPNSQVGVNAALDGYKSFNALPDEESEAIWVCDSIQHILDLKRHPEIEGDIDCSKIVVIGRNRFVFKAMESELKKRNIPYFLKRSDRNESPVSLIGKIVDLAIRVKVNPKDWVDGKRLYKLIGLELNPESDVTYDISKVYADIKKSSNLNKDLISLVLAHIEHISVDTPNILKFCLDIKSELVNLGANTKDSAKEDDIATGIKDIEQLQSMWTRFKRKGLGDNLSSFRNALALGQLNDDTLNNGIMLSTVHTMKGLEKDIVFLIGMCEGVFPDYRAKSKVELDEERNNAFVAITRSRRWIFVTYPEKRMMPWGDYKYHPASRFFLDMQ

SEQ ID NO: 70524 - protein, 729 aa, Enterococcus faecium; identical to SEQ ID NO: 62500

SEQ ID NO: 70525 - protein, 597 aa, Enterococcus faecium; identical to SEQ ID NO: 62501

SEQ ID NO: 70526 - protein, 623 aa, Pseudomonas aeruginosa; identical to SEQ ID NO: 65246

SEQ ID NO: 70527 - protein, 551 aa, Pseudomonas aeruginosa; identical to SEQ ID NO: 70253

SEQ ID NO: 70528 - protein, 634 aa, Pseudomonas putida; identical to SEQ ID NO: 63582

SEQ ID NO: 70529 - protein, 558 aa, Pseudomonas putida; identical to SEQ ID NO: 62801

SEQ ID NO: 70530 - protein, 565 aa, Vibrio cholerae; identical to SEQ ID NO: 62564

SEQ ID NO: 70531 - protein, 458 aa, Vibrio cholerae; identical to SEQ ID NO: 62565

SEQ ID NO: 70532 - protein, 568 aa, Vibrio albensis
MIWLSVNFDVFIKNLLRLWYEKILLLTSVNLWGDYRVDTIEAQRGFTDPHSDSGKTVSSLSSQLNEYYKRHLNPSEMPEAEDLGALEAIENAQTEFDKRLDTAFEKTLGEIKELGYPGFTDPDIKLSSRLNPIDTLEHDAAVVFDVRKQNFGDNTFSLPEQYNGLGYKNLIHIIFQLITFRDRWLRVGKIGKKRSNEDIAIEPIHLVLVEEPEAHLHAQVQQVFVRKAYKVLREYGQVKEHLTTQMVISTHSSYVAYEAGFETLRYFKRKPASQEQPTPQAEVVNLSTVFSSQTKGKSDMSATNKFVSRYLKTTHCDLFFANGIILVEGAAERMLLPHFIAHHHKNLRRSYISILEIGGAHAQRLKPLIELLGLPTLVITDTDACSSSGNKARPKRGASLYFGSETLKSWFNFSDVSLDELLDLPSERKVRDNVRVSFQCGIHTKFSPKARKSKEVIPYTFEDAVALTNIELFKKLSKSSGMVKKMHLATKMRTLDACCNAMYKALDGEKAKMALDLLFDVEPEKLLVPEYIKEGLEWLESELDTMSLEYAWAPEANTSEDVKEFVDA

SEQ ID NO: 70533 - protein, 618 aa, Vibrio albensis
MRDFNCLTGVDREIYEYLNLDNPRSFLLFAGAGSGKTRSLVNVLQEIREKNLARLIQSGQRIGVITYTNAACDEIQHRLSYDPLFHVSTIHSFVWELIEPFTEDIKGWLKTKLSADIDDLDLMISKARDINGKTTQQNIRKKESKSKRLNELTLVRKFSYSPTSNKVERGTVSHEEVIQITATLLNESHLLQNILTNRYPILLIDESQDTRKELMEALIRTQSLNRSKFSLGLFGDLMQRIYSGGKDDLETALPEDWKTPSKIVNYRSPKRIVSLINSIRNEDDGKKQEPKAEAIQGRVRLFIVDSVSANKFEVEDNVRYRMSSIADDALWLEPNQTKVLTLEHAMAANRGNFDKFYMPLSKVDHLRDSMLNGTNSSLRFLCNQLLPLIYAVKTRNDFLIASIIKKYSDVISPNNVQFCTDPISTLKETNDSVSRVAAMVVDGDPSISEVLKLVDKSSLLYIPDALKVLLVDVDRESIENEIEPSETSFAWEVALNAPLSHLNNYSSYINEKLGFGTHQGVKGLEFDRVLAIMDDDDSNGFLFKYEKLFGARALSSTDIKNQAEGRDCVVSRTRRLFYVICSRAQKSLAVVAYTQDPEAVRNKSLASGWFTEDEIEMM

SEQ ID NO: 70534 - protein, 663 aa, Vibrio albensis; identical to SEQ ID NO: 63008

SEQ ID NO: 70535 - protein, 585 aa, Vibrio albensis
MTTLSPAAQASVETLESLRSCIEQGQCFRLEAGAGAGKTYSLIESLKYVISLRANEFAISGKQVASITYTNVAKDEIKARTDNNPVIFADTIHAFSWSILQNYQEQLRQLIPTLGAKWQERIAESAGISHQTVKYDLGFASIKEQEISLHHDDVVALMARMLAFPKFQKLLKSKFPIIFIDEYQDTDSALAESIVQNLIDNDSGVMVGLFGDHWQKIYGSSACGLIRSPAGKIIEIGKRANFRSDKNIVECLNRMRPELPQAESDPSSTGTIKVYHSNDWQGMRQAGGHWKDDLPEEETRRFIQQTKSLMVEHGWDMSLSKTKILFLTNNLIATEQKFKNLADCFNYSEDYLKKNDKYIEFFVDTVELTALAFQQRKYGELLQIKKKNRSYLTSQADKTAWIENLEKLMRLRDTSTIGDVLDLLITTNVPRVPAKVSDSEARYQTLSVRDQESLAPDELRFVEKIRRLRAVPYFEVINLAEYINDKTPFSTKHGVKGAEFDNVLVVCGRGWNHYNWDQMLEWMEDGVPQRNAETFERNRNLFYVSCSRAKHNLTLLFTQRLTDKSLTALGKIFGHENIKGCPFKV

SEQ ID NO: 70536 - protein, 594 aa, Enterobacter hormaechei subsp. oharae
MYLSNLRIANFRNFETVDIPLNGNIVLLGENRVGKSNLLFAIRLVIDPTLPDSARQLKLSDFWDGCDLSTSPQIEIHLEFADFDSDASLSALLTDFRIAENPALARLSYVFRKKEDIAGEPKSSEDCEFIVFGGGQEQRTIPSRVRRRIAIDMLDALRDAEAQLASWRNSPLRPLLEDAFGSLSRADLDRVASALESATGTMEAFTPIKNLEESLRGGILNLAGTAHDLNARLRFAPTDPLRLMRSISMFIDDGKRGITEASLGSANVALISLKLAEFAWRRAKNERNFSLLCIEEPEAHLHPQLQRAVFDKLFNNADKAQSLIVTSHSPTLASIAPLRSVVRLCRDDSGRTHAFSLAELPVTTDELDDIERYLTATRAELLFAKGVIFVEGDAEEVLIPGFAEAMGLNLDELGITVCSVAGVNFEPYVKLAGSLGIRMAVITDWDPLDGSKQPLGKARAISIWDAFCAVRPESHKLSAEWKAWFVDKGFEECSDVWKKVGIFLSPQTFEVSVANTPILKDALLNILDAQGFGSLRSSRIASWRAGQDPDPGQLLAMISDIGKGRMAAKLKKKAIGLAPPEYIAAAIQYVVSNV

SEQ ID NO: 70537 - protein, 593 aa, Enterobacter hormaechei subsp. oharae
MSDRHALSMALSELSSNKEQYGAATEQGHCVVIAGPGSGKTKTLTTAMARALMDDITDPRGVACITFNNECAAELEERLACFSVACSERNFIGTVHSFALNQVLIPYSRCIPGLLPNDFRVATRDECRAAVEAAYLAKFGAIGDPHTRWKFAEEKRRRDVNRQLPSWRSNNPELADFIELYEAHLRRLGLIDFDDMPLIAFRMIREHDWIRNGIRSRYPVLFVDEYQDLGHALHELVLLLCFDAGIRLFAVGDADQSIYGFNGANPRLLDSLVSRADVKTFRLRFNYRSGAKIIRASMGALGEERNYRGPDGTAEGEIGFHGVEGDYEKQARYIAQDLIPSLTERGFKPERIGVLYRAAWLGDKVADALKAEGIALMRTDTNALIKRNSRLARFIEACSQWVTGGWKEASPAFNLLLGQALSLVYGRRASRTEEQLLTVQLITFLRSGIAQAETAHQWLLRFDKELISGWQIITENPQVEWNVVKELLKRTDPALKQDMALIVFAGKEESTRRITLSTLHSAKGREFDVAIMFGVNKYDFPGKRDLVSDNALREARRLFYVGVTRPRKELHMVYRKGEHSPWIAELYHRSQQT

SEQ ID NO: 70538 - protein, 712 aa, Enterobacter cloacae; identical to SEQ ID NO: 64890

SEQ ID NO: 70539 - protein, 594 aa, Enterobacter cloacae; identical to SEQ ID NO: 64891

SEQ ID NO: 70540 - protein, 770 aa, Enterobacter aerogenes; identical to SEQ ID NO: 64882

SEQ ID NO: 70541 - protein, 649 aa, Enterobacter aerogenes; identical to SEQ ID NO: 64883

SEQ ID NO: 70542 - protein, 711 aa, Enterobacter hormaechei subsp. steigerwaltii
MLRAQSITMYINKLAIRNYKNFRSSNFYFVKGSVNTIIGENASGKTNLFNAMRLILDDSLPMNSRILSNEDFYRGLSEPFGHWIIITLYFDDLSESEEEQVLANYTVNDGNDKSIKEGNYTFIYRPKFHIRQKLYELTLEDDNVEARSASFTEFASNHIISKETYEAVAFVRTKVDLNNDEIYKQVVGDFDSYSFSNPNDDDATVLGVKKPPYFALGSEVACTYVKALRNVVADLKYYKTNPLYKLLTLKSKQIDDRRDIVENVKEINGKISAIPEIERLSNKISASLLNTVGSTYSPKILVSSQLPEDFTELIQSLGLVVEDSLDYNGSGKIDDLSLGGANLIYLALKLYEYEEIRDSEEHITHFLLIEEPEAHIHNHIQKTLFDNFNFKNTQVFVSTHSTQISSVSKISSMNILSRQNGFTDVYHPSFGLTPKEISSVERYLDAIRSDLLFAKSVILVEGDAELILIPAMVKETLGISLDELGISLIKVDGTVFKHISNLFHEKRLKRKCAILTDLDSAYVKVADNIFDADFVESLVDAEDDGLRRKEELDKYIEGNEFITVHYAENTFETELVRYDENNNLFIEVMKTEYKKEAYFKKAESDINSSDLRVRYKRVLKFAKKIGKGWLATEMVEHLSVDNRVPDYILQAIQFVLRDRNVEPIYQKMLDYNMSLMGVKAFDCINAEKDFSSKMIEYKKHFNDSFVRLLEL

SEQ ID NO: 70543 - protein, 583 aa, Enterobacter hormaechei subsp. steigerwaltii; identical to SEQ ID NO: 64895

SEQ ID NO: 70544 - protein, 765 aa, Enterobacter asburiae
MRIKHIEIANFRKLKAVHIDFSEKTTIFVGANNSGKTSAMIALRRFLVERSGFSINDLTLSYWPQIDAAAMQWEAAPDDQEPIQWDRFSPFLDVWLDVPPNELHHVQKILPTLDWDGESIGVRLRFEPKDPDALQHEYLTAKRAAAEVMAQAKEYGEQVSSTTAFALWPRSMMEFLAQRMRSTFEIRAYLLDPSKLKMPEEGRASPQTLPESSDPIDGGDPFNGLIRIDEISAQRGFGHSDQTGYTRGNESREDMAEPRMGKKLSSQLRNYYSQHLDPFDTPEPKDLQALMALHEAQTAFGTRLADCFSDALTELENIGYPGVTDPKLTITTNIRPIDGLNHPSAVQYEVPTHVTGSFGAHRLPEDSNGLGYQNLVSIVFALMAFRDNWMKVGKAGKSKVAEETLIPPLHLVLIEEPEAHLHAQVQQVFIKQAYGVLRKHDKLKDSSRLQTQLIISTHSSHLTHEAEFSSLRYFRRLPALAQSGAVPLTSVINLSEVFDGKDKTERFVKRYLKATHCDLFFADGAILVEGPAERILVPHFVREREAYAYLKRSYITWLEIGGSHAHRLKNLIEHLGLNTLIITDIDAKDGTTNAAVVPKRGMGQRARNETVKTWLPKEESFDALLDMESERKVLAEPGGYAIRVAYQTPIFMPFKSEEALEAVANTFEDALVYENPGLFANLDGYGLIAKFREALKESADLSELARKIFEALKNGTKAEFALGVLFSEEIERLKVPQYIDEGLVWLAEQLKRKEYDVLGKTEVGE

SEQ ID NO: 70545 - protein, 610 aa, Enterobacter asburiae; identical to SEQ ID NO: 70519

SEQ ID NO: 70546 - protein, 765 aa, Enterobacter hormaechei subsp. oharae; identical to SEQ ID NO: 70518

SEQ ID NO: 70547 - protein, 610 aa, Enterobacter hormaechei subsp. oharae; identical to SEQ ID NO: 70519

SEQ ID NO: 70548 - protein, 594 aa, Enterobacter kobei; identical to SEQ ID NO: 63820

SEQ ID NO: 70549 - protein, 605 aa, Enterobacter kobei; identical to SEQ ID NO: 63821

SEQ ID NO: 70550 - protein, 770 aa, Enterobacter aerogenes; identical to SEQ ID NO: 64882

SEQ ID NO: 70551 - protein, 649 aa, Enterobacter aerogenes; identical to SEQ ID NO: 64883

SEQ ID NO: 70552 - protein, 770 aa, Enterobacter aerogenes; identical to SEQ ID NO: 64882

SEQ ID NO: 70553 - protein, 649 aa, Enterobacter aerogenes; identical to SEQ ID NO: 64883

SEQ ID NO: 70554 - protein, 765 aa, Enterobacter hormaechei subsp. oharae; identical to SEQ ID NO: 70518

SEQ ID NO: 70555 - protein, 610 aa, Enterobacter hormaechei subsp. oharae; identical to SEQ ID NO: 70519

SEQ ID NO: 70556 - protein, 622 aa, Enterobacter cloacae
MYLAELTIKNFRKLHDARLKFQPGLNVLVGPNNVGKSAVVDALRTLLAGQDETYPRLDDSDRHRPNEGESSGDISFHFVFRDLSVEDEADFIAALKPNGDKKMEAHIHVQYTDMDKTGRFKVRRWCGDHPEVPLTSDMMENLRGVYLPPLRDAAQGLRPNRNSQLARLLHLLTDEAGRDAINTALKTLDETLKQDKSIQSTHTAISARHNSMMGVQLAQELAVGLSVTDFQRLSSRLTLTAEAMEIEKNGLGFNNLIFMAVVLSELAKNTDSAFRSLIIEEPEAHLHPQLQRVLLKYLAGIPTGEGEKPVQLFVTSHSPNFASNSKLDSLVCLIENEAGIQTFFPRDIKFEKGKREKLERYLDVTRAELFFARRVIFVEGTAELMLIDALAKKMDFDLREYGVSLISVEGLNFDSFLPLFGEHGLRIPVAVVTDADPFEEEEIEIECEKGEEEIDDIIAEAAYREETNALEEEEPAGNAEKKKKVKRKEVYPALGDVVQLSANTMKMKNLEDNFVKVFHGLKTLEYDLALIEANRNPMLTALADPHPKISTALKKIVDAQPDNTTKAKALFCGMFERKGSVNIQKGRFAQALAEQILKEPEFEAPEYLLNAIKHVCHGVAKP

SEQ ID NO: 70557 - protein, 576 aa, Enterobacter cloacae
MKLSNEQIDIIDAPLGSIAVTACAGSGKTATAIRRLISIRQKMQDSRGRVVLLSFSNIAVNTFNKGYTELASALPDDINRRRVEVDTLDGFFTKHILRPHAYRTMHATQSAYLVSGTEPFLTKFQYWREGSHPLPLKDIKVGMLNKDFFFVTSKGDKLEQLDKTEILKIINRLGKTGAYTHDLGRYWVYQTLVSQPAILRALAARYPQILVDESQDLGTVHQEILELLINAGVQVTLIGDVNQGIYGFAGADGEFLKNYDTRAEVTGYMLTRNYRSLPPIIKIANSLCGRNDESDRQNEKGGAFFIRYKESELSKLTGAFKAHINELGIQLQDSVILCRGAERAEKIAGRASSVGQGMVKILAEASLLRDLHGNYHGCFKLVCRAIIGLLDNAPHGLSSGLQSLSNADGMSGLRRLLWSFSRSTDLGLPSSTLTAKTDWHNKLLTNVKALLTEIEKQYGYKISGAVGTKLKKTSLPDLPLASATITQAPGIRVETVHQVKGESIGAVMYLAKKPNIEALLSGTGDEEGRIGYVAITRAKNLFWLAVPDSCLKELKEKLINAGFQECVTPVEIAAHD

SEQ ID NO: 70558 - protein, 714 aa, Enterobacter cloacae
MLRNQSITMYINKLAIRNYKNFRSSNFCFVKNSVNTIIGENASGKTNLFNAMRLILDDSLPMNSRVLSGEDFYRGLNDPFGHWIIITMYFDDLSESEEEQVIANYTINNGNEEALKEGNYTFIYRPRFHIRQKLYELTVDNKDLESRLEAFTELKSTCIISKETYEAVAFVRTKVDFNNDEVYKQVVGDFENYIFSNPNEDDATVIGVKKPPYFALGSEVACTYVKALRNVVADLKYYKTNPLYKLLTLKSKQIDDRKDISENVKNINEQISAIPEIARLSNKISTSLLNTVGSTYSPKILVSSQLPEDFTELIQSLGLVVEDSLDYDGSGRIDDISLGGANLIYLALKLYEYEEIRDAEEHITHFLLIEEPEAHIHNHIQKTLFDNFNFQNTQVFVSTHSTQISSVSKISSMNILARQRGYTDIYQPSNGLQPKEISSIERYLDAIRSDVLFAKSVILVEGDAELIIIPELIKVTLGISLDELGISLIKLDGTVFKHISNLFHSNRLKRYCAILTDKDLAYVQEPDELFDADFVESLKNAETDGLRRERELAEYVEGNQFVSVFYAENTFETELVRYDENSDLFNSVIRTTYKRSGDIERVVAGINSDDLRVRFRTALFFANKIGKGWLATEMVEYLHNENRVPDYILKAIHFALKDRELNAVLTKMLAYNMSLMGTHWDDVCNKINSEPDFDKKMQEYRKHFNDSFSRFWEL

SEQ ID NO: 70559 - protein, 583 aa, Enterobacter cloacae
MPYRNLTSEQLDAVKFDGNLLLTACPGSGKTKTLVSKLCFILENKELFDIGKKKIVALTYTNVAADTILERIISYGINSDSLWIGTIHSFCLNWIIKPNIDRIPRLSKGFNVIDEYEKEFILNDLRERYNLSPYDKIDTLLDLSFTPVYSRNTAEYSVVKAYHSYLYENRLIDFDLILNLTCNLLLKNDVLCERLSLIMRYILVDEYQDTSHIQYEILRLIVSKRNSLVTFIGDKEQAIYTGLGAVVKNREELFDYFNLEELEEMRLTGCFRSSQSIIDFYSKYKDDAYYINSLSELKTFPSVILKENSVDITQLSVYVSGIIRTHLEQGISPGEIAVLCPSWFDVIKLSNEIISLNSDLDIDGIMVSPIPKNNENLWLNLVKLALIEKNPSNYLVRQKLLRDLLKELNDLESYTKFLSPKQIIKEINKIEFALDYNCEIDIWIKNLITNFCSSLGLDVNNQSYAYKEMICLIDATKKRMAKYSMNYRANDLHSFFNFKSGVKITTCHSTKGDEYDVIICTGLLNGKIPNWNDIIDCSPAHQNYVARRLLYVIGSRAKKHLYLISESGHKTQKGYPYQVTPQL

SEQ ID NO: 70560 - protein, 710 aa, Enterobacter cloacae
MFIKTLSVRNFRNFKATSLSFKKECVNTIVGENSSGKTNVFEAMRLILDDTLPYYKRYLVENDFHRGLGTAFGHWVIISLEFDEIGGDEESELLCQLNTTVNGGGTGRITYIYRPQFYIREQLFNLNDIGDVDERRSAYNILKEQYSIDKTTYESLVLCQGTADFSDDGLYTHVVGDFNDYLFPDPKLERIDLIGNRQRGYNIQDNISCTYARALRDVVSELKNNRFNPFQKLLEYVSKGIDNDDTLSENIKSVNDRISSIEEVKRLSEGILLSITNAVGTTYSPVLNVTSELPCELKELVKVLQLKAGDSLCEGYVSELSEMSLGGANLIYLALKLYEYEEGISKNLLANFLIIEEPEAHIHTHIQKSLFSNLKNNKTQVFISTHSTHISSVSNISTTNVLVKNGLETISCSPSNGLEKEKINRIERFLDAIRTDILFAKNVILIEGDAEEILIPHLVKNSFGITLDELGISLISVRGTGFELLSSLFHSDRIKKKCAILTDDDINLYGDNKPDYLSQDDYNKAVNSAESGVARKVILDKIVRNNAFIRAYFSKYTFEIDLVLSGAVRYFDEIAAESFEKRAYYTPYQEAFQSSDRQKIGCYALKLANKHKKGWFAMMLVDKLNADFPIPKALCQSLGFTGDFNKFTLAKMVRYRSEVIKNRDGTDLLNNILGQDDLAFIIDNIDAALDIFKAHYPNDPLTSLLEVHHG

SEQ ID NO: 70561 - protein, 558 aa, Enterobacter cloacae
MDDQKRQLINIKDNLLVSACPGAGKTKLLIGMLEDNLYRNEGFRWHIVLTHTNAAADEISSRIDNLSIEVDRVWCGTIHSFLLEWVVKKYAGAISRLKDGFSLLSEYKQRKIIQSIETDKKLGVRIRYNCDEQGNAFVEPYCHSLDNKNKELLVIQEYNAFKENNRLIDFDDIIKLGVEFLENNQNICEHLSKLIGNIYLDESQDTSLIQLKALSYITRYNRVSVFIVGDNDQAIYQDLGVSIKDKDIIKSELQLSELKHETLSGCYRSSELLVKYYKKYSASRNDVTSLREFEGKSPIIKDISQDELPQRVFNLINQYQAKYNSVSGIAIIGPDKYYLMALINALYDLSENFVYDFQSTNPLYCARNTVFYELISLVVLDVNVINYQRRSSLARKIVDSVPELSHMTPLQLKRDLKEFQSVKNNFILWLRELYDFLEMKYQKSIKLETDYKICNAAASVAKIRAGMGAISKMINKDKNVVSVSTIHGSKGEEYDYVISIGYHDQVVPHQSSFEKGNEYARDIANRLMYVAFSRAKDYMNIFIDDRRKVSPFFIREPD

SEQ ID NO: 70562 - protein, 566 aa, Enterobacter cloacae; identical to SEQ ID NO: 66008

SEQ ID NO: 70563 - protein, 541 aa, Enterobacter cloacae; identical to SEQ ID NO: 66009

SEQ ID NO: 70564 - protein, 583 aa, Enterobacter aerogenes; identical to SEQ ID NO: 63878

SEQ ID NO: 70565 - protein, 591 aa, Enterobacter aerogenes; identical to SEQ ID NO: 63879

SEQ ID NO: 70566 - protein, 634 aa, Enterobacter asburiae
MKLEAIRLSGFQSFGYEATELSLEDITYIIGPNGSGKTAVLQALCRLFAFDPALRRIQRSDFHVPCDEENVPLERQLWIEADFLFPELEEDEDNSTVAPHFSHMRLDEPDGVPHVRFRLTATMGIDGDIEEALVYVLEVDEDDAPLNTAQVPRSERNHIHVHYLPARRDPADHIAYGANALLGRLLRAVRWDDERETIKSLTDQISVSLAANPSVNAFSKSLKTTWIKLHRGKFFADPKITFVASEIESLLRHLSVSFTPSHDGSFVDFSRLSDGQKSMLYLSLVLSSQAIGRAVLAEEDISFDPDKLRPPVFTLVALEEPENSLSPHYLGRIVSSLSAMVGNLDAQALIATHAPTMLRRVAPELIRYLRLNESRETQVTCIKLPNETDEAHKFVREAVQAFPEIYFSRLVVLGEGDSEEIVLPRLLQSKGAPVDESAITVAPLGGRHVNHFWRLLTALKIPFFTLLDLDVARHGAGWGRIKYVNDQFSKRQRRNKLPESYVIPKWDDEKYKIRDYENYLDMLEERGVFFSYPMDLDFAMLLAYPEAYNVWEEMPDDATIKAVLGKSHYDSSQYRDDELALFNTYHQRFKLGSKPAAHIEALTQLNDADLLKNMPDSLDRLADAVIAKLTELPE

SEQ ID NO: 70567 - protein, 554 aa, Enterobacter asburiae
MITVEEWQPADGLTLEPNAKRAAKARKRCLALTAGPGAGKTEMLAQRADFLLRTGTCRYPKRILAISFKVDASRNLTERVERRCGRYLASRFDSFTFHAFAKRIIDRFRPVLTGEYALDAGYTIVDKKSGASRHEIAFGDLVPYAIKILQTSKIARNAIRQTYSDIFLDEFQDCTNLQYDLVKLAFKGTKIRLTAVGDTKQKIMAWAGALDGIFQSFTKDFNAVPLNMYRNFRSKPTLLRVQNEIIRKLDPDSVMPDAQLEGDEGEVFACKFEDSQTEAIYLADLIYEWINTEKLPPAEIAVLISKQPDLYADDLFRELEQRGIPYRNEQQMQDITVEPVARLIVDYLSCLYGHREPKAWIRLMNQLVPFADEEIQTNVRKDLDHLIKKHRKGVSEAKKKDNPFSEWWTFSRSFLKHIGLQMLVALSPEYESHDRLKQVVSDVEARIKDLLKIESDLPLALKRFSDDQAVRILTIHKSKGLEFDSVVIMAIENEIFFGDEEENRCAFFVGVSRAKRRLILTHTNKRDEPANARYWKVFRTARVEYLDYVLPFVR

SEQ ID NO: 70568 - protein, 773 aa, Photorhabdus luminescens subsp. laumondii
MKIARIDIQNFRKLQSCRVELAGKSTVFVGANNSGKTSAMDALIMFLKKAKRKELSTTDITLSNWATINSVGIGWISESEKQAPVPDLTLDTWRTQFPSIDVWLEVDELQIHYVSHILPTLDWDGGLLGVRLILEPKNLELLYKAYINAYSAARETISAHKIEADETTGSPLVLWPTSMRDFLDRKLQEFFAISAYVLDPALADNEQPQAFTEFMEAIDGDPFDGLFKIDIINAQRGFSDPNAGEGAANTDRRLSAQLRNYFDKHLDPSELPDVSDLDALEAMESARTVFDQKLKTSFSAAIGELEGLNYPGFSDPQILLSSKVNPLEGLNHDSAVQFKVIRSEDPSGDAFCLPEKYNGLGYQNLISMIFNLIRFRDEWMRVGKVSKREESNNRPIEPLHLMLIEEPEAHLHAQVQQVFIKKAFSVLRNHPDLEEKQQLATQMIVSTHSSHIAHETDFTGLRYFRRKPLVNELEVPNACIVNMSTTFGADRKKTKGEIAQEAQEQERIATAQFATRYLKTTHCDLFFADAAILVEGPAERMLVPHFIRNHYPDLDRSYISILEIGGSHAHRLRPLIEALGIPTLVITDLDSIQAESTSKARPVMGQGFKTGNDTLKTWAPGKTLLDEVLRAEFEQKTASNGKVRVVYPCTVSIQFKDEKDVPDQPEPESAIPYTFEDALVLANLSVFRKMTDKTGLIKKMVEAVNQPMLDTACHFMFCALDKNAKKAEMALDLLYSVEPSTFKAPHYIAEGLNWLEKELINSSPLAAKSEAKE

SEQ ID NO: 70569 - protein, 624 aa, Photorhabdus luminescens subsp. laumondii
  MOD_RES (294)..(294): Any amino acid
MTEVIDTKTVDDEIYGCLDLDNPKSFFLFAGAGSGKTRSLVEVLKRFREHNIHRLRVKAQQVAIITYTNAACDEIKRRLEFDSAFSVSTIHSFAWELIKSHQHDIRESLRVRLQSDIVELEEAQRKGRAGTKAAEDRPKQIVAKLKRLESLSNIRKFTYNPNGENLGKDSLNHAEVIGITAELLISRPLLQQILTRKFPVLLVDESQDTKKELIDALFVVQSLHQDKFSLGLFGDIMQRIYNDGKEDLGLAPLPDGWLTPKKEYNHRCPRRVVKLINKIRAEVDQNLQQSAKLXEGFVRLFIADTSDGIDKEAYERFVCQKMAEITADDLWIAEKKHNKTLTLEHHMAAQRGGFASFFNSLYEVDKLRTGLLDGTHAGITFFSERVLPLIKSLDVGNHFAVSRIVNKYSPLISKECIEQSAEPKAELAKAKDAVDGLYVLWRDDADPSLINILKEVQRTRLFNVPDVLTLIAERQDRNYEKAEDDNDRDPVVDAWDTALMSRFSEFKEYVAYISDESRFGTHQGIKGLEFPRVIVILDDEEARGFLFSYDKLFGAKPPTATDIRNQKEGKETSIDRTRRLFYVTCSRAEKSLAIVAYTNEPNKVKTNIMSQNWFEEHEIISCQI

SEQ ID NO: 70570 - protein, 641 aa, Salmonella enterica; identical to SEQ ID NO: 62984

SEQ ID NO: 70571 - protein, 553 aa, Salmonella enterica; identical to SEQ ID NO: 62985

SEQ ID NO: 70572 - protein, 623 aa, Salmonella enterica
MYLAELTIKNFRKLREATLKFQPGLNVLVGPNNAGKSAVIDALRTLLAGHEETYPRLDGSDRHRPHEGDPTGDISFHFVFRDLSLEDEADFIAALKPNGDKNMEAHIHVQYTDMDKTGRFKVRRWCGDHPEVSLTSDMMENLRGVYLQPLRDAAQGLRPNRNSQLARLLHLLTDDAGRDTINTALKQLDDTLKQDKSIQSTHKAISTRHDSMMGAQLAQELAVGLSVTDFQRLSSRLTLTAEAMEIEKNGLGFNNLIFMAVVLSELAKNTDSAFRGLIIEEPEAHLHPQLQRVLLQYLAGIPTGEGEKPVQLFVTSHSPNFASNSKLDSLVCLIENEAGVETFFPRDIKFEKGKREKLERYLDVTRAELFFARRVIFVEGAAELMLIDALAKKMNFDLREYGVSLISVEGLNFDSFLPLFGEHGLRIPVAVVTDADPFEEEVEAVAEGEQPEEDIDDLLAEAAYQEETDAPDNEELAGNAEKKKKVKRKEVYPALGDQVRLSANTIKMKNLEDDFVKVFHGLKTLEYDLALIEANRDPMLTALADPHPKISKALRKIVDTQPDNTAKTKALFCGMFERKGNGNIQKGRFAQALAEQISKENGFEVPEYLKKAIQHVCQGVVKP

SEQ ID NO: 70573 - protein, 575 aa, Salmonella enterica
MKLSKEQIDIIEAPLGPIAVTACAGSGKTATAIRRLIAIRQKMQNSRGRVVLLSFSNVAVNTFNAGYAELAAGLPDDANRRRVEVDTLDGFFTKHILRPHAYRTMAAPQAAYLVSGSEPFLARFKYWREGYPPLPLKDIKLIILDGDFVFYSDTRNDPEILDKGKVLKIIHDLGRLGAYTHEIGRYWVYRTLDSQPAVLRALAARYPQILVDESQDLGTLHKEILKLLITAGVQVTLIGDVNQGIYGFAGADGEFLKSYEDRAEVTGYKLTRNYRSLPPIINIANILCGRHDEPDRLGEQGGAYFIGYKDSELSKLTEAFKAHIDELGMQHHDAVILCRGADRAAVVAGKTPPPGQGIVKVLAEASLLRDQHSDYHGCFKLVCRAIIYLLEDVPHGLSSRLQGLSHDDEMKELKRLLWRFSRSADVGLPSSALTAQIDWHSKLLTNVRVLLAEIEKHYGYKVAGKVGTKLTKKLLPDQPLTSTVLTQGHGLRVETVHQVKGESIDAVMYVAKKANIKALLSGTGDEEGRIGYVAITRAKNLFWLAVPQSCLKELKEDLIKAGFQEWIKLAVNDPA

SEQ ID NO: 70574 - protein, 641 aa, Salmonella enterica; identical to SEQ ID NO: 62984

SEQ ID NO: 70575 - protein, 553 aa, Salmonella enterica; identical to SEQ ID NO: 62985

SEQ ID NO: 70576 - protein, 641 aa, Salmonella enterica
MKLHSIRISNFQSFGAEPIELTLESITYLIGPNGSGKTAALQALCRLFAFDPSLRRIQRSDFHVPHDEQEAPEERQLWIEADFVFPELEGEEDNSSVAPHFSHMRLDDPDGIPRVRYRLSATMGLDGDIDEAFVYVLEVGPDGSPINPETVPRSDRNHIQVHYLPARRDPTDHIAYGTSALLGRLLRAVNWENEREKVKGFTDQISESLAANSSVNAFSSHLKKIWGTLHKGSYFTDPKITFVASEIEALLRHLSVSFSPGHDDNLVDFSRLSDGQKSMLYLSLVLSSQAVGRAVLAGEDDSFDPEKLRPPVFTLIALEEPENSLSPHYLGRIVNALNSMTSNEDAQALVATHAPSMLRRVDPEHIRYLRLTETRQSRIKKIQLPAKTDEAHKFVREAVQAFPEIYFSRLIVLGEGDSEEIVLPRLFQAKGAPVDESAVTIAPLGGRHVNHFWRLLSELQIPFLTLLDLDVGRYQAGWGRIKYVNNQLGLYQPEKVLPTTFSLSDWNDDKVPVRTHHFFENGTKSVFLELETRGVFFSFPMDLDFSMLLAFPNAYGVQQEVSDESTIKAVLGKSHHGSYQYSGDELNLFSTYHKLFKLGSKPAAHIDALAQLSNEELLANMPGSFGRLADAVIAKLAELPE

SEQ ID NO: 70577 - protein, 553 aa, Salmonella enterica; identical to SEQ ID NO: 62985

SEQ ID NO: 70578 - protein, 617 aa, Salmonella enterica
MYLAELTIKNFRKLRDTKLKFQPGLNVLVGPNNVGKSAVVDALRTLLAGHDEPYPRLDVSDRHRPKEGEPVGDISFHFVFKDLSLEDEADFIAALKPSNDNSMEAHIHVRYTDVDQTGRFKVKRWCGDHHEVALTSDMMENLRGVYLQPLRDAAQSLRPSRNSQLARLLHLLTDDEGREDINMALKELDDKLQLNASINNTHTAISSRHLSMMGEQLAQALAVGLSATDFQRLSARLSLTAEALEIEQNGLGFNNLIFMAVVLSELAKNPDAAYRSLIVEEPEAHLHPQLQRVLLRYLAGVPTSEGEKPVQLFVTSHSPNFASNSKLESLVCLVENEDGIETFFPRDIQFAKGKREKLERYLDVTRAELFFARRVIFVEGAAELMLVDALASLMNFDLREYGVSLISVEGLNFDSFLPLFGEKGLRIPVAVVTDADPFEEEEVGHEEDIEDLLAEAAYLEETDTPEEDQPVNEQVKKKKVKRKEVYPSLGDEVRLSGNTLKMKKLEDSFVKVFHGLKTLEYDLALLEANRGPMLTALADPHPRISKALRNIVDAQPDNTAKARALFCGMFERKDSCNVQKGRFGQAFAEQIASTPGCKVPEYLQKAIQHVCQGTDKL

SEQ ID NO: 70579 - protein, 576 aa, Salmonella enterica
MKLSDEQKNIINAPLGPIAVTACAGSGKTATAIRRLIAIRQKMKGNRGRVVLLSFSNVAVNTFNKGYAQLASVLPDDANRKRVEVDTLDGFFTQYILRPHAYRTMGAKQAAYLVSGSEPFLSSFQYWPEEGHPLPLKDIRIGIQNGNIFFTNSNGGAEKLNTVRALKAVMSLGQTGAYTHELGRYWVYQTLVSQPAVLRALAARYPHILVDEAQDLGTLHQAILELLIDAGVQVSLIGDVHQGIYGFAGADGSFLKTYTERADVTGYKLTRNYRSLPSIINIANLLCDRDDEPDRETEKGGAYFIGYQESELPKLFESFHAHIQELGMRHQDAVILSRGADRVAKLAGNATPPGRGTIATLSEAALLRDQNGLYHECFKCVCRAVVGLLANPPHGLSSNLQGSPHETWMLGLRRLLWNFSRNADTGLPSSKLIAKTEWHTNLVKNVRALLADIEKQYGFKTVGTLGNRLAKTALTDFPLIGEVKPKDNCHGMRVETVHQVKGESIGAVLLVATKANVKALLSGTSGEEGRIGYVAITRAKNLFLLAVPQSNLKELRGDLITAGFQERREPVMNECV

SEQ ID NO: 70580 - protein, 567 aa, Salmonella enterica; identical to SEQ ID NO: 64480

SEQ ID NO: 70581 - protein, 540 aa, Salmonella enterica
MIDFTHEQKAAIDYPSSMVLTACPGSGKTAVIVEKIVRDLVECKEYQGVIAISYTNKASDELKKRCLKATPNSKSSFFGTIDKFYLTEVILPFIKQLWGRVDDLHVVKLNELASSEKDRLSAFFNVEFICEKINEYDFKDIKELYANGILILEFIPLLAFYILRNSLACRRYIAKKYTSIYIDEYQDAGCVQHLLFLYLFELGVKAVAVGDADQSIYSYAGKSSKYLMSLLDEKSGFAPFKITINHRSHSSIVNYASRLLNENCDLLITDEIRVYRKTVNGTQCEIAKWIDANINNIKRKFNISKEKEIAILTATNSSVALVSGLINSKARAYLDDELSVLGGDVSLLLKNLLNYRFNKTITAQAIIESLNYKVLERNAIRKMRGVIRDVRDSNDNQLIPDLRKAVKLLINADISANHIDAINSILHNKMMLNNYLPVSDDELQIMTLHKAKGLEFDFVFHLDLYDWILPRREYIKHCFDEVFSHYEQCLNLHYVGVTRAKKAVVLINSTERLNYQSELKKAKPSQFLSLKGLESLYKKI

SEQ ID NO: 70582 - protein, 641 aa, Salmonella enterica; identical to SEQ ID NO: 62984

SEQ ID NO: 70583 - protein, 553 aa, Salmonella enterica; identical to SEQ ID NO: 62985

SEQ ID NO: 70584 - protein, 641 aa, Salmonella enterica; identical to SEQ ID NO: 62984

SEQ ID NO: 70585 - protein, 553 aa, Salmonella enterica; identical to SEQ ID NO: 62985

SEQ ID NO: 70586 - protein, 641 aa, Salmonella enterica; identical to SEQ ID NO: 62984

SEQ ID NO: 70587 - protein, 553 aa, Salmonella enterica; identical to SEQ ID NO: 62985

SEQ ID NO: 70588 - protein, 641 aa, Salmonella enterica; identical to SEQ ID NO: 62984

SEQ ID NO: 70589 - protein, 553 aa, Salmonella enterica; identical to SEQ ID NO: 62985

SEQ ID NO: 70590 - protein, 641 aa, Salmonella enterica; identical to SEQ ID NO: 62984

SEQ ID NO: 70591 - protein, 553 aa, Salmonella enterica; identical to SEQ ID NO: 62985

SEQ ID NO: 70592 - protein, 641 aa, Salmonella enterica; identical to SEQ ID NO: 62984

SEQ ID NO: 70593 - protein, 553 aa, Salmonella enterica; identical to SEQ ID NO: 62985

SEQ ID NO: 70594 - protein, 641 aa, Salmonella enterica; identical to SEQ ID NO: 62984

SEQ ID NO: 70595 - protein, 553 aa, Salmonella enterica; identical to SEQ ID NO: 62985

SEQ ID NO: 70596 - protein, 641 aa, Salmonella enterica; identical to SEQ ID NO: 62984

SEQ ID NO: 70597 - protein, 553 aa, Salmonella enterica; identical to SEQ ID NO: 62985

SEQ ID NO: 70598 - protein, 765 aa, Enterobacter hormaechei subsp. oharae; identical to SEQ ID NO: 70518

SEQ ID NO: 70599 - protein, 610 aa, Enterobacter hormaechei subsp. oharae; identical to SEQ ID NO: 70519

SEQ ID NO: 70600 - protein, 594 aa, Enterobacter xiangfangensis; identical to SEQ ID NO: 64492

SEQ ID NO: 70601 - protein, 605 aa, Enterobacter xiangfangensis; identical to SEQ ID NO: 66703

SEQ ID NO: 70602 - protein, 594 aa, Enterobacter xiangfangensis; identical to SEQ ID NO: 64492

SEQ ID NO: 70603 - protein, 605 aa, Enterobacter xiangfangensis; identical to SEQ ID NO: 66703

SEQ ID NO: 70604 - protein, 594 aa, Enterobacter xiangfangensis; identical to SEQ ID NO: 64492

SEQ ID NO: 70605 - protein, 605 aa, Enterobacter xiangfangensis; identical to SEQ ID NO: 66703

SEQ ID NO: 70606 - protein, 594 aa, Enterobacter asburiae; identical to SEQ ID NO: 64492

SEQ ID NO: 70607 - protein, 605 aa, Enterobacter asburiae; identical to SEQ ID NO: 66703

SEQ ID NO: 70608 - protein, 594 aa, Enterobacter asburiae; identical to SEQ ID NO: 64492

SEQ ID NO: 70609 - protein, 605 aa, Enterobacter asburiae; identical to SEQ ID NO: 66703

SEQ ID NO: 70610 - protein, 594 aa, Enterobacter xiangfangensis; identical to SEQ ID NO: 64492

SEQ ID NO: 70611 - protein, 605 aa, Enterobacter xiangfangensis; identical to SEQ ID NO: 66703

SEQ ID NO: 70612 - protein, 594 aa, Enterobacter xiangfangensis; identical to SEQ ID NO: 64492

SEQ ID NO: 70613 - protein, 605 aa, Enterobacter xiangfangensis; identical to SEQ ID NO: 66703

SEQ ID NO: 70614 - protein, 594 aa, Enterobacter xiangfangensis; identical to SEQ ID NO: 64492

SEQ ID NO: 70615 - protein, 605 aa, Enterobacter xiangfangensis; identical to SEQ ID NO: 66703

SEQ ID NO: 70616 - protein, 594 aa, Enterobacter asburiae; identical to SEQ ID NO: 64492

SEQ ID NO: 70617 - protein, 605 aa, Enterobacter asburiae; identical to SEQ ID NO: 66703

SEQ ID NO: 70618 - protein, 594 aa, Enterobacter xiangfangensis; identical to SEQ ID NO: 64492

SEQ ID NO: 70619 - protein, 605 aa, Enterobacter xiangfangensis; identical to SEQ ID NO: 66703

SEQ ID NO: 70620 - protein, 594 aa, Enterobacter xiangfangensis; identical to SEQ ID NO: 64492

SEQ ID NO: 70621 - protein, 605 aa, Enterobacter xiangfangensis; identical to SEQ ID NO: 66703

SEQ ID NO: 70622 - protein, 594 aa, Enterobacter xiangfangensis; identical to SEQ ID NO: 64492

SEQ ID NO: 70623 - protein, 605 aa, Enterobacter xiangfangensis; identical to SEQ ID NO: 66703

SEQ ID NO: 70624 - protein, 594 aa, Enterobacter xiangfangensis; identical to SEQ ID NO: 64492

SEQ ID NO: 70625 - protein, 605 aa, Enterobacter xiangfangensis; identical to SEQ ID NO: 66703

SEQ ID NO: 70626 - protein, 594 aa, Enterobacter xiangfangensis; identical to SEQ ID NO: 64492

SEQ ID NO: 70627 - protein, 605 aa, Enterobacter xiangfangensis; identical to SEQ ID NO: 66703

SEQ ID NO: 70628 - protein, 801 aa, Pseudomonas psychrotolerans
MKLQAYRLQNYRRLRDAVIELDDEISIFVGANNSGKTSAIQGLYSMLRGETKRFELFDFSAALWAEIDAIGTMPPGDENAPKQLPSIRLDLWFRVDEDDLATAMSLLPSTEWDGKCVGVRVAFEPRDAHALLRKFHELHEKGINAAAALVAKRGASAEVGAANGPSAVVDPGEYKPWPESLTKYLTKELSKEYTFRYYVLDERAFVGYQVKEADYEPLPLGNEPGGAAILKSLVKVDFLRAQRHLDDPDAGSSDRAESLSRRLSRFYHRNLEKRGDDHAALKALDTSEKELNFHLEEVFGDTLKRLAKLGYPGVNNPEIVIRAALDPTTVLGQDARVHYVIPGAVTAQLPDSYNGLGFKNLVYMVVELLDLHEQWKAEEDKRAPLHLVFIEEPEAHLHAQIQQVFIRNVLRLLEDANDHATFFHTQLVVTTHSPHILYERGFSPIRYFRRVSDQLAHNTEVRNLSLFKTGAADTPAREFLQRYLKLTHCDLFFSDAVILVEGNVERLLLPAMIELAAKRLRSSALTILEVGGAFAHRFQELIAFVGLTTLVITDLDSVMVKADAEDVAEQCAGADGTVDGDNEDDDLKPFELEDDDEAAPGGKKKSKKRGSTCHAHVDGAVTSNQTLISWIPKKRSVAELWEVTAAQKTLSLAEGSSAEVRVAYQTKILVTVGGTTSQLCGRTLEEAFGLENYDWCQAEANRAVGLKLKHVPNSPEELAEKLHNRVIGKNFDKTRFALEVLASGPLNCWKVPTYIAEGLAWLEAKVAHEIEADAAIATEVATIEPNVAGFVGVLADVGQTA

SEQ ID NO: 70629 - protein, 643 aa, Pseudomonas psychrotolerans
MSRRIDSPDTDADREIHACIAATPPQSFVVRAGAGSGKTTSLIKAMDWVISEHGVSMRAKKQKVACITYTDLAAKEILADVNDDPLVHVSTIHSFYWSITKTFQADIKVWLQNDIHRRISELEEEFKNYSSRVRQTTRDRNKADQGRYVRNLEAISGVKTFNYGVGSDYAKGILGHEDILQLTDFLLQNRPLFRRVVALNFPFVFIDESQDTFPSVVKSFKEVEAQMRRKFCLGFFGDPMQAIFMRGAGNIPLEDHWRPITKPENFRCAKQILDVANAVRAQGDGMQQVRGLHERVDGHLKPVEGSARMFILSNTLNRIEALARVREWSAATNNDDGWTTSDSALKILVIVHRMAANRLGFGGIYSALNDRTSEGMKQGMQDGSGWPVRPFLSFALPIIAAVKAGDEFKAISLLRKFSPRLAPGAIAGQRAAAVLRELHAAMSKLVVMLDEAGTTIGDIALHLCDTGLFEFDDRYARVLGFFRDVADAAREPGAADAVPAEGLSSDAAMAKFFNCSAQELWPYERYISESSPYATQHGVKGAQFERVMVVMDEEESDYRTYNYESVFASAEARAADRARALGGDENTWSRTLRLLYVCCTRAQRGLVLTFFVTDPATALENVVASGILPRSAVFTQEVLAVGS

SEQ ID NO: 70630 - protein, 801 aa, Pseudomonas psychrotolerans
MKLQAYRLQNYRRLRDAVIELDDEISIFVGANNSGKTSAIQGLYSMLRGETKRFELFDFSAALWAEIDAIGTMPPGDENAPKQLPSIRLDLWFRVDEDDLATAMSLLPSTEWDGKCVGVRVAFEPRDAHALLRKFHELHEKGINAAAALVAKRGASAEVGAANGPSAVVDPGEYKPWPESLTKYLTKELSKEYTFRYYVLDERAFVGYQVKEADYEPLPLGNEPGGAAILKSLVKVDFLRAQRHLDDPDAGSSDRAESLSRRLSRFYHRNLEKRGDDHAALKALDTSEKELNFHLEEVFGDTLKRLAKLGYPGVNNPEIVIRAALDPTTVLGQDARVHYVIPGAVTAQLPDSYNGLGFKNLVYMVVELLDLHEQWKAEEDKRAPLHLVFIEEPEAHLHAQIQQVFIRNVLRLLEDANDHATFFHTQLVVTTHSPHILYERGFSPIRYFRRVSDQLAHNTEVRNLSLFKKGAADTPAREFLQRYLKLTHCDLFFSDAVILVEGNVERLLLPAMIELAAKRLRSSALTILEVGGAFAHRFQELIAFVGLTTLVITDLDSVMVKADAEDVAEQCAGADGTVDGDNEDDDLKPFELEDDDEAAPGGKKKSKKRGSTCHAHVDGAVTSNQTLISWIPKKRSVAELWEVTAAQKTLSLAEGSSAEVRVAYQTKILVTVGGTTSQLCGRTLEEAFGLENSDWCQAEANRAVGLKLKHVPNSPEELAEKLHNRVIGKNFDKTRFALEVLASGPLNCWKVPTYIAEGLAWLEAKVAHEIEADAAIATEVATIEPNVAGFVGVLADVGQTA

SEQ ID NO: 70631 - protein, 643 aa, Pseudomonas psychrotolerans; identical to SEQ ID NO: 70629

SEQ ID NO: 70632 - protein, 801 aa, Pseudomonas psychrotolerans; identical to SEQ ID NO: 70630

SEQ ID NO: 70633 - protein, 643 aa, Pseudomonas psychrotolerans; identical to SEQ ID NO: 70629

SEQ ID NO: 70634 - protein, 664 aa, Sphingomonas yabuuchiae
MYLQRVQLGNFRSFDTARLELQKDLTVFVGENNGGKSNAIDAIRLLTAPLSGRRELYCEPTDVRFQCGASHFELEAHFSGLSAGQQGRLLSAVTDASMTSACFGLRYGGSQVGAKPVLWAGKEGNPPEANCHDMVRHVYLPTLRDAKRALASGNPTRILALLHHFLEGTTANELAKELGRSHSHDVLTKVDTAVEKGLAALTGGVRRQTASLGFAADEALIDIARDLRFKLADHGVDPEDLRYSGHGYANLLYMAIIAVELEKVRTADLTVFLVEEPEAHLHPQLQAAVLSFLRDQAKQSRESPPTDHGPAGELQVVVATHSPNLSAWVSSDRLVVFKSVVTSSSQSAAGEEQTKPASLDAGIIENVLSSDTPADPEAGAESVAEAISAAVPRRATRCMPLANMPLVDGDRRKVDRYLDVTKAALLFGGRALLVEGIAEALLLPAIAKHHVLKGHPDKLRLFRSAVFIPIDGVDFAPYVTLLLTELEGARIADRVVVVTDGDKGLKIYDDEVEADADADANADAADEVTETSEDDNGAPSIEDDEAIIPGERRKATLEKLTKAMGASDMFVAITSTYSLETELIEAGNAAILEKAYLELHPRSKKKWQNAVAKAGDDRARAIHKIFKAARKGDFAQVLARLIEDGEAFTVPTYIATTIERLVET

SEQ ID NO: 70635 - protein, 574 aa, Sphingomonas yabuuchiae
MTDTYSPTDEQSAIVNHDGPAFVTACPGAGKTRTMVERARHVLADRTDRRGIAFLSFTNAAIDELEMRLRAFGVLPSPLFPSFIGTFDRFLWQFFIAPFGIPGCDETPRLIPDKPAWTVQPFPGAQALPLSAFDRKTSALDRRLAADVGFPANRDATRHETRARNILAAARKRGQVDFEDVRECVKERLNDTGFAKRLGQALAARFREIVVDEAQDCNPADLEIVQWLRNSGPIVKVICDPNQSIYQFRGGVADELTAFGDCFSPSDRLPMSGNFRSTPAICSAIVALRPPSLRDRPDEALGRYKADLTPVHIMSYGGSGVPSTIGAKFTELAKSLGILPANAPILASTLASAAKAIGRPTLGPTEHMTLVLAQAATSYHFSFGIGNRREALVALHRTILLLQGHIDTAGDYHSYIAAKGLDDGRWRPEIIEIAAALRFNAGMDAAKWLDGARTLLAQGLSGTSTIGQRLRLSSDLATALAVPPAESHPARTIHSAKGLEFPAVCVVLTSQKTGDILSHLEGTEGGTSAEDARKIYVAASRAQRLLVIAIPKSRASRLQSLLASSGCALIVHEL

SEQ ID NO: 70636 - protein, 641 aa, Salmonella enterica subsp. enterica serovar Typhimurium var. 5-; identical to SEQ ID NO: 62984

SEQ ID NO: 70637 - protein, 553 aa, Salmonella enterica subsp. enterica serovar Typhimurium var. 5-; identical to SEQ ID NO: 62985

SEQ ID NO: 70638 - protein, 567 aa, Salmonella enterica subsp. arizonae serovar 18:z4,z23:-
MYIDNVYLKGFRNYSDSFIKFNHSTLIIGSNDIGKTNLLYSLRILLDKSFSDLDLEPKNSDFHIDAKGNQCEELEIIINFREIKEDAVLSKLAGYVSEDAQTYIKYKAHRTTLDYKLYIGHKESEMDEISGRFYLKYLNLRYVNSQRDLAKYISTEKKHLLRLAQEMRSEEQVRKDENTLNSLTDLLNDVNNKVKEISYVSTATEELNDELKKLSYNNEKVSVMLDSGAIGVDQFIEKLELSSNTNGKKVMLGGDGFNNQVLLALWKAKSVREHDTENEVVIYCVEEPESHLYPHQQRKLSEYLISKLPGQSLVTTHSPQIAVNYSPDSIIKICSYNGESYAASEGCSDCISDAWSGMGYRMSILPAEAFFANVVFLVEGPSEMLFYQALAKECQIDLDFFNISILSVDGVQFEVYRKILDAFEIKWVARTDNDSSKVPKKKEWQYSGLNRALVLCGMKPLKNELMEISQVQRIEKHKVYKDALKRNNIFVSINDLEGDISVELSKQLKEYVGVDNEEIAADYLRGKKAIRMQEFLREYSHALKTISTGELIQPLLTAVKLATEELK

SEQ ID NO: 70639 - protein, 540 aa, Salmonella enterica subsp. arizonae serovar 18:z4,z23:-
MINFTHEQKVAIDYPYSMVLTACPGSGKTAVIVEKIVRDLAGCKEYQGVIAISYTNKASDELKKRCLKATPNSKSSFFGTIDKFYLTEVIYQFIKQLWGGVDDLHVVKFNELNSSEQDRLSAFFNVESICEKIDEYDFKDVKELYAKGILILEFIPLLAFYILCNSLSCRRYITKKYTSIYIDEYQDAGFVQHLLFLLLFDLGIKAVAVGDVDQSIYLYAGKSSKYLTSLLDKKSGFTPFKITINHRSHSSIINYASRLLNEKSDLLITDEIRVYRKLVNGTQREIAKWIDINIDNIKQKFNISKEKEIAILTATNSSVSLVSGLINSKARAYLDDELSVLGGEVSILLKSLLNYRFNKVITAQAIIDSLNHKVLERNTIRKMRGVIREVRDSDDDQLIPALRKAIKLLISGDISAHHIDAINSILHNKMMLNNYLPVGDDELQIMTLHKAKGLEFDFVFHLDLYDWILPRREYIKGCFDEVFSQYEQCLNLHYVGVTRAKKAVVLINTTERLNYQGELKKAKPSQFLSLKGLEGLYKKI

SEQ ID NO: 70640 - protein, 567 aa, Salmonella enterica subsp. arizonae serovar 18:z4,z23:-; identical to SEQ ID NO: 70638

SEQ ID NO: 70641 - protein, 540 aa, Salmonella enterica subsp. arizonae serovar 18:z4,z23:-; identical to SEQ ID NO: 70639

SEQ ID NO: 70642 - protein, 567 aa, Salmonella enterica subsp. arizonae serovar 18:z4,z23:-; identical to SEQ ID NO: 70638

SEQ ID NO: 70643 - protein, 540 aa, Salmonella enterica subsp. arizonae serovar 18:z4,z23:-; identical to SEQ ID NO: 70639

SEQ ID NO: 70644 - protein, 567 aa, Salmonella enterica subsp. enterica serovar Braenderup; identical to SEQ ID NO: 64480

SEQ ID NO: 70645 - protein, 540 aa, Salmonella enterica subsp. enterica serovar Braenderup
MIDFTHEQKAAIDYPSSMVLTACPGSGKTAVIVEKIVRDLVECKEYQGVIAISYTNKASDELKKRCLKATPNSKSSFFGTIDKFYLTEVILPFIKQLWGRVDDLHVVKLNELASSEKDRLSAFFNVEFICEKINEYDFKDIKELYANGILILEFIPLLAFYILRNSLACRRYIAKKYTSIYIDEYQDAGCVQHLLFLYLFELGVKAVAVGDADQSIYSYAGKSSKYLMSLLDEKSGFAPFKITINHRSHSSIVNYASRLLNENCDLLITDEIRVYRKTVNGTQCEIAKWIDANINNIKRKFNISKEKEIAILTATNSSVALVSGLINSKARAYLDDELSVLGGDVSLLLKNLLNYRFNKTITAQAIIESLNYKVLERNAIRKMRGVIRDVRDSNDNQLIPDLRKAVKLLINADISANHIDAINSILHNKMMLNNYLPVSDDELQIMTLHKAKGLEFDFVFHLDLYDWILPRREYIKYCFDEVFSHYEQCLNLHYVGVTRAKKAVVLINSTERLNYQSELKKAKPSQFLSLKGLESLYKKI

SEQ ID NO: 70646 - protein, 641 aa, Salmonella enterica subsp. enterica serovar Typhimurium var. 5-; identical to SEQ ID NO: 62984

SEQ ID NO: 70647 - protein, 553 aa, Salmonella enterica subsp. enterica serovar Typhimurium var. 5-; identical to SEQ ID NO: 62985

SEQ ID NO: 70648 - protein, 729 aa, Enterococcus faecium; identical to SEQ ID NO: 62500

SEQ ID NO: 70649 - protein, 597 aa, Enterococcus faecium; identical to SEQ ID NO: 62501

SEQ ID NO: 70650 - protein, 694 aa, Myroides odoratimimus
MYISKIQINNFRNFKNKEIDFNDGVNVIIGHNNAGKTNLIKALSLIIDSTNSKRLEVDDFHKNVTLAELKSAPPKISISITIKKGKEEEPDDLVTISNWLTKLDSDYEAVLTYEFFLPEKKIEEYNNEMSLIEDEDDKAIHKAWKILKHNFIRYYVYRIWGGDIVNQATADSESLQKIDFQFLNAIRDVERDMLTGRNTLLKEVFDFFMDYDIKIDTTKDNEQKYQEIKAKKILFSEKADLLVKDLTSRIEQGKKEILSYAKKTGASFNKANPNFEGSISESEMYSVLKLIVEYEAGITIPATHNGLGYNNLIFMSLLLAKMQVNADINYLDTNAKVFTTLAIEEPEAHLHPAMQYKFLKFLNENKAEKKVRQIFVTTHSTHITSAVSLDEIICLHNENGETSVGYPSKVFIEEEVLHNDKSKKYVQRFLDATKSDMLFSQKVLFVEGIAEQLLMSIFANYLDVSLEDNHVTVINVGGRYFSHFLYLFDSEKENTIHKKVVCLTDRDPERKEKPDGKYKKCYPYELNIDRDNFEYRTNIHADSYPKNSHPNITFYSQPSDLGKTFEYELVYNNPSLKLLITDSISNKDEIEQLMILYNTEGKTFEDLLGKLADGVKNNENKRIKESIIANVDLSDEQKKRAIIASRYLNSIGKGENALELCYALQENLTKKGTAEYIDIIIPKYIKEAIEELCQ

SEQ ID NO: 70651 - protein, 576 aa, Myroides odoratimimus
MPIERITSDNILSDIDRHFKVSAGPGAGKTHWLVNHIKNVLHHSDKLFRTRKIACITYTNIAVDTILKRLGTSSEQVEVSTIHSFLYTNVIKPYAFFISKEFGLNISEIDGHDEINISHGLLRQWTESTNQIYLINDRDSEVAKQKRTKVLKALENLQWVITNDNIDLKINPKKSYLGRITPTISIRNNSLIDFKKIYWEKGILSHDDVLFFSYHLIHRFPFITDVLVAKFPYIFIDEFQDSNPIQVEIIKKIAIKNTIIGVIGDVAQSIYEFQGADCTQFQLFNLPNLTNYVLEENRRSSNEIIDVLNFIREDISQTKFRNINKGQPIIFIGDMTLALREAKSICDRENVYTLSRNNITSNAMKTEISGYNLDNTLLERIKEIDSNAVRSKLIYSCIKAISYGKENKFKDAIKVLEKQFNYRNDKLKGRKKALKYITTLLEKYDEYKDFTLINFANFIRENLDSTLSNFRAGAPKTFYETYTLNQLSLCVSIPEDLSLHKTIHKSKGDEFNNVLLVLKQENDMNFLLNKDLSNDEEHRVNYVGCSRAKNRLFISVPVLSQTNQDKLRPLFEIQNV

SEQ ID NO: 70652 - protein, 598 aa, Myroides odoratimimus
MYLSNIKLWNFRKFGSENDIDPEKPDLDLNLTKGLNVIIGENDSGKTAIIDAIKIVLKTHSYDYIRVDGKDFYDNATRFRIELTFEGLTPDEAKNFTEWLGWSGSGADTKPFLKVNYDVKRQGEKILPSDIKAGVDDDGYLLTAEAKEYLKATYLKPLRDAENELIAKRNSRLSQILLGDEAFKGKETSNELVQIFSTLKTDLEKYFKGEFEITVFNEGGAEEIQKPQDGKHIKDKIDGYIKGFYGNNYETEFNASSNDIKSILEKLTLFLKDEPYPGLGTLNRLFMATELLHLNKSNWSGLRLGLVEELEAHLHPQAQMQVIEAFQKQNTIQLILTTHSPNLASKLKLENLIICNCTNAFPMGETHTKLHKDNYKFLEKFLDTTKSNLFFAKGVIFVEGWAEEILIPSIAKSIGINLTEKGVSIVNIGHTGFEHYAKIYLRKEEPFMTIPVAVITDADVRSYEKIGDDYIKRDAETVEQETQRKVAEINEQAEQNVRYFVAPNWTLEYSLFNSASLTNVFQAVTKSIHNQTNWDDFEKALAQKLINKGLKKTEIAYRIAHSIDEDLKKPERTIQIPTNDINETVNYLINAIKYATGD

SEQ ID NO: 70653 - protein, 672 aa, Myroides odoratimimus
MRQEINITDEDIRYAEKILLPEGKEFDEERKQFIRNLETIDLQAVPGSGKTTALLAKLIIIERKLPFEDGSGVLVISHTNAAIDEIKEKNQQYCPKLFSYPNFVGTMQGFVDTFLAVPFFNLGFKKKLTWIDTERYQEELLKLFNIIAWNKDYDQPTKWFYQRHIARATDEANGNNNLIKEICKKYIENEVKGLFYDFITNEVKNSNNDVLLKNNTNKKFLGLKGIIIETLKKGIISYDYAYHLGECYLSKKPMIKEILQRRFPMVFVDEMQDMDTHQYSLLEKIFFDDNNSRSIIQRIGDKNQAIYNSVKTSDVWLDRANVLRLTGSQRLSKPIADIVKKFALYSGDNFDIVGMNECAVKPHILIFENETINNLIPCFAQIVKTYKENGSLANPDKAVKVICWNTDWKEDDISRHDVSKLRLEDYYKGFKKEKAKPKQDYNCLKSYLIFYDKNKKTLEPLRKNILNALLKILRLENINTSDNRPHTKKSLIEFIKSKDFQKYEQLNLNLYRWSMGIITGSTVDVWNDIKEYTSHFFAMFSELELSTSTSFINNDTTGVPVAAAEEIEITNCYKEDGIEIEITSVHSVKGQTHCATLYLESYYHSSYESQRLQSQFLGNHFNDNRVHHKSSIKMAYVGFSRPTDLLCVAIHKNRFDTQLNEIDTDVWEIITV

SEQ ID NO: 70654 - protein, 712 aa, Pseudomonas aeruginosa; identical to SEQ ID NO: 70168

SEQ ID NO: 70655 - protein, 599 aa, Pseudomonas aeruginosa; identical to SEQ ID NO: 70169

SEQ ID NO: 70656 - protein, 716 aa, Elizabethkingia miricola
MKINSIQIQNFRKLQSCTIDFSEKETIFVGANNSGKTTAMDALMIFLKTKSFKPQDFTLCHWKSLNKVGENWIKADELKEEDKSIKLLEEYLPVLDLWIEVEDSELHYVSHIIPTLDWKGGLLGIRLRFEPKDMDELIKEFITLYNKSNKLSQEKEKDFKLWPKTFWDFCERKLSAYFTIKTYLLDPDKYDEKQELLDNNIALEADVLKGLIKIDIINAQRGFSDANSETVESNSRNLSSQLRAYYDKHLNPTLEPTEKDIDALESINNAQDDFDKNLKESFKTSLSELEGLNYPGFGNPQIQLSTKVSTADGLQHDSAVKYYLGKDLSLPEKYNGLGYQNLISIIFKLIRFRDEWMRIGKNAITEDEVIEPLHLILIEEPEAHLHAQVQQVFIKKAYEVLRNNVNLKDNKDFTTQLVISTHSSYIAHQKFESLRYFKRNNSLALPTSEVISLKSVFGEKNKETEKFVIRYLNTTHNDLFFADAVILVEGPAERILVPHFIKNENCLLDSCYVTILEIGGSHAHRLKPLIEKLGLICLVITDVDSINPNDNGKKCQPELKKNYKTNNDTLKTWHPQKELLDELLNLSSEDKIKKDLPIRVAYQKPIEFDNGNNKIIVYPYTFEDALVIENKDSFKAITDSTGLLKKMVEASKKENLIEFVEETYTIINDKQAKKAEFALDILYYEDPKKIKTPTYIKEGLDWIEEQLKSNKQGLIN

SEQ ID NO: 70657 - protein, 627 aa, Elizabethkingia miricola
MAEYTNEIDAPVDDVIYESIKPSSPQSFFLFAGAGSGKTRTLVNVLDRFKKEFGQEYKLRNKRIAIITYTNAAADEITHRLEYSSIFNVSTIHSFCWELIKNFTHDIKNWIKRNLIVEIAELEVEQSKSRDLNNKTSIGRAKKIESKNKRLASLKTIQKFIYNPNGDNLTKDSLNHTEVISITADFIKSKELFKQILINKYPVILIDESQDTKKELIDSLFDLQSQYEERLSLGLFGDTMQRIYSDGKENLGIGLPEKWVKPAKKMNHRSKSRIIDLINKIREDIDGQEQFPRIENKGGIVRFFAVSRTKNKSETEEQIRQKMYEATKDDKWNGNNSEVMTLTLEHHMAASRMGFSNFFAPLYGVDKLKTGLLDGSSSSVNLFTKIVLPLHKAYIKKNKFEIANIVKQHSHLIDKQTLQNDDNKLELLHIVNGKVNELLSLWNEDNCPLLIEILEKIQETNLFKIPSVLKVVLKRADVDSDVEIEEDETSEDDDILKAWEESLKANFDEIIKYNEYINEESKFGTHQGVKGLEFERVMVIIDDEESKGFMFSYDKLFGLKPLTSNDKKNINEGKETGIDRTMRLFYVACSRAKESLAVVGYTDLPEELKENVITNGWFGDAEVEIIL

SEQ ID NO: 70658 - protein, 787 aa, Herbaspirillum rubrisubalbicans M1
MTIEDAARKIVVASAVAAQVVATAQAAAKSADIKQEPPLRLACVEICNFRRLAKTRVELDESTTILVGANNSGKTSILTALKNFLSDSPGFRAFDISLSHWGTLRALCQKWEALAEDPTTDNKDVEMWDEQLAILQSCMPAIDLWFDAQEGAFSYVRAFMTSLTWEGGPIGVRVRLEPLEDSTALRKLAWRYREARAPVKGLPAEGHSWPTDLLDYWLRNPGELRRISAYRLDPAQGPLVRPEIQDPQPLLKTAAPVELVHLRNLIRVDFVPAQRGLGAEDDEMRIEGASARPGLFSNQLLKFAKQYLNVAPSGHGNREDLVKAIGKAQLELDSSISAALRPAMKEVEVLGYPGLHDAKGIHFRTRIQTADLLDHGTAVQYRLDPEVAAESLPEHSIGLGYQNLQSLSFMLVSFRAARLSAKQGLPVPIHLVMVEEPEAHLHVQVQRNFSLNAHGLLCSKDELHRGLRSQLVISTHSSHLAHGDSFTRLRYVKRIPGDGAGKKPSTDVVNLGDAFGDDDETRTFAERYFQVQHTDLLFADAAIFVEGTAERMLVPMFIKQNFEALAKKYISFLDIGGSHAHRLRPLVERLGIPTTVITDLDPVLPTKDTKNRTIRAAVHIAGQEGIECGNDTLTSWHPMLPMFYDYGKPTESQLVWTSATGVKVRFAWQLPVAAASAQWPSSFEDSLILSNIDWFKDLENEVGKDGKKVTHRGALAKVIGTVKDHPDHGELLEELHRMLRRSFSKGDFAASVFERMEKGARLVCPAYISDALAWLQEQLTSKREETL

SEQ ID NO: 70659 - protein, 651 aa, Herbaspirillum rubrisubalbicans M1
MSGLPDVGGNDRDAHVVEDICRYVTANPAQSFFLFAGAGSGKTRTLVEVLRRVTGVVEHEAGKQYAERLRARGQAVRVITYTKNATAVVTGRLGENVLTEVSTIHSFCWDLIQGFDADIKEALLARIDKKLDELKRAARAKARGESDTDRRKYAELEDDATKVRATDSFIYHPDRRTFGAGALTHSQVIDSAAWLLNERPTLRRIVADRHPLILIDESQDTMRAMLDSLFGLAASFPGMVTLGLLGDHRQRIYADGHDDLPSHIPRNWERPALQMNHRSQKRIVDLINDIWEADLEGRTQPKTGVRQTPRTEKEGGAVRMFIGSAHLSTEEKMASEGRCAEAMKAQTGIDAWGGDVKKYTTLALEHKLAAIRGGFLNAYVAVHLLDPDASAPSSSGDRSGPGMLRPLLGAISELAECVNPDASINEFAAMNVLRRDGLFAKLPDDSIKRGKVVADIQHTLNQFAQTVVHPDATVDSVVGPLLDLELFDVDGRFYKAYRDETPAPPPPAVLSQEDVEDRRKRGWEALFRTPWQEIPKYRAYLRGEMELATHQVVKGSEFEHVMVVMDDTDAGGFLFSYDKVFGSQELSKSDLKNIEEGRETSIDRTLRLLYVTCSRAEESLALVLWAANPGAAMGAVQATGWFREGEVQEVK

SEQ ID NO: 70660 - protein, 659 aa, Escherichia coli
MKITQMEIKGFKSFDNVGQTININSFTSLIGGNGTGKTAVLLALTRMFGVKSSDRIVQVDDFYVPPGDEIDTQDERELSVRVKFEFADLQDGEDDSVADFFKHLVSNEADQIPYCIAKLKAKWTKTNLAEGDIDSDLVWEIGKYEKNITAYERSKIHVHYVPAYRDPAQQLKQTAGTIMHRLINAVEWSEQMSSTVDEVAESIGNQFQEEIGVQTITSSLSRNWKTLFSGGYFEQLKIQPVMNGIEDVLKHIDTVFMPTPVTQPLPTERLSDGMKSLFYLSLVKSAFDIEDEIINSGENELSISVEALDPPNLTIILIEEPENHLSPQYLGRIVKLCEDISENDRAQVVLTTHAPSLLNRVEPENIRYFRLHDNKNTVVKPILLPSEDEDDGDNVDTFTYVKEAVKAYPEIYFAKVVILGEGDSEEIVIPKIAQVNGIELDTSLITFAPLGGRYVNHFWKLLDELSIPHVTLLDYDHRRGGGGWGRIKYALKQLVSVGKDKNKLLIIKTGVLSDKELEKMHTWGEDKDNEIAWMNRLKEYNVYFSYPYDLDWLMLNEFYEDYKTFVPKKGGPKLPKDDDPEYNDKVRAAIASVLKKEVSDIEIDDFDDHDKYFWYRYLFLGRGKPLSHNYVLSKLEDGKLRDNSPEILDELIETVRGLL

SEQ ID NO: 70661 - protein, 615 aa, Escherichia coli
MPTIKDGDWVLKDIQEVEDEAMKVIRNSTEHNLVLAGPGSGKTELLAQKACFLIETGKCSKKKIIALSFKKDAAKNLQDRVNSRLDLKFRNKFESTTFDAFCKSIVDRFKGTLPRFYRPSDDYEIISLNKKEVIAEIKREALGFEGLTSFELNKIKHSNFEEKYIVIPYKQEERHTINGRIRYFVWTHLLKDKSRISFKMINYLANRIIKKNSFLSNAINSTYEYAFIDEFQDTTSKQYEIFKSIFFDRAIKITAVGDTKQRIMGWAGALPNAFDVFKKDFEVGDNNELISNRRSLKNLISYQRLMESFMNKTENKTEITFYKGEGLARLMQFEEVDQEASYIVSLIKKWIDEGIEQRDICILSKSVAGQYSQKIISELDKSGVKCRIENEYQELLNDAIVQLVLQLLMFVCNRKSIEGWASTMDLLCNIRGVSKRGDVTRLEKELSNFIKANKEVKSDVVDYLKGLLTIFGIPELKSYFPQYMNGNGLEHNINTLSKYLEALDIKNNMSNAIDMLSGNKTVPFMTIHKSKGLEFKKVVIVGLEPDAYFGDEEGQIENQKTVFVGFSRAIDEVFMTRCKLRRDNFGNVSRQDFNRIPLITDMLTYCGIEAESYPG

SEQ ID NO: 70662 - protein, 594 aa, Burkholderia cenocepacia; identical to SEQ ID NO: 62698

SEQ ID NO: 70663 - protein, 445 aa, Burkholderia cenocepacia; identical to SEQ ID NO: 64703

SEQ ID NO: 70664 - protein, 666 aa, Streptomyces sp. 4F
MGLHISRIEIRNFRNFQHLVIDDFPAHAVIVGENGVGKSNLLEAIRLVLDPLLPDARRLLREEDIWEGHPGGLSGRAEVTIVVELQGYDHDDDAKGILSMATVDYAPYTARLTYRFAPRTEIETAAGPAVQVTGRSLTAQDYDFVVFAGVSETNDVRRIRREVAVRVLPALRDAEADLHNWRRSPLRDLLERLPLDPANLEATVSAIATAVDQLTKDANVAKLEQHLTDRLQAMLGPRLAVEPTLGFASSQPDELIRAVRLFLDTARHRGISDTSLGSANVIYLGLLLEALSQQRQDDQFVATLIAVEEPEAHLHVSLQRHLFGYLLRSGPALILTTHSPHIAAVAPIRSFIVLRATETGTVGASTAALPVTSDEATDLERYIDISRAEVLFASAVILVEGLAELYVLPALAAAAGFDLDAYGTVVASVHGTDFKPYRALLGPRGLNTPHVIITDGDAAPDKRGRREAGLIRGAGLHHDPTQIAPLLTQVVQLPEHGTAAYHASRSPLADALQSIGVYVGVQTLETDLCALFGDEIVQAFTELSSNANALDDVRRGIANEQSTTVDPEVRKDMLDRISDLGKGRFAQRLAAHIRAVDLQARIRTAAQITDSGTPLDTRALHRLGTASYLFLALDDISHKARGTSLFAAPQDTTDTSAPRGTDAAGQ

SEQ ID NO: 70665 - protein, 627 aa, Streptomyces sp. 4F
MLQVSDALLSELEELHPTQRAAVLHPGNVVLRAGPGSGKTRTLVARAAYLLETQISAFRGIACITYTNAAADEIRRRVLQRGVRTDGRITCSTVHAFCLNEILRAFAPLTKEPAPQAGQVLGDKATQILLQHCFDRVGIAETLAQFRTGESTRIRRALACDEPLDAFDPREVQAARLYEQELTARGQTDFESMVTRALRIVREHEPVRDLLHARFPHLIVDEYQDLGGVLHELVVALHDLAGITVFAVGDTDQSVYGFSGADAKYLTDLADRGDFRDLPLDVNYRSGQKIIVAAEAALGTSRERRARDGAPPGSVNFHPVEEGLDDHARLACDLAQQAEQQQVRPERIAILYPQRGRLLDALLAELTRREIDFLYERDDKIPAGTLSRFVQRCASRAVTNYQIHTATADARPDMLRRAEAPPLAQLEHALTTLRTEARLSPPTSRLALLRTLQTCLDPQLPYPLDASAYDWLQRLRARLRLDAIAEQHPDKDNNTSLGELAALCRSKGLALQDLAQGEEVIGKILLTTYHSAKGREFDTVILPGLLNGIIPRNVADRGKWRQPTAKELAEQRRTFYVALTRAESTLHLIYGPGYHTKNGYWRPDGPSDFLIEMYRRLPATDSSEQQT

SEQ ID NO: 70666 - protein, 666 aa, Streptomyces sp. 4F; identical to SEQ ID NO: 70664

SEQ ID NO: 70667 - protein, 627 aa, Streptomyces sp. 4F; identical to SEQ ID NO: 70665

SEQ ID NO: 70668 - protein, 626 aa, Streptomyces scabiei
MSEVLVERFRSCERVQIPLRPEVTVLVGENNAGKSSVIDALRLLTDPLDGRRVRYFEESDVLRTTADLGGPSLQMDLADIHAGQSGAYLEALLREGAPDSRTARWQVSWTPPQTGGRRGSTAWSQGAGLPVTGEPPARGGVRHVYLPALRDAERELASAGGDRVRMILRGLLGDDDQVDAFVERIGTELKKVAADGDVVKVSEKINEPLRDLTVGAHPQESELALAEPTFASIARSLRVLLGDASVQPFPLVASGLGYANTLFIATVMAELDAAAEADLTVLLVEEPEAHLHPQLQTLLLRYLQRRAKASRRRSTGDPAEPAGHLQVVVTTHSPILSAAASVEDLVVMARWPGELSEGWQARPLPIPRLRLSPDRVRHLDRYLDATKSALLFASRAILVEGISELLLLPALAGRVLAAGEGADIEADREAFEALERFFGTTRVIVDGVGFEVYLRVLLAPVDGMSLGRRVALITDTDVAPDQPEPPRLESLRELPRRWGSPGELHLAAAPRTLEPALWSQDNIAALRAAFLRCAPRSQKRWEHVVKAADPALAFGELFVTKTSRTVTSTDGELAKGTKISKGRFAQELADVLADPAVTFTVPAYLGDAIRFVAATDRTGAAATGAP

SEQ ID NO: 70669 - protein, 561 aa, Streptomyces scabiei
MAVPAPAFIPACPGAGKTHVITSRHLQLPRRRLRQGRALISFTRVARDQMIRRCRKTGRADLVQAPHFIGTLDSFLWEFLVKPLRAADPVPRLLESWASVKAPVEDVDRVISLHRFPMTIDPSQNPAGEAVAWDKLRYETRQLIEASSYSRRAWEKRIFDTRKSWCEQGYHTGHEARFLALWNLRNAKAAATLLPPLLSRFSEVIVDEAQDCSAADLAILELLHDAGLPLVLVGDPDQAIYAWRGAEPHALRSFAAGLSPTTHPLTGNWRSSPVICGLASTLRTGQRPPDTSVVRDDATPVLLLPGRFAASGGRHLHAPSGASLFDTFGALANEYAVPAHDCLVTAFKYATLPGINREKPDTSAITSLAWARTTVHTPGASGEDLARACLIAARVLFGYWYPEQAGGPDRISATHSLPANQVNRTAFAFLHSLPPPHKKWGPQVWQAMKAWPPLPGAAPQGKKGRPAGVPTVARRQVATGMRTNIVHQLKGDEADGVLLLLPDAGSVQRWATGDPATDEVLRVWYVAVTRARRLAAIALPEEETDALARLLTERQVPVRVV

SEQ ID NO: 70670 - protein, 667 aa, Streptomyces turgidiscabies; identical to SEQ ID NO: 63856

SEQ ID NO: 70671 - protein, 545 aa, Streptomyces turgidiscabies; identical to SEQ ID NO: 63857

SEQ ID NO: 70672 - protein, 618 aa, Oceanobacillus picturae
MYISEILIKNYRNLGNAPFKMELRKFTTIIGANNVGKTNLLESIGLILSQDITMFKKRMLQIEDINYTTRLNFKRDVLNDSISYEKIEFPEVTVQLTFEEMNSKQLSVVGDWFSTKTMEKAKLTYEFKPSNNFDKETWIKEQREKIKQLKSAKEDIKEDELLHFIEFPIKSYQYVIYGGNDRTNRVDPYFLSMLKLELLDALRDAKRELIANGDYKLLYRILNQGNENAYEDIKEVLNTLDEKIKNNKQLKELKKTLISQLNRISLQGSGENNIDFNFTTLETGEILKKLSLIYGQDPITIERNGLGRNNLLYISLILSHLAPEENIDVCFRVVGIEEPEAHLHPHLQKHLANNIEQINASRDDLQIILTSHSTHITSSLNTDNMVILYKNGADVKKHYITDGFKDDKKGKHHRHYLEKYLDATNSSMFYARRIILVEGIAEQILVPVLFNLTYGRTLDSIGCNVINVNGVAFKHFLEIIKNGYFIKCAVLTDGDEGKKTENRATNLKRDYEKPYRNIKVSINKETFEKELIEANKAGKGKNVLLKALNSTRPKLGPEYSEKISNKEIGNEEFFSMIEEYKSEFAFNLGDELKKIGKSDFNVPTYIEKVFEFIMDIEG

SEQ ID NO: 70673 - protein, 513 aa, Oceanobacillus picturae
MAKKLKPTLVLAGPGAGKTHHIINRVIDKIPLLDPERHLVVITYTNAATLEIKERLSRKVDIPPNVFIGTIHSFLIRFFLKPYGKLLGLLPEDVIYKGIDIIAKDRIEENVIKAKIVEKGIVPYEKVVSLSNNIMENKVIRNLVSNRLQFLFVDEFQDADSGQYKIFEQIRIAGSTEIYYVGDPEQSIMSFQNKGRKIPTMENRVISKAIKSTMIKKEYLLGNHRSSKTIIDFINHFHTSIKQEQSNSKNVTQNKVAFISVEEDIREIIEQFNLLCNDKSYCQNPPKSRFFLAYEGKTYRAVADEFGLIQKEDKDYNEINLLKESSNFVCDILNKGKNSITDELGIENLEYRQLCLKLISSIRENPFMNSDDLINIVKTLFKQNPYSSVHRKAKHNAEEIAEGFIKKVNSELHDSKSKENEDFYLTIHKSKGLEADAVLIIAKTKNELRKWLEQDEQNRMLDKIDTCRIGYVGFSRAKEFLCIACLEKIDKDLKEKLTNLNVNIIPVKQKELA

SEQ ID NO: 70674 - protein, 520 aa, Xanthomonas citri pv. citri; identical to SEQ ID NO: 66020

SEQ ID NO: 70675 - protein, 598 aa, Xanthomonas citri pv. citri; identical to SEQ ID NO: 66021

SEQ ID NO: 70676 - protein, 611 aa, Xanthomonas citri pv. citri
MYLAELTITNFRKINNAVLHFQSGLNVLVGANNAGKTAIVDALRSLLAGHDEPYPRLDSDDIHRPKTGSPSGSIVFKYIFRGLCSDDEADFMSALKPAKDGQMEAHITISFSEADKTGRLRAKRWCGDHDDVGLTADMMENLRGVYLQPLRDASQALRPGRMSQLSRLFQLLVDDNGKIEINGALKLLDDELKKKAPIVSTHKAITTRHSEMLGPQLSQLLELGVSVSDFQRLASRLSLTVDLFELEQNGLGFNNLIFMAVVLSELTKNPQASYRGLIIEEPEAHLHPQLQAVLLGYFETIKAVDKEKPVQLFVTSHSPNFASIANLDSLTCLVDTGIKVETFFPRDIKFAVGKREKLERYLDVTRAELFFARRAILVEGAAELVLVSVLAEKCGHDLRKHGVSLISVEGLNFDSFIPLFGENALKIPVSVLTDADPTGPSEEDEEAGSDGSVVADDLASTDDASGGKKKAAPVYPSIGDKVQLSANTLSMIKFEDSYLKVFHGLKTLEYDLALYACNRKMMLAALSELHPKISASLAKKVDAATGETEKARVLFSGMFERKNGNVQKGRFAQALAHLIAKAKAEDFIVPGYIKSAVEHACQPGPKKGEDE

SEQ ID NO: 70677 - protein, 598 aa, Xanthomonas citri pv. citri; identical to SEQ ID NO: 66021

SEQ ID NO: 70678 - protein, 520 aa, Xanthomonas citri pv. citri; identical to SEQ ID NO: 66020

SEQ ID NO: 70679 - protein, 598 aa, Xanthomonas citri pv. citri; identical to SEQ ID NO: 66021

SEQ ID NO: 70680 - protein, 593 aa, Mycobacterium sp. IS-1590
MKLTHIKLANFRSFLDEHEFELADGANFFVGPNNCGKSNLISALELSMDPESVFVPERDRPVATQGKGPPKHTRITLTFRNTDKSSPQTTLLHRARKYELALRTKQGRDPGRKARTYADDGEIRRVVTFGAQGARQVSYQAKGLGAVSLPIDSPEHLAVESQFLKVVRFGVVHSGEDLESVLNGKFREVLQLVINDHLSTQLADTEKLREKYVKGLRTVLLRPLRERVFERVSSVFSEIKIVDLLPDVPTLNDTLSSVGITLADAASTELKGKGTGLRGAVLISMLQYLAEQSRRSLVLAVEEPEAFLHPGAQEGIALQLEKLAERPEVTLLVTTHSPHIISRRADARVTELRKSKDGNTHLAATARGNEDRAELLGSLFTDRGLARVLEQATSAPAGTRAIVVTEGYTDGLFLRYGLQAAGRPDLLEGIHFISAGGAKKVVFQAVLADSATHVPVIAILDQDAHGRSARDHLKDFGWTANDHIIYLGSWPKACNIGEHPVEIEDLIPPGAASAISQVLGDDAHDATQKCKGRTHYSYSKAWKELAIMQLPKELRGENLDDFVWLGEEIAKRIAKITERPSRVTSVNDPAASK

SEQ ID NO: 70681 - protein, 923 aa, Mycobacterium sp. IS-1590
MTKYTPSQQEAIRCIDETLQIIACAGSGKTQVISQRIAKILGESGVEPRNIIAFTFTEKAAAELKDRVLRLVEEQHGEVVGMAEMYIGTMHGYCLDLLQRLVPDTFKFSVLTEITARLLVDRNSRKSGLTACPTSSAKTPTLRRFVHSRLYLQIASILREDIVDEDLVDQRVWECLDSYLRLLVEKAEFDFTEMINLAVSFLEADPDEDEDARTIHDHIQSDVKYVVVDEYQDVNALQERLVVGLVKYGANLCVVGDDDQTIYQWRGSQVANIINFSGRHQGVRQVTLAENFRSSRGIVELGRSVAERIPSADRLAKTMVSAESQQWDRGDILALIFDDEQAEASWICDRIEEMRGVPFIDAPGSVARGLSWSDFAVLFRSVAKDAGPLVEELQRRGIPYIVKGLNRLFESAEIIAVVGLFRFMTREIDADTLSQLWDVADLVPDFELWPGAVAILEEGRNFGRGDRWGVYNIQRVYLDFLAALELREESVPGLPARGELVFYQLGKFSQVISDFEQIYFNSAPAQKYESFVGWLTHQAPDYYAESDADVGYASPDAVTLSTVHQAKGMQWPAVFVPCLRRNRFPSKRQGGLSVFHVIPEEAVADADRYRGTVEDETRLFYVAITRAQKYLWLSYSPGPNKLYKNRSEFFDHCTGQTWVSTRPSTNPLPARMEPQPRHEVPEVTFSFSELKYLFECPYSFKLRFLYGFNPPLHEALGYGKGLHDALSEVHKKAVAGEILDESVAQDLVDRHLFTPFAYPELRETLERSAVAAIKRYFATHGDDIPRTVHSEKQIQVHVAPGITVDGRIDLIRRLDTDELSIVDFKSTDRAQPEEVTRDQLHVYAVGYEELTGENADLIEVLNLDEAGKSTREEVETGLLTDVRERIREAGESLRDNQLNRLASWCTQCERCDLAGICRDRTNV

SEQ ID NO: 70682 - protein, 653 aa, Vibrio sp. MEBiC08052
MKIEKIKLQNFRCFGHEVVELNFEEELTILVGGNGSGKTAVLQAVSRLFGTSSSQRSVQRRDFHIPIDRQELQSGDSLFIEAVLAFPELEEQDASPLDAVPEFFNQMAASGEGEPLKARIRLKATWTDDGTPEGAIEEDIRWIRTLDDNFEWDDCSRVQAVERSSIQFIYLPANRDATTQVTALLKGRLWQAAKWSTAFRDASSDNAGQIQSSFEEEEPLRVLLGRLSRRWQQVHEADTDSQPRLRLIENRFEELVRKAEFTFTPDEEGQERRLSELSDGQRSLFHIALTAATLETEREAFSLPADDSSFEQDKLRRIHLTILAIEEPENSLSPFFLSRIIKQAREIGALPSAQVLLSSHSPAILSRIEPEEVRYFRMDRSTRCSSIRELILPEDDVEASVYVRLAVKAYPELYFARFVILGEGDSERVVIPKIAEEMGVPLDPSFVPVVPLGGRFVAHFWRLLNNLEIPHATLLDLDLGRRHGGANAMRSCLQNLADIGNDWGNRSRANAVQLTDQQLYNEGSQGQWLQAFNEQGVFFSAPIDLDFAMLLAFPTAYQVANPGGNGPQSSAAAIQAKKVSTLKTGGNPALYTAHFDDAFKWYPYLFLSRSKPETHLAAFSRIADGGVAASAPAELRALIEYVTDKLHLSGENE

SEQ ID NO: 70683 - protein, 621 aa, Vibrio sp. MEBiC08052
MTRVSRDEWVPLGVGGLEGRAWEALRETDSSILVTAGAGAGKTEFLAQKATYLLQTGICPAPKRILAISFKKDAARNIAERVAKRCPRDQARRFDSMTFDAFTKGLLDRFRPALPEPFNAPGTYQIVNPFRRDYDDFIERHGYHEVGAQQLERRLLLTDLPIDLSNGSEVHRALADYWHEQFFGGDEISLSFPMINRLVKLLLQENSYIRRALQATYPIVFLDEYQDTTYAQYDMLLTAFDGSDAVFTAVGDDKQRIMGWAGAMDDAFDQFENDFGARRITLLSNWRSHADLVRIQHEIARRIDGNVEAVQAQGTREIEGEVSAIWQFRNADDENNYLAEWVSREVQSGRVAPHDVAILIRMRADQVEGEIAPAFAARGLRIRNAARSVGEIQIQDLLGEELTSIFVPLLRLGATDRSPENWEQAQQNYLFLEAADPDNDLTQERLLVKLEAFVRQLRAELARRQPDPDAAEEIAEMLLEFVGTPRLRQSFPAYLRARDFERVWSGFVTLLKECAEHSSSWTEALDEFEGLGQVALMTIHKSKGLEFHTMIFYGLDNQTWWSLTPQRGEELNTFFVAFTRAKQRAFFSQCVERGHAIGWIQQLLAPAGVETIDGTTILGTT

SEQ ID NO: 70684 - protein, 619 aa, Stenotrophomonas maltophilia
MRLLRFEICNFKCIEHVVLEWEDLLVLIGENNAGKSSVLSAIAVFLSGSSIRDSSLFRRHQTDDGNAIELIGYFDCLTDDEKAQVAVRGRMDGDQWVLKKRYWFEPGEDGDAGGWKEQLFSFSGVERFVGWPDPDTTWAAFPAEYQPIIDALSNKGARPNAGSRESLKAAVRDQRPDLVVVGAAAWLPNPGGGGNWKSNANSILPRPILVRAVQEVSDETNAKDGSTYGKLVNLIVERSLAQRPEMAALQTALDDVLALFRPDPTNPLRQAQEVRDLQDRINQSLNEVIGGQALISTEAPELRTMVLPSTSLVIRDAQAGIDTEVGHQGHGLQRTLVITLLQLLADAQSQSYQAAGTGLQRSTILLIEEPELYLHPQMERLMRDVLHRLAAQPNTQVACCTHSPVFLDIANRYRAIVRMFKTAQGDAACYQVSQDLFPGVVHQADKQRLQTVARFHPTVNELFFAKNVVLLEEGSAIAAFERGADLMGLFQRHVRLRREVTLVDCNGKRNIPAFQRMLNAFGIPYRVVHDGDTNNPQAFADNAPIAAALPAGGAHLIHKVLPDDLEGLLGYTAAKGSSKPYIAVCTVENLHAQAQLPTAFQQAVCMTYFGQLTEPQPGP

SEQ ID NO: 70685 - protein, 907 aa, Stenotrophomonas maltophilia
MLKLNANSRSYEARITRSSPIEINEGIFWTDLTLRVKGQDSIRVDGIPNAHGRAIRQAIAAVVEEKRVAAARLELETRLKSRRERFIAAIEPILSWHYEILRDVARHRQERRWITSESLRRYMDSKPVPLVTTSELIQMLAEADIQAFLGDKLKVAQTATKLWSANLKGAVARRNEEHVKAELVACKNLFDSIEKMPLTEEQARAVICFDNRVQVIASAGSGKTSTMVAKAAYAVDRGLIAPERICMLAFNDSASKELQKRIELGLKRIGREDVKVAAMTFHKFGLDVIGKATGRKPRIASWVEQERDAEKLEDLIDGLKDRSKTFRTQWDLFRVVFSRDIPKFGVETDHEDYDKISGKTGFSTLKGDVVKSEQERTLADWLFYNGIPYIYERPYEHPTATADHSQYHPDFYYPTMALYHEHQALDGEGKPPDKFPRYMEKVIWAREQHAHFQTDCIETTSAQMWDGSAFDHLEAEFKKRGVTLDPDPNRPVAGREPLKHGDLVRLFRSFITHAKSNCLSVAELRKRIKAEDFDAFTYRHKLFLALYGPIRNAWDEALTDADAIDFEDMLNMAGEHLEAGNWNSPYELIMVDEFQDASWARARMSQALVKQPGRFLFVVGDDWQSINRFAGADISVMTGFRDWCGDAQVLKLERTFRCPQALCDASSAFVMKNEKQIPKKVRSETLQIGPVLQAFQVLDRTRIRGAVRLHLQSIYEQLRDGSHPLGKNGKVSVYVLGRYNADEHYVPPSWKSDFGDKMAVEFHTIHKSKGSEADYIVLPHLAKHGFPSRKEDDPVLRLAMPAEDPYPKSEERRLFYVALTRARRSVAMFTVQGRESPFLIELMKGGWVEVLDADGEPSTAIVCPRCRNGVMVQKSGRNGPFMSCTNFPPCKKTMNIPHMPTSGQRTV

SEQ ID NO: 70686 - protein, 595 aa, Flavobacteriaceae bacterium CRH
MYLSELKLWNFRKYGSEKPFDLSKPNLIVPFNKGLNVLIGENDSGKTSIIDAIKLVLKTHAYEWIKVEESDFYRGSDKLRIELEFKDIKPNEAKNFIEWLGWEGTGKDAIPILRLIYQVEIKQDRIQVTDVKAGMDEIGYSLNAEAREYLKTTYLKALRDADNDLTAKKNSRLSQILKEHEFFKKKSKDEEHPFESKFKKLNLEIEKWFKADGNEKLKKIIDDFLVSFTHKDKTSNISLGDSDIKSILEKVSLGILNEQNLGLGTMNRLYMAAELLHLKKENWDGLKLCMIEELEAHLHPQAQMKIIEALQKETEVQFILSTHSPNLASKVKLHNLIFCNNNMALPLGEVPNEENERTNKDKYTKLDKYDYKFLERFLDVTKANLFFAKGIILVEGWSEEIILPVIAKRLGYDLTEKEISIVNVGSTAYLKFAKIFLRQNATEKLNIPVAIITDLDNRPEAKDNSFCAVKKEKKEEKIKELEKSFNNTNVLLSYTSDWTLEWCLYNSETLSKSFKESVSEVHSGTDEFKGEKFEETKFISKLRKDKGHSPIDKVEVASLLAEKIEKNYLITKENLAKDKKIEYIIKAIKYACDEN

SEQ ID NO: 70687 - protein, 744 aa, Flavobacteriaceae bacterium CRH
MKIEINDIHIKEAENIFIRGNEFDKKERIPFIKNLETCDLLAVPGSGKTTALMAKLYCLSKQLPFKDGSGILVLAHTNSTVNEIEKELKRHCPNLFEYPNFIGTIQSFVNKFLANPANFIKYENYLYKVDDEIANKKIVDSVKKLEFTNSLKTYFFFQIYGQNTLVSKKELVENYQVVDIKAKEYIKVLKDQKILTKNGLSYTKVKNKHAISILKIDERLKEILKSIHDKAKKIVDIEKNERAIIYSLDLINKKFLYGNSPFRFDSDSGKELLKIIESQFKDGIVRFKDCYSLASWYLHNFPNVKEQLQNRFKYVFIDEMQDLEKYQIDIIDDIFKKGNSKTIMQRIGDPNQSIYNRVKDDCDWKPRKIKYLNGSNRLSPKNAELVNYFTYRNEEENFKVVGERKLLDDEKEIYPHLVLFTKETKEQLKSKFEEIIKNHNLHNIEEKKKGFKIIGWTGERTNVGDGNLCLNTVFGYNKLSKAKKEDFDSLSKYLQLFNQEKETLESARKTILNALITILRFEDKKIVKKIRGKSVERFYTKSDLIEYIKEYSKNEIYEDFKDKLYSWCFDLVSSKNYTLIFDSIKSFIENQLKDWFDLEINHKTQFFIFEFNDENKIKNKKIVEDDLGIEVATVHAVKGQTHCATMYVETAYKKPIYETLKLKEASSNKSIKKQQSKTIPLYKQKQSCETPTGIEALKMMYVGFSRPTHLLCFAVLEENVKDDLDKFKSADWIINDDLIKKNKL

SEQ ID NO: 70688 - protein, 588 aa, Bacillus licheniformis LMG 7559; identical to SEQ ID NO: 65702

SEQ ID NO: 70689 - protein, 458 aa, Bacillus licheniformis LMG 7559; identical to SEQ ID NO: 65703

SEQ ID NO: 70690 - protein, 475 aa, Methanocalculus sp. 52_23
MCAVLQSSGIKIIEVRIRNFRSLKEVDVPLDWLTVLIGENNAGKTSFLDALFVAIGAGRRSISIDDIYLAKSEKTVPKDRDVIIDLLIRPTDDSGNITDAFQAGEYWIELYGEGISQDDNDRDFIAIRTQMKWNATEGEYEVERKFLGDWQDPGRLDQSKTKKTVSANQIKPLSLYLLDAKRDIKEEFQSRSSFWYKLISDLGLENELIDEIEYELDKINEGIISGSGVLNHIQEHLNGLYKTIGGDRESVSITPITRHLRDLSKGMDVNYSTKGAQSFPLARHGMGTRSLAAVLTFRAYMTWKQRNSDGRNIHPMLALEEPESHLHPQAQRALFFQIEEIPGQRIISTHSPYIAGQTDVSKFRHFRKVGDNTVVTLMDIAGLDQDDIHKIDRMVMNTRGEIIYANALVLFEGEQTEDQALPIFAEKYWGQHPNALGISMVGVGGDGLYLPFIRLAKSFQIPWYIFFRWRKCHGY

SEQ ID NO: 70691 - protein, 630 aa, Methanocalculus sp. 52_23
MNIQLSKTQCRIVQHGEGPLLVVAGPGSGKTRVLTERIRRLLNEDKGHFRILALTFTNKAANEMKDRLSETPNIDQRAFIGTLHSFCMEVLANRGKPVGIEKLPSIFESYQDRKQVLSQAVMEDPYLRHKLNIILDAKSQDRRLNSWLDMISAAKNNLYLPEMLDDETERQVYEAYNNGLRVSGAVDFDDLLLLTYRLFQERPKIADFYRRQYRYICIDEGQDLNEAQYQVIRALCGLEHRNVMIVGDKKQAIFVWNGANPKYLDQFEQDFGAKKIFMNDNFRSSQVVVNVAKSLVSEYEVEGQLPIVGSIELIEGMDEQHEASLVLDYIQKLLNEGHRDVEGPITLERCALLGRNRYALSAVEDELNKRQWPYYKQLSAQHESESDLIQDFEIGLRLVVNPFDRLHLSMLLKRWNMREGISYFNQRADDGLSLLSALKKRVSNDDQIAVIQAIESMEWTEQNFKFINAIKYLDDYANNIINQDERALILEDIKIWQKHWDYYLRLQPGGSHTLTSFLGQVALGTTQQPRQEGLALLTVHSAKGLEFDVVVVMGMAEGTFPDYRARNAAALEEEKRDAFVAVTRSKRLLAFSYPKTKVMPWGSKRKQNPSIYLETVGLIKHDKSKKTNAS

SEQ ID NO: 70692 - protein, 698 aa, Flavobacterium psychrophilum
MKINKIKIENFRLLKNFQLDLENELSLVIGKNNCGKTSLLAVLDKFLNQSDKTKFSFDDFNMDFKNEIKTLVENPPVDDEVFEQKGIKLKLFIEYNEDDDLSNISRVMMDLDPNNNFIVLGFEYVLDLEKLNKLRIDYNEFAKKEAIKTKKKKDDEPKLVKDLIYFLKANHQDYFLFAKKSIEFDLSTNEENELNFIDLIKEKINIKEIINFKFISAKREVSNKEVDKTLSIQTSKIYKKTEASDEQQEAIDDFKDKLSDTDFVLSDIYSNLFKNVIEKVKTFGGIKKDDSIIEIVSTLQHRELLEGNTTVMYNHNESSLPEHYNGLGYMNLISMIFEIEILIQDFKNSKDEKPSDINLLFIEEPEAHTHPHMQYVFIKNIKELLKQGIKRDDGQSGELQSIISTHSSHIVSESNFDDIKYLKKNDNNSVIAKNLKELKEEYKANTKQYEFLKQYLTINRAEIFFADKVILIEGDTERILFPTLMKKYDIDEEKKYKNLGTVDDSLPLLSQNISIIEVGAYSQIFEKFIEFIGIKTLIITDLDTVGLDDKKCEPSIGVSYSNDALSFFFNDPTLTDLKGFTIQNKIFSNTNGLWNVDANGKLCVVYQILENGFNSRSFEDSFIHLNREFITPLKDEFKGLQNRTNFDNTANNAYLLAEHCIKKKTHFALDILYNSNDDFSNWQIPGYINEGLLWLKQD

SEQ ID NO: 70693 - protein, 633 aa, Flavobacterium psychrophilum; identical to SEQ ID NO: 62717

SEQ ID NO: 70694 - protein, 698 aa, Flavobacterium psychrophilum; identical to SEQ ID NO: 62716

SEQ ID NO: 70695 - protein, 633 aa, Flavobacterium psychrophilum; identical to SEQ ID NO: 62717

SEQ ID NO: 70696 - protein, 698 aa, Flavobacterium psychrophilum; identical to SEQ ID NO: 62716

SEQ ID NO: 70697 - protein, 633 aa, Flavobacterium psychrophilum; identical to SEQ ID NO: 62717

SEQ ID NO: 70698 - protein, 274 aa, Pseudomonas sp. EpSL25
MRPSSPSWCQFYSLGFFVQSLGLSVDELGLSVINIRSTGFKNVAVLFHDIRIRKRCAIVTDMDTVFFDTTPNLADSDAWAARKRKAIGSQTAGAHRKIDLDAFGAGNVWVRSFYATHTFEVDFVGAGNHEVIVRTVDKVYKAPATITQATTELRSGLLHQSGFRTLTMAEQEGKGWFAVLVAQTLDHQLVVPPYIREAVLFAHGSFSRPLIIRILQYRISCLWRIDVASHARLSAFALELERFREQEIDLPALRAATVAALPGDVVHAFLAGMN

SEQ ID NO: 70699 - protein, 592 aa, Pseudomonas sp. EpSL25
MFVWDATELNPEQAAAVEEPSSVFLVACPGSGKTRTLTYKIAYELSRRTDKRIVAAITYTHRAADEIQERIEALGVDTTALWIGTIHAFCLEWIIKPYGIYVPELARGYTVLDRHDREKMLERLCEPYRGVTLYDCDYYFEEDSYRLGCADTWKHDTIHKVLAAYFRELADARRIDFELILWYSQVLIRNRPDIAVLLSQVFSYVLVDEYQDTKRIQYNLVGAILRAGAGRTKAFIVGDPNQAIYGSLGGYAISVSDFRALTGIPIQEMALRLNYRSSARIIGHFSNFNVHATDIEGAGKMIGFPSQVSYNRLIAHEDLHDELVRLIQKNLAEGHAPEEICVLAPWWILLASTTRKLVAMLPEQQFDGPGLVPFSNDTDNFWFKLSKILLTESSPQMLVRRMRWARDVIADLRDFGVDTARITQRSLLRESNSLAITETDGLAYLDQAFVALLTRLGIELRAFPALVEHREAFFASSLARLEKLQKSGAGYITDLSFFKKVFRERTGITVSTIHGVKGAEFDVVIAFGLLQGMVPHFSESDGDVSASKLLYVLASRARKHLHLISEAGRSRGRHRSYEPTEVLVRCKFDYNG

SEQ ID NO: 70700 - protein, 627 aa, Streptomyces phaeopurpureus
MYVAEVLVERFRSCERVQIPLRPEVTVLVGENNAGKSSVIDALRLLTDPLDGRRVRYFEESDVLTTAAAQGGPSLQLDVARIGPQESGAYLEALLPQGAPDSRTARWQVSWTPPQTGGRRGSTVWAQGAGLPVTGDPPARGGVRHVYLPALRDAERELASAGGDRVRMILRGLLGDDERGDAFVERIGTELKKVAADPDVVQVSEKINEPLRDLTVGVHPQASELALAEPTFASIARSLRMLLGDVSAEPFPLSASGLGYANTLFIATVMAELDAAAEADLTVLLVEEPEAHLHPQLQTLLLRYLQRRARASRRRPSGDPAEPAGHLQVVVTTHSPILSAAASVQDLVVMARCPGGLSDGWQARPLPIPRLGLSPERVRHLDRYLDATKSALLFASRAILVEGISELLLLPALAERVLAADEGADAPAKREAFEAVERFFGTTRVIVDGVGFEVYLRVLLAPVDGICLGRRVALITDTDVAPDQPEPPRLQSLRKLPRGWHSPGELHLAAAPRTLEPALWSHNNITALRAAFLRCAPHSQDRWEQVVQATDPALAFGELFVPKTSRTVTGTDGDILKGAEISKGRFAQELADVLADRVVPFTVPEYLAGAIRFITAQDTSTPAVGAP

SEQ ID NO: 70701 - protein, 582 aa, Streptomyces phaeopurpureus
MTTPQQTDPVRADAEKQQQAAMAVAAPAYVAACPGAGKTHVITNRHLQSPRQRLRKGRALISFTRVARDQMARRCRSAGRADLVQAPHFIGTLDSFLWEFLVKPRRAAEPAPRLLESWASIKAPVQGTDREINLHRFLMTIDPSHNEAREAVAWDKLDYDTRQLLKDSSYSRAQWEKKIFETRKSWCDEGYLTGHEARVLALWNLRHSKTAAALLPPLLSRFAEVVVDEAQDCSAADLAILQLLHDAGLPLVLVGDPDQAIYAWRGAEPQALQSFAAQLSPAPHRLTGNWRSSPVICRLASTLRTGQRPPDTSVVRDDDIPVLVLPTRFADSGSRHLHAPTGAGIVDTFRTLAQEYAVPAKDCLVTAYKYATLPGITREKPNTKAITSLAWARTVTHTPDASGDDLARACAVAVRVLFGYWYPGQSGGPDRIMTGHRLSAGQVNRTAFAFLHSLPAPHREWGPQVWQAMKAWPPLPGAAPQGGKGRLAGKPTVSRLQAATGIRTNIVHQLKGDEADGVLLLLPDAGSVQRWATVDPATDEVLRVWYVAVTRARRLAAVALPEEESDALARLLTERQVPVRVA

SEQ ID NO: 70702 - protein, 674 aa, Streptomyces ciscaucasicus
MHVTHAKVANFRALRDAEIQIDASTTLVVGRNNSGKTSFVNLFEKFFSPSDDVKFVLEDFTTSRIADLEHARRQFTDAAQLDTAGDQEAAGALRSKALELVPAIRLAITVEYDEEDDLAPISAAILDLDETCRSVRIVATLAAGDPVKLVADFSEAARRAGSQFDSYKWLRRKFNEYFTATYRAVSPVDDSVSRELKPTAARSILAVRFIYAQNKFDDTPADKTRTLSKTFEAYYRASSSDDNRGQNVDRIEEALALASKELDSNYDELFEPFLDDLSRFGLELMSPLHPPRIVALIEGAAVLRGSTRIQYPSGDDQYPLPEGHNGLGYSKLIFTILQIRGFIESCSKASPQPALQILFIEEPEAHLHPQMQETFIKNIEEYIRSKTDRKVQVVITTHSSHMVARSGFSKIRYFDAAEHHVTIKDMSTFQASVKKRSDGRETLRFLEQYMELHRCDMFFADKIILIEGTAERLLLPKMIARCAARLQRQYVSVIEVGDAYAVRFRSLLEFLNVKTLIITDIDSVDPSHKKRLGCHPATPGACTSNSTLKHWLPGKEVIADLLSTPDEDKLSKNVRVAYQVPEQPGGSFGRSFEDAFIIANALVLAENISGLALKGHFDRTVGEHPSEAAIATQAYQIAENLRDHKTDFAFDAMLLDGWKVPRYIDEGLQWLTLP

SEQ ID NO: 70703 - protein, 543 aa, Streptomyces ciscaucasicus
MKTTIDKVIGELEARRSFLVEAGAGAGKTTTLVEALEHSLRSQGAELASKGRRIACITFTNVAKRKITDRIHDHPLVTVATIHEFLWEIIKGFGAELWQQIIEYNDALATPEDLSELTGPLPPVQYVDRRRRLDRGEISHDEVIDLALRMVTRHPKLTRLIADCYPVVFVDEYQDTSPKTIRLLLDHLAGAGRQSCVVGLFGDSMQKIYATGQGAVVHSKLTVITKHENYRCSPPVVAVLNKIRPELQQEAVGGHTDGEVHLFLNSALPPGPARLDAARRHLAELGWSDDTTSYLMLTHRGIAGALSYGALLQQYQILGSRGRDKLLDNDEPYIEYFSRVEALCRAFHALDYAELTSLLVAGRTTITSHTDKQRIAADIRQMTTVRESGTIGDVLDHMARQHLLSVPRKLSDLERRRKSENLEGYDAKLAEFSNALREVPYKEVIRFIEYREQLTPFHTQHGVKGDEFDNVIVIIDDGSWTQYNMGKMLTGRDLEKRLERSRNLFYVSCSRARRGLAVVFLTDVPDEALPNAYDWFASGTVHP

SEQ ID NO: 70704 - protein, 671 aa, Streptomyces corchorusii
MQLSRVRVKNFRNFEDLTIAPFPSPAVIVGENGVGKSNLLAALRLVLDPELLDRYRVLDADDVYDGSLGIAGGAEVSVEVELSGFDADADARAVLDGAIVSLAPLTARLTYLFRPRQRAIDADTSGADSDAPEGELTAADYEWTIFGGTDPGNSMRDVKRYAAFSVLPALRDTEQDLARPDRSPLTRLLRELPPAAENLERTLAVMRQARAELAKDDNVQKLTQQLTKRITALAGPRMSMSPTLDFAGREEDLLRRVQLYIDAANTRTIDRTSTGMANVLYLAMLLERLEIRRVTEDGEDTLLAVEEPEAHLHPTLQRHLFFHLLRNLSRLMLTTHSPHIAAVTPLTSLVLMYEENGQIQARSVPKALLEERERKDLERYLNVSRAEMLFARGIVLVEGIAEAYLVPALASAAGLDLDAHGIVVANIEGTDFVPYARLLGPTGLERSFWILTDGDQTDLDPQQHAHLREGGLTRAVDVLDVLSPADGERMRTTLETMRLAELPEDGSAREGRDDLVAAAAQHRVFVGEHTLEIDLARLLDEEMRAAFDELVAGPVARGNFADALRAALSTTTPQQRRDVLSRIEKKEVSKGRYAQRLAAHVEQVGDLAARVRALVGVAPDQPVTQTMLMQMGGCGPLLALLDQLCGNCLGRPLAPGVEMDAQPAVDVLDAG

SEQ ID NO: 70705 - protein, 622 aa, Streptomyces corchorusii
MHHDQLPAMEERLPAALAAEFAELTDEQREAASHQGSLVLRAGPGAGKTRTLVARVGYLLATTSRHRSVAAITFTDAAATEVTQRLRHLGLPGGRRISSSTIHSFCMRHILLPYAHFTDTPLPDDFTVCTEAQSSKWWDEAAYDAGLGELKSKDRTELSKQRRLLAAGTDSASFNLLYRATITRYRELLTERQVLDFDAIPEQALNVLRSTHEVRKMIAARFPHIVVDEYQDLGPVLHAIVLELLACGVEFTVVGDPDQTMFGFQGASPHYLTELEQLHGFVTRQLNVNWRSGSHLITAGLRVLDADRPYRAAPSRNEPGLVTEEIIVGHRDLDEHASRAVTIVQDRIRAGTQPEEIAVLYPSQGPLLTELHTAFEQAQIAYDAEKARKIPPGHLADFISDCTSRYLAGPLPGGASALPGAAKARTLMELATLWHRRRVAAGLAIEEDTPRRLARTLTQLLDASPRPQPADDATDFLERLISELDLSTLAAASEDSRDHTAIQQCRGAAAAGLSLAEMAGARAPGRIVMTTYHSSKGREFDIVVLPGLVNKHIPYYGWSGPTQREMRNARRNFYVAFTRARHEVVLITGKYHTDRWGEPHTTRRSVFVDDILGTHPEHNEDR

SEQ ID NO: 70706 - protein, 663 aa, Streptomyces longwoodensis
MFIEKLVLENFKCFGPGRTILRLDRGMTAFIGANGSGKTAACEALLRLFGISGQERSVRVDDFHVPAGETDLPASRELTIEAVLAFPELDGSGENDEVGEDDDGDAAEDAEHQQAGVSRAVPEFFRRMAATEDGDLKVRVALRAEWVDDGTVEGAITESRVIVNTLVEEYGEDDYVQLTAAERSRIQMIYIPASRDGVRQVTAFLRSRLWRAAQWSTGLRDLVSGHAAEVAQNFTEEPVVQAVEGALTARWQELHDAGMHSDPKLRLLDGDFNQLVRDSELVFEPDHNGRPRPARMLSDGQRSLLHLALAAAAIDVEAAVCAGQHSDDFTLQAAQLPHLTLIAVEEPENSLSPFFLSRIVGQLQDLSSKTATQTILSSHSASVMPRIRPEDVRYFRAEPATATASVREITLPGDTTEAGKYLREAVRAHPELYFAKFVVLGEGDTEQLVIPRIAQAHGVQLDPSFVAMVPLDGRHTNHMWKLLHDLDIPHATLLDLDYGKVGAGPARLRDACNRLVDNGLDPLEDLDGYDDVDDIHDGLLLKHIRPILEHLRTFAVFYSEPLDLDYAMLCAFENAYRHLEGKQRGPDSTDPTTTVLGEKGTRPRYWNGTRAEWLGWYRYLFLTRSKPSTHLRALGRLSDEELRLNAPEVLVALVEHIRKEVAL

SEQ ID NO: 70707 - protein, 643 aa, Streptomyces longwoodensis
MSASDRLASTTVPTLRPTALVPVEDWRPAGIDDLEPAAWEALRDTGNVAVVAGPGAGKTEFLAQRAAYLLQTGLCPWPQHILAISFKRDAAANLGRRVAARVPEHSSRFASMTFDAFTKGLVDRFAPALPPDWRMSHGYDIRTAPDREVSAFLNTIAFSAPRTLSGKVGFQPGRFVSDIVGGWNLPVSVPTDDEVDAVSYAGREWWRARYLRPGKAEVDFVMLNRLAELLVRAVPKIRRALRMTYPIVFVDEFQDTTSAQFSFLTSVFGEETAVTTVGDSKQRIMGWAGAVPEAVQRFTSTFDATTYRLAWNFRSSDALVELQHVIASKLDPTTVRATSKATAEDGHEPAVLWTFSGGDREARFIADWIARDIAGSDRKPADFALIARQKIKDFEPLFRARLAAHGIRVRNDDARVGKMTLQDLLKSETARLFVGLFRLAHQPRGLVAVWQEVSATLERVYGATDDEAAQQRVGEDLSDLTTRLRAWLHSHPPSTTSAADAVRRMLDLADSAALRRYVKATAPGEEFDLVTGAFEARLETVLGGAADWGVVLDEFESADAVVLLTTHRSKGLEYHTVFFLGIHGRQWWALGSDPREGTSTFFVGLSRAAQRLIFTTDRSERAGPISAFFAMLAEAGVPEIDQG

SEQ ID NO: 70708 - protein, 665 aa, Streptomyces canus
MGLHISRIEIRNFRNFRHLVIDDFPAHAVIVGENGVGKSNLLEAIRLVLDPSLPDARRLLREEDIWEDHPGGLSVRAEVTIVVELQGYDTDDDAKGILSAATVDYAPYTARLTYRFAPRTEIATAAGPAVQVTGRPLTAQDYDFVVFAGASETNDVRRIRREVALRVLPALRDAEADLHNWRRSPLRDLLERLPLDPANLQATASAIATAVDQLTKDANVARLEQHLTDRLQAMLGPRLAVEPTLGFASSQPDELIRAVRLFLDAARRRGISDTSLGSANVIYLGLLLEALSQQRRDDQFVATLIAVEEPEAHLHVSLQRHLFGYLLRSGPALILTTHSPHIAAVAPIRSFIVLRATETGTVGASTAALPVTSEEAADLERYIDISRAEVLFASAVILVEGLAELYVLPALAAAAGFDLDAYGTVVASVHGTDFKPYRALLGSHGLNTPHVIITDGDAAPDKRGRREAGLIRGAGLHPDPTQTAALLTQVLQLPEHGTAAYTASRGPLADALQSIGVYVGAQTLETDLCALFGDEIVQAFTELSSNTNASDDVRRGVANEQNPTVDADVRKDMLDRISDVGKGRFAQRLAAHIRAVDLQARIRTAAQITTPDTLLDTPTLHSLGTASYLFLALDDISYKVRGTSLFIDPQDTNNTESRDTDAAGQ

SEQ ID NO: 70709 - protein, 627 aa, Streptomyces canus
MLQVSDALLSELKELHPTQRAAVVHPGSVVLRAGPGSGKTRTLVARAAYLLETQISAFRGVACITYTNAAADEIRRRVLKRGVRADGRITCSTVHAFCLNEILRAFAPLTKEPAPQAGQVLGDKDAQILLQHCFDRIGIAETLAQFRTGESTRIRRALACGELLDAFDPREVAAARLYEEELTTRGQTDFESMVTRALRIVREHEPVRDLLHARFPHLIVDEYQDLGGVLHELVVALHDLAGITVFAVGDTDQSVYGFSGADAKYLTALAERGDFRDLPLDVNYRSGQQIIVAAEAALGTSRERRAREGAPPGNVNLHPVEAGLDDHARLACDLTQQAEQQQVRPERIAILYPQRGPLLDALLDELTRREINFLYERDDKLPTGTLSRFIQRCASRAVTNYQIHTATADERPDMLRRAEAPPLAQLEHALTALRTEAQLPPSASRLALLRSLQICLDPQPPYPLDAPAHEWLQQLRDALTLDAIAQLHPDKDNNTSLDKLADLCQAKSLALEDLAQGEEVIGKVLLTTYHSAKGREFDTVILPGLLNGIIPRNVPERGRWRPATAKELAEQQRTFYVALTRAESTLHLIYGPGYHTRSGYWRSDGPSDFLIEMYQRLPSTGSSEQQT

SEQ ID NO: 70710 - protein, 664 aa, Streptomyces bungoensis
MFIEKLVLENFKCFGPGRTSLRLDRGMTAFIGANGSGKTAACEALLRLFGISGQERSVRVDDFHVPVNETDLPASRELTIEAVLAFPELDGTGENDEVGEDDDGDAAVNAERQQQASASQAVPEFFRRMAATEDGDLKVRVALRAEWVDDGTVEGAITESRVIVNTLAEEYDEDDYVQLTAAERSRIQMIYIPASRDGVRQVTAFLRSRLWRAAQWSTGLRDLVSGHAAEVAEKFTEEPVVQAVEGALTARWQELHDAGMHADPKLRLLDGDFNQLVRDSELVFEPDHNSRPRPARMLSDGQRSLLHLALVAAAIDVESAVCAGQHIDDFTLQAAHLPHLTLIAVEEPENSLSPFYLSRIVSQLQDLSGTTATQTILSSHSASVMPRIRPEDVRYFRTEPATATTSVREITLPGDTTEAGKYVREAVRAHPELYFAKFVVLGEGDTEQLVIPRIAQAHGVQLDPSFIAMVPLDGRHTNHMWRLLNDLDIPHATLLDLDYGKVGAGPARLRDACNRLMDNGFDPLEGLTDYDEVDDIHDGLHLKHIKPILKHLRAFAVFYSEPLDLDYAMLCAFENAYRHLEANQRGPDSSDPTTTVLGEKGTRPLYWNETRAEWLRWYRYLFLSRSKPSTHLSALGRLSDEELRLNAPEVLVAIVEHIRKKVSL

SEQ ID NO: 70711 - protein, 643 aa, Streptomyces bungoensis
MSASDRLVPTRRPTLRPTTLIPVEDWRPAGIEDLEPAAWQALRDTGNVAVVAGPGAGKTEFLAQRAAYLLQTGLCPWPQHILAISFKRDAAANLGRRVAARVPEHASRFASMTFDAFTKGLVDRFAPALPPDWRMSHGYDIRMAPDSEVRAFLNTVAFSAPQALARQVGFQPGRFVSDIVGGWSLPESVPTDDAVDAVSYAAREWWRARYLRPGKAEVDFVMLNRLAELLVRAVPRLRRALRMTYPIVFVDEFQDTTSAQFSFLASVFGEEAAVTTVGDSKQRIMGWAGAVPEAVQRFTSTFQATAYWLAWNFRSSDALVELQHVIASKLDPTTVRATSKATAEDGHEPAVLWTFSGGDREARFIADWIARDIAGSDRMPADFALIARQKVKDFEPLFRARLAAHGIRVRNDDARVGKITLQDLLKSDTTRLFVGLLRLAHQPRGLAALWQEVSATLERVHGAADDETAQQRVGEDLSDLTTRLRAWLQAHPPSTTSAADAVRKVLDLVDSAALRRYMKATAPGEEFDLVTGAFEARLETVLDGADDWGVVLDEFESADAVVLLTTHRSKGLEYHTVFFLGIHGRQWWALGSDPREGTSTFFVGLSRAAQRLVFTTDRSERTGPIAAFFAMLTEAGVPEVDQG

SEQ ID NO: 70712 - protein, 627 aa, Streptomyces sp. DSM 15324
MYVAEVLVERFRSCERVQIPLRPEVTVLVGENNAGKSSVIDALRLLTDPLDGRRVRYFEESDVLTTAAAQGGPSLQLDVAGIGPRESGAYLEALLPLGAPDSRTARWQVSWTPPQTGGRRGSTVWAQGAGLPVTGDPPARGGVRHVYLPALRDAERELASAGGDRVRMILRGLLGDDEQVDAFVERIGTELKKVAADSDVVKVSEKINEPLQDLTVGAHPQASELALAEPTFASIARSLRMLLGDVSAAPFPLSASGLGYANTLFIATVMAELDAAAEADLTVLLVEEPEAHLHPQLQTLLLRYLQRRARASRRQPSGDPAEPAGHLQVVVTTHSPILSAAASVQDLVVMARCPGELSDGWQARPLPIPRLQLSPDRVRHLDRYLDATKSALLFASRAILVEGISELLLLPALAERVLAADEGADAPAKREAFEAVERFFGTTRVIVDGVGFEVYLRVLLAPVDGICLGRRVALITDTDVAPDQPEPPRLQSLRKLPRGWHSPGELHLAAAPRTLEPALWAENNITALRAAFLRCAPHSQDRWEQVVEATDPALAFGELFVPKTSRTVTGTDGEILKGTEISKGRFAQELADVLADRVVPFTVPEYLAGAIRFITAQDTSTPAVGAP

SEQ ID NO: 70713 - protein, 573 aa, Streptomyces sp. DSM 15324
MRADAEKQQQAAMAVAAPAYVAACPGAGKTHVITNRHLQSPRRRLRKGRALISFTRVARDQMARRCRSAGRADLVQAPHFIGTLDSFLWEFLVKPRRAAEPAPRLLESWASIKAPVQGTDREINLHRFPMTIDPSHNEAREAVAWDKLDYDTRQLLKDSSYSRAQWEKKIFETRKSWCDEGYLTGHEARVLALWNLRHAKTAAALLPPLLSRFAEVVVDEAQDCSAADLAILQLLHDAGLPLVLVGDPDQAIYAWRGAEPQALQSFAAQLSPAPHRLTGNWRSSPVICRLASTLRTGQRPPDTSVVRDDDIPVLVLPTRFADSGSRHLHAPTGAGIVDAFRTLAEEYAVPAKDCLVTAYKYATLPGITREKPNTKAITSLAWARTVTHTPDASGDDLARACAVAVRVLFGYWYPGQSGGPDRIMTGHRLSAGQVNRTAFAFLHSLPAPHREWGPQVWQAMKAWPPLPGAAPQGGRGRPAGKPTVSRLQAATGIHTNIVHQLKGDEADGVLLLLPDARSVQRWATADPATDEVLRVWYVAVTRARRLAAIALPQEETDALAQLLAGYHVPLRVA

SEQ ID NO: 70714 - protein, 769 aa, Pseudomonas putida
MQIQYLEIANFRKLLSVRIDLASTTSLLVGANNSGKSSAMLALRKFLLSKATVFRLQDLTLSHLAVIDAIGADWEASDETLETPTANEWSHWLPTLDLWVEASQGELHYIRDLIPNFAWKGGHVGMRFRLEPKDMAKLFTDYRKERTRVKMLQQEIAKQTEEGKTPPTLPLWPQSLHDYLNRRLGAMFTVCWYRLDPSKLDAPDTKTRHANLQPLSATAVPLEANPLTDLIRVHEINAQRGFGDSAEESVTEGRGGSGKRLTEQLRAYYNRHLDPGDSPDLSDLEALTAIQAAQSAFDSRLTSSFAPALIELAGLGYPNHSDPAIRVETRLSPTDGMNHEAAVLFELDSVAGAPGAPLMRLPETSNGLGYQNLISMIFQLMAFRDDWLKKYKNTEEQTDVGVEPIHLVLIEEPEAHLHVQVQQAFIKHAYHVLCNDPLLTRYPRLKTQMVVSSHSSHVAHETEYANLRYFRRLPAGMAGVPVPVSTVSNLSTVFGQRNPHRQTKEFVTRYLRAQHADLFFADAVILVEGAAERMMLPHFLRNHFPFLDRCYITILDIGGSHAHRLRPLVDALGIVTLVITDLDAGLKKSAVPVKRKAKQETNNPTLRNWAKAQKIGHDVDTLLDLDDETKSQQIDDLFGIRIAYQTPIAVRLPSNETEAEALPNTFEDSLVLSNVQHFAKKKGQGLTKAFAAALRQSQTADDLGKALFDALRDGDKAKFALQVLGDPDFAKLTVPEYIREGLFWLETKLKKKSKELLIVPTASIEVTEG

SEQ ID NO: 70715 - protein, 623 aa, Pseudomonas putida
MSITTEIPDDPKPTADDVIQECLNLEYPRSFFLYAGAGSGKTHSLVVAVRSLKERERERLTFEGRQIAIITYTNAACEEIARRLEHDPLVEVSTIHAFSWRMIKGFNDDIRDWLRIKLAADIEALDDRISRARGVNKTSLANQASRDSKAGRLASLDDIPVFTYSPTGDNRSRQSLNHSEVIQMAAAFIPKPPLLDVMADRHPVLLIDESQDTNGDLMDAFLEAQAAIPKRFCLGLLGDTMQRIYNDGKVGLDEAIPSDWAKPEKRVNRRCPTRIVELINVIRASVDDHEQIPKPGATQGTVRMFCTQQVAGLDFNLEEQIAKQMADVTGDSQWASGAKGRKTLILEHKMAGRRMGFEGVFSPLYEVEHLSTGLLDGTLPILKLFFERVGPILEAAKADEFALMEAVRLRSPLLDPQHLQSVPNQLDLLESVGEATQRLCELLRNNDPLIEEVAHVLQRTGLLELPERFMEALTQGATADDAPDTADRDALEVHAYRVVLGRPYSEMAAFADYANGLSPFDTHQGVKGLEFPRVMVVLNDEEAGGFLFSYEKLLGVVPASSTDVKNQLAGKDNALSRTRRLLYVTCSRAEESLAIVVYTAQPEVAKASVISAGWLKADEIVVL

SEQ ID NO: 70716 - protein, 729 aa, Staphylococcus aureus subsp. aureus; identical to SEQ ID NO: 62500

SEQ ID NO: 70717 - protein, 597 aa, Staphylococcus aureus subsp. aureus; identical to SEQ ID NO: 62501

SEQ ID NO: 70718 - protein, 729 aa, Staphylococcus aureus subsp. aureus; identical to SEQ ID NO: 62500

SEQ ID NO: 70719 - protein, 597 aa, Staphylococcus aureus subsp. aureus; identical to SEQ ID NO: 62501

SEQ ID NO: 70720 - protein, 729 aa, Staphylococcus aureus subsp. aureus; identical to SEQ ID NO: 62500

SEQ ID NO: 70721 - protein, 597 aa, Staphylococcus aureus subsp. aureus; identical to SEQ ID NO: 62501

SEQ ID NO: 70722 - protein, 729 aa, Staphylococcus aureus subsp. aureus; identical to SEQ ID NO: 62500

SEQ ID NO: 70723 - protein, 597 aa, Staphylococcus aureus subsp. aureus; identical to SEQ ID NO: 62501

SEQ ID NO: 70724 - protein, 729 aa, Staphylococcus aureus subsp. aureus; identical to SEQ ID NO: 62500

SEQ ID NO: 70725 - protein, 597 aa, Staphylococcus aureus subsp. aureus; identical to SEQ ID NO: 62501

SEQ ID NO: 70726 - protein, 606 aa, Desulfitibacter sp. BRH_c19
MKIRRLRMKNFRSVANGEILFTGHTAIIGGNSVGKSTMCEALDLCLGPDRLSRSNPINEHDFYRRRYIGADNTPITIELEVVLTDLTADLETKFRAHREYWNTETNSLLDENAVPEDIEPDTVIPALRIKFEGFYDEEEDEFRAESFFASPPPEDDASKAKVSRSVKRSFGFIYLRALRTGSRALSLERGSLLDIILRLKDDDRSAMWEQTLNALEGLDPPIDSIPQLQDVLDEIDGRVRRFVNMSEDDRAFQLYPSSLTRDDLRKSITLFGTSARSNARVPYWRLGSGVINAMVFSLLTFIAELKVNVIFAMEEPEIAIPPHTQRRIVQFLKKNMDQSILTTHSPFVLEQFSPENVVLLERDTNGSLEGRQIEVSGIKGKTYQGNLRRILAESMLGNGVICVEGVSDAEVLYAASNVLESYDDELSYTPLDLSGVTVVHCEGDGGILRYGQFFKELGLKTYAFYDFQKNAEIKNEIEALFDGAWELEHTGIEYLLAEEIDIDAVRAFLEEAINWDDYPTNRKRPELYEYDENLDDDDIRAITKRVLKQRKGSGYAEKLVEMCRDEDLPEIISTALNSISEDLPNAMMGDDANEGDEATEDVGDDV

SEQ ID NO: 70727 - protein, 584 aa, Desulfitibacter sp. BRH_c19
MRECNPEDSFDICEKRRAILEGDGHMLVIGGPGSGKTTIALLKARRYVLENLTAEQSILFLSFSNAAIRRIIESAGGILTSDTAKRVDIKTYHSFAWEILKSHGYLTSKKRRLSIVSAQDAAVRKAGLNKDLWLTEQERMYIEDGLATYDQFAPRAAEILNRSDTAKSCFNAAYPLILVDEFQDTDEAQWTLIRSLSTGSSVIALGDSEQRIYEWRDGVSENRLSEFRDELNAPVFDFQNENNRSPATGIAGYARSLLSPDVVQKLPDDIERRAFQPGMFSIGVRLCVIRTWNETKKRAKKTEKNDIKIAVAARSKQMVRKISDVLANPIIIKDREHKPIHHDVLVDQMQIVLSARVIANVMGSSHLPFDQRISQCLCRVADMLRAANNATNIKKSDTLQNWAQKCDDGKRPKNNCVKALIGVIEALENDGFLGSPTKDWLMVRKAFERAGVEHLTKTAEFARYLRLLRRGSLIEEELTSLWRTSGNYVGAEEALDRAIQQDQLLDSSKESASISVMNMHQLKGREYDGVLLVEDQYQNFRGREAKPPYMETRRLLQVSLTRAKHYALVLSATKNATLDVIFDN

SEQ ID NO: 70728 - protein, 734 aa, Clostridia bacterium BRH_c25
MRISSIYIQNFRKLRQCRIDFSKKTTLFVGANNSGKTSAMDALGKFLAGRSFVFNDLTISNRTLINANGEEWVDNECKIPEDLLKWEALLPMMDVWLEVERSEIHYVASIIPTLKWRGGKLGIRLAFQPKDVSKLFAEYREAYSAARTTEVAGNRAGTSTIHLYPKDLCDFLDRKLNTYFSIKSYVLDPKHSEMEPPQSTPYGMECFTDNPLKGIIRIDLIDAQRGFSDPDSSDDSERSRKQLSTQMRSYYDKHLDPEKLPTPKDLEILEVTEQAKGVFDKSLAEKFAPAIQELEGLGYPGVTDPKITITTKVSTSETLKHDSAVQYALSKNNKTLKLPEKYNGLGYQNLISMVFNLMSFRDSWMKVGKARQEQDASVDIIEPLHLVLVEEPEAHLHIQVQQVFIRKAYSVLRNNKFLKDDENFATQLVISTHSSHIARETDFSDLRYFKRLPECVDCDIATAKVINLSDVFGKEDETSKFVTRYLQTTHCDMFFADATILVEGSAESMLVPHFIRNQYPELHQRYISILSINGRHSHRLSPLINKLCLPTLIISDLDSVEQDGHHKAACPERNKGLLSGNYAITDWLIKEKNLDKLLDLPAEQKVFSYETAHKYSIRIAYQTPVTIAFDGTPREALSSTFEDCLVYTNYELFKTLDESDVGSLVKKVNSEINAARLFEQLHKGIYSALRDGKSDQKAEFALDLIYAVDPSRLAIPTYIAEGLEWLQTLLHPEE

SEQ ID NO: 70729 - protein, 620 aa, Clostridia bacterium BRH_c25
MMKDLSTSLQLSDNHVDDHVDEEIKLCFSEDNPKSFFMFAGAGAGKTRSLINALSFLDKDMGVKLSAHAKQVAVITYTNAACDEISKRLHYKPIFAVSTIHSFLWELIKNFQSDIKVWVIESIKNDIAELNEKQAKGRSGDAAAKRAEEINKKTTRLSKIESVKKFSYNPNGDNVGYDSLNHSEVVKMGSEFIATEETMQEILVNKYPILLIDESQDTKKELVDALLVVYEKYKTRFIIGMFGDTMQRIYMDGKDNLASCIPDEWEKPEKVMNHRSAMRIVKLANTIRNTIDKQQQRPRSDAETGTVRLFIANTSSDKEEIEHRAAQIMAKKSNDDNWLDASKYKSLILEHHMAASRFGFSNLYLPLNESKSFDTSLRDGSISELSFLFNMVSPLVNANKNDNDFEVSKIVRQYSPLLDKKAFRKCPEDQAKLLQVAENAVEDLLTLWKDGAIPTCVDVLKTIKKNSLFNLNDRVDNILFDEDKDEDKKVTALRKALSVPFDALERYSAYVTGNTQFATHQGVKGLEFPRVMVIMDDVEAKGFLFSYEKLFGAKSKTDADIKNEREGKDTGIMRTARLFYVACTRAEKSLAVVAYTEDTEAVKNTAILNGWFTKAEIDVL

SEQ ID NO: 70730 - protein, 673 aa, bacterium BRH_c32
MYLKTIQINNFRLLKEVKLSLQKDTTVIVGRNNSGKTALTEIFKRFFSGKASPFHLEDFNLSSVDKFVEAYKAKLDKKDEDVLRGLIPSIDLILTIDYGADKLSYGQLGEFIIDLEEDLSEAIIKVSYQLKDGKIDALFEDVADSIKGDLFEKLKERIPHLFEIVVSAIDPTDSNNYSKKDLTKLTNCVGVDFINAQRGLDDATQTERDVLGKVLGSIFKNASSESAPEDMKNKTKELEKVVGEIQTKIDTDFKDRLNALLPALNLFGYPGLSDPNLSTETKLDIKNILESNTIIKYQQANGISLPETYNGLGSRNLIYILFRLYDFFKKYQSNPINYQNHIIFIEEPEAHLHPQMQEVFIRKLYEIANKFSKELNEEKRWPVQFVVSTHSTHIANESSFESIRYFFTKPEHKCQAFIKDLNEEFVKDDRKEDREFIQKYLTLTKCDLYFADKAMLIEGPTERIIMPALIRKYDALSNSNVLSSQYISVVEIGGAYAHHFFKFLDFLELKTLIITDLDSVDKNDSNKSCMVSKGTHTSNAGIKNWFREKDDLIDLDTINKKKNEDKINGFRRIAYQIPEEGKIIIGRSFEDAFILANPKLFDVDNADETILEAAVYNKAAEYKSKKTDFAIQYAFTDAAWIIPKYIKEGLGWLSENMNEVIVKKNEIGVKENE

SEQ ID NO: 70731 - protein, 579 aa, bacterium BRH_c32
MSNPAIQASKEALIKLYKVIDNNQSFRFEAGAGAGKTYSLIKALHYLMQIKSLSLSKNNQQIACITYTNVAVKEISSRTDNHPIIFAGTIHSFCWSIIKDLQKQMRIIIPTLSDNWKNRVEESGGIKEQVVKYDLGYPSCSEKEISLYHDDVIRIFSTLLANAKFKALLYSKYPMIFIDEYQDTNKLLAESIVTKLIVNDSRFMVGFFGDHWQKIYGTGTFAFFDTAKDKITEISKNANFRSDNNIVQSLNKIRTELPQNPQDPDSLGEINIFITNSWRGNRRTGGHWQGDLPADIAHNYLIDVRARLEKSGWDFDPLKTKILMLTNNVLAEEQGYRNLASIFTNTDDYLKKNDNYISFLIDVVEPICESFENKKYGEMFKYITAGTVSINKHDDKKVWNNAIKRLIEIRKSGTIGDVIDYLKITEKPKVSINLESIEIRYGQLKSVAEMEEENKSFYDKITQIRSTPYSELIALSKYLDDETPFSTKHGVKGAEFENVLVVLGRGWNNYNWNDFLEWSNSGVVKGREEAYERNRNLFYVSITRSQKRLALLFTQSLSTSALTILKTWFGEDNIKDISL

SEQ ID NO: 70732 - protein, 714 aa, Desulfosporosinus sp. BRH_c37
MYLKYIQIINFKNLKSARFEFAKGANTIIGENDSGKSNALTAMRILLDDSYYYNTKRLKETDFSYALGDWKGHWIIISAFFDEISDEDKHNEFCAELTPDKENADFLKSYIRCEDKGYGTVSLFIRPCKSKRLELEEASQSGRFETVRSQIKLSDYEFYYTSRSQADFTNENLYKSIVGDISAGEYANPENDDSSVLGTKIDIMNVWQHVSTVFIDALRDVENELRKPKNPIRQIIDTIEGEIAVTDIDDIKKRITELNTKISNVPQISYIGNQVNRKLLEMIGTVYSPDIRLESRLKEDFATLARYLTMAPSDQNDIDLLGLGHLNILYIALKLVEFEANRNRELLNIMIIEEPEAHIHTHIQKTLFDNLQVVQTYTQVVMSTHSTQLSEVADIEKVNIMKKVNEQLSLVMKPTNGLDNFGADVLKHRGMAFTQILSRYLDAKRSVLLFSKGVILVEGDGEEILIPALVKKVLGVSLDEMGIGLINVGSVAFENVACIFDETRLQRRCAIVTDLDAIVDGATKGSQEAMDIGVARKARLTSLFDSNPYVESFYAPHTLEVDFASIENNKEFICSVISHTYKQKAAREKHIAAIKSGAVAARYDAVLTVAQNIQKGWYATLLASEIRANAVIPTYILDAIAFAAKDVVSQKLLWKMVKYSFGEYDLSSKYDDMKKEFAEVETSEQIADLISDFCSEFPDDMVTAFIAKVGGLSA

SEQ ID NO: 70733 - protein, 579 aa, Desulfosporosinus sp. BRH_c37
MPDFLDILRGLSFEQEAACKAPENVLLTACPGSGKTRTLTRRLAYQAAQEPSSKRWNIAITYTNRAADEITSRLDDMGIALTNIWTGTIHQFCMQFIIRPYAMYSGRLSKGYTIIDEYTKKEYGRSFAKELGISLNYYDDPFQYSTVVKEYEALLAANKEIDFEMILRFSEDLSSRCPFICANIASLINSILIDEFQDTNELQYSILAKIYKVNKSISLMFVGDVNQAIYGSLGGVAKCKTELDALYETIFKEMSLTGCYRSTERVVNLYSNFEVSKTGVCSVAEIKDVTGTINYCKSVSKEYLTAEIAAIISSELASGTKSEEICVLAPQWPMLFNLSRDLHSRLPDVLLDAPDISPIKYDPLNPLFLLAKLLFMPSGENVSVRKRIATEFISIVRDDLKIVVSDRIQNYDILSAVNYCRAMDNDGIVCLKAVIERVFGLLRIDVNKEKALSGLIECFFAKIDSRVMQYSLSTDYNSISKYFRDKRGVVISSIHGVKGEEYTTVIAVCLLNGYLPHWDYIMKPEKRHLRKIETSKLLYVLCSRAKQNLYLFSETGRKTNRGSEYTSTDELSLIAHALS

SEQ ID NO: 70734 - protein, 690 aa, Desulfosporosinus sp. BRH_c37
MKIRKLKICRFRCFGDEEETIQFDELTSLIGNNSSGKTAALQALLKLFSDNSGDRSFQRSDFYLPKNLKSAEMTEQNLYIEAVFNFPELKAEGEEGKYVVPVFFEHFVVEEPGGVPYLRIRVEASWEKGNNAEGSIENKIYYILCAEDEEIKEENKRSANRHDLDKIIMVYVPAVRDPSKQLRNVSGTMMYRIMESINWSEEIKTSVDTKVGELNEAFIQESGVSILKSAIHTQWKNYDADYRYTNAEMRFNNTDMNSILKKSEVVFSPSVTGKKYGIDDMGDGLRSLFYISMVDSILEVENEIRKEIAEGKEKRSFNITPPVLTIVAVEEPENHISPHLVGKLINKFKDISKRENAQTIIATHSPAIVKRIDPENIRYLRMNIDDLSTKVKIIKFPSKEKHEDKYKYVKEAVQAYPELYFAKLVVLGEGDSEEILIPKLLELCGSNIDSSGISVVPLGGRHVNHFWRLLNDLEIPFVTLLDLDMERVGGGWGRIKYVLSQLMDIGVPRDNLLQVTFTDDQFKEMHTWKLVKGDTNLLAWTNFLEGFNVFFSSPLDLDFMMLECFSHCYKDILEGNEGPYIQGKGGKEKGKEKGKISYIEVNVPSDKEYVARVANDVHCTLKENGGDGVTYSDAQKQLMVWYNYFFLNRGKPSTHILALSKINDAELKDNAPEVLKRMISRIEKFLVTIE

SEQ ID NO: 70735 - protein, 625 aa, Desulfosporosinus sp. BRH_c37
MINKIVSDTEWKPIDGMKLEESALSTVRENNNVLVTAGPGAGKTELLAQKACYLLQTDKCSNPRKILAISLKTDAADNLKQRVEKRSAKETSGRFISMTYDAFAKGLLDRFRKGLSRKYCPEPDYLIGEDADIHIPLAFEKVGFINRTRLSPSKLKSYFHNQLAAVTLPITSDTIREKAWLLLIKGDANIRPCLTFQMVSRLAEYIIRTNPNLKYSILLTYSHVFLDEFQDTTEIQYELVKTCFMNTKTNITAVGDNKQRIMIWAGALETAFNDYRSDFSSIDKTLLMNHRSAPKLVELQRMMYASLQDDPKEIYCSDKWNQDDGEVRLYKFDNTFNEAEIIATDIINLHTKGVELKDICILTKQQPEKYTVDLINTLAENGIRARVETEYQDLLKEPISSLIINSLYLIVKKKNPDSWEIVTNYLNKAYSGQISCNFDYLIDKQNELTSIFKGHKEDLLQCEEDKLFADIIDSILDFFNVDIIKSMYPAYAQGVYFEKTKKKFINLLWNEYEGTNHEWEIALENFEGIHSIPIMTIHKSKGLEYDTVYFIGLEDSAFWNFKNQPMEDRCAFFVALSRAKRNVNFTFSEDRKVGFNDVQAHIVINEFYELLEKSKIVDVIEPWSM

SEQ ID NO: 70736 - protein, 691 aa, Sphingomonadales bacterium BRH_c42
MRIKHVEIENFRLLRHVAIGLEERTTLIVGRNNSGKTSIAELFRRLLSERTLAFKLEDFSLGCHECFWIAFDAFRSGAAQLDVRAHLPSITITLDIAYDVDAPDLGPLSECIIDLNPDCSDARLVLTFGPRATAVETLFAGIVAPGDDVAADRLGLFRALGSRLPAAYASSLEAVDPNDPTNRKALEPKTLTTLIHGGFINAQRGLDDDTHRERDVLGKVVEVLFQSALTDPLDPEKRTTAEQLKAAVEQIQGDLHAGFNAKLTSLLPTFDLFGYPGLADPGLVTETSFDVDKLLNDHTKVRYVGVNGITLPETYNGLGVRNLVYMLLQLLRFFREYQATPAAAGVHLVFIEEPEAHLHPQMQEVFIRQLDQITSAFVSQLNENRPWPVQFVVTTHSPHMANEARFEAMRYFLSVGDGDGIRRSVVKDLRQGMGSAPAPDREFLHQYLTLTRCDLFFADKAVLIEGTSERLLLPAMIRKTDTAAVGEPQLGSQYLTVMEVGGAYAHRFFDLLAFLELRALIITEIDAVKPNDKGKHVAVPVADGQFTSNGCIKAWFGNAVSPAALLAKTSPDKMADSRRLAYQIPEADGGPCARSFEDAFILANPERFPLGDGDAAALAYERAAEQKKSTFALEHAIEHTDWNVPRYISEGLRWLAQGNPAPLEPPPAVAVEIVAGVAGVAVNVAEVGDNG

SEQ ID NO: 70737 - protein, 587 aa, Sphingomonadales bacterium BRH_c42
MADGAESPADAAGRVALERMFACLDEGRSFRLEAGAGAGKTYSLDKALRRLIDRRGTELLRQRQQVGCITYTNVAKDEIISRIEAHPAVRPETVHGFCWSILQDFQTTLRALVPELPSWAERLEPAGGIGARRVHYELGYPSVGEQQVTIRHEDVLALMIQAMALPKFRAVLTARYPVLLIDEYQDTDAAFVDALKVWFLDHGEGPLIGLFGDHWQKIYGDGCGSVEHAALVVIDKNANFRSANPIVQVLNRMRPDLPQMVSDPDAPGEARVYHTNAWPGVRRTGQGGHWTGDTSADAARAYFSHIKQRLGGEGWDFAVGKTKILMLSHSVLAREQGYASIPPIYGQFNDPWLKKDDPHIKFLTDQLEPACAAFEAKRYGEMFDCFGTGMPRIRKHLDKVAWVDAMATLIALRLSGSIGEVIDFIAAQAHMQLPEAVEEREGRLAETGAEPVDGEARRVTQLRKLRTVPYAEVIALDQFIDGHTPFATKHGVKGAEFENVLVIVGRGWNKYNFAQMLEWIDAGPPNDKLEFFENNRNLFYVACSRPKVRLALLFTQILTANAMAKLTAWFGAENVVALPGQPDEVQA

SEQ ID NO: 70738 - protein, 778 aa, Pseudomonas aeruginosa; identical to SEQ ID NO: 64580

SEQ ID NO: 70739 - protein, 625 aa, Pseudomonas aeruginosa; identical to SEQ ID NO: 64581

SEQ ID NO: 70740 - protein, 689 aa, Pseudomonas aeruginosa; identical to SEQ ID NO: 64680

SEQ ID NO: 70741 - protein, 579 aa, Pseudomonas aeruginosa; identical to SEQ ID NO: 62643

SEQ ID NO: 70742 - protein, 616 aa, Pseudomonas aeruginosa; identical to SEQ ID NO: 65244

SEQ ID NO: 70743 - protein, 602 aa, Pseudomonas aeruginosa
MMKLSEKQKEVLVAEGHLLVIGGPGAGKTTISILKAAKLAATLQPGQEVLFLSFARATISRVIEAIENEHDIPKAIKSRIRVETYHSFFWRILQTHGYLLGLPRPLTILTPANEAIALSAVRSEYKAEGKLSEADKAEKKAKEQAERLRQAKVEGRVCFDLFACHVAELLERSKRLRELIAARYPVIILDEFQDTNADQWRVVQQLGCEGVLVALADPEQRIYDWIGADPARLDQFCATFEHTEIVLQGENHRSAGTEILLFGDEVLTGRFSKKKYLGIELETYPANENEAFTALITQTYAARKRLVDSKKKDWSLAILVPTKKMTRAVSNVFRQPLAKMPPIRHSAAVDLNAAILGAEIVSFMLQPLCLFHLDGVIDLLCNYFQGKGGDSPAKSDLQQAASIRKAFALYAEKKAADKPVPKNSLMVPLLQTYEQLRAIPFTGDPDEDWRAVRKTMENGACLRLREVAIEVKNIRLLERGTQLRQALSEDWRTFGRYENALDITRQAFVREHFATQSNPENGVVVMNMHKAKGKQFDEVIIFEGWPRCVKKKIVANPDRIVRANLRENIDDQARQNLRVSITRGKQRTTILTPREDPCVIFV

SEQ ID NO: 70744 - protein, 613 aa, Pseudomonas aeruginosa
MRLSRITIDNFRNFKHLDVHLGQHAVVLGENKVGKTNLLFALRIILDPTLPDSARRLRLDDFWDGQPRPLKADDAIEISVEFSDFEDSEELLAVLADHLIQPVPMVAKVTYRFQPISGLDRAPRSEADYEFVIFGGDRPDNSVGYEMRRWMPMDLFPALRDAESDLARWTRSPLRPLLDRAAQTIDEEELKEIAEEVHVTTSRIAGLPQLDDVVKQVNGQLTTMIGENHAIETALGFAPTEPERLLRALQMMIDGGKRGVAEASLGSANVLYLALKHLEHQYLVEEGERQHTFLAIEEPEAHLHPHLQRLIYRNYLKARDEEQQGRELRSILLTTHSPNVASVAPLANVVVLTNVPKEGHTVARSLAGIQLEAADREDLERYIDVTRGELFFSKGVILVEGDAEKFLLPTLAKLYDKTFDFDAMGITVCSIAGTNFAPYVKLLGPQGLDIPFAVLTDFDPKGLAVSQEDEDPDDDGVKDNYGENRVVNHIMQHLLPEEVWEQLTFTEVLKSAPDFGIFLNEFTFEVDVFKAGAEKHFQKAAKELSTNKKMHARFKALAKDPTALDEQQFLRDIDSIGKGRFAQRLASALLAAKADVCPDYIKNALEYMREKLG

SEQ ID NO: 70745 - protein, 588 aa, Pseudomonas aeruginosa
MSTAKPAYLTAAEDLRGNEDQWRAYESTGNCVILAGPGSGKTKTITVKIARLLAEIVRRPQRIACITYSNACIGELRSRLTKLGIEDGNRTLISTVHSFCLTELVLPYAAMGSLAVPIPLAVATPAESRKLFIAAYRSVYGEAPRSSSSRTSFDKLRRTIPDRNSAEWLAWNKRETRVVEAYEDLLLTRGLIDFDGIVLAGLELIEKHGWVRQAIRAKYPAVVIDEYQDLGLPLHRIVRALLDAGVRIIAVGDPDQSIYGFTGANPALLKTLAQDQRIEAITLRMNYRCADRIIAASRSLFPDRAEFQSHDDRQGDIRIHKLERDLLGQAKYAFETLIPALLDANPTWKPGDIALLYRSMAEGKQIALAADRLQIRYFRLDNGSPIKRTRLTEWLTEAAQWCAGGWKTGQVQLSQLLKSWQRMQRSGKSEAQLLASRKRLIAALFSLRDGSLTLRSWLKSLDSAILGDMLRSEPGLSDEIDILADLINEADTGGALEQFTVEIFGNQGKSPDQINLMTLHSSKGLEFQAVIMLGLEKGALPSSYDRTPEQVQESTRLFYVGVTRAKSQVHLTFNTDESPLLTTIRTAT

SEQ ID NO: 70746 - protein, 807 aa, Pseudomonas aeruginosa; identical to SEQ ID NO: 62542

SEQ ID NO: 70747 - protein, 643 aa, Pseudomonas aeruginosa; identical to SEQ ID NO: 62543

SEQ ID NO: 70748 - protein, 807 aa, Pseudomonas aeruginosa; identical to SEQ ID NO: 62542

SEQ ID NO: 70749 - protein, 643 aa, Pseudomonas aeruginosa; identical to SEQ ID NO: 62543

SEQ ID NO: 70750 - protein, 615 aa, Bacillus coahuilensis p1.1.43
MYISHISIKNYRNYGNEPFITKLKKFTTIIGENNIGKTNLLESIGLILSQDITMFRKRMLQLDDINYKTRMRFKEEVLDTSIPPENVKFPEVEIQITFEEMDAKQLSVVGDWFSDNSMETAKLTYLFRPVNGFNRKEWVEKQRDYIQKLKSEMKEIQEENLLNFIEFPIKKYQYLIYGGNDNSNRAEPYFLGMLKLELLDALRDAKRELIANGDYKLLYRVLNQNEEAAYEDIKEVLNNLDEKIKNNLQLKSIRKTLIEQLEKISLQETAGINNVDFHFSSLETGEILKKLSLIYGQEPISIERNGLGRNNLLYISLILSRLAPDESIDTCFRIVGIEEPEAHLHPHLQRHLASNIQTINKKREDLQIIITTHSTHITSSLNMNNMVVLFNEGGKVKEHFLLDGFKENKQGKVHRHYLEKYLDATKSSMFYARRIILVEGIAEEIIIPVLFQRFSKKTIESIGCNIVNVNGVAFKHFLEIIKNGYFIKCAVLTDGDVGKKTENRADNLKKEYETTNSSIKVEVNKETFEKELISANKSGKGKAVLLNALKATRPINGPKYTAEIGDKDIDINSFFELIEDYKSEFAFNLCDELRKEDVEFEVPTYIKNAFEFIKG

SEQ ID NO: 70751 - protein, 463 aa, Bacillus coahuilensis p1.1.43
MSKKLKPTLVIAGPGAGKTHYVIKKIIDKLPLLEPQRFLAVITYTNSATNEIKERLSEKIVVPPNVFIGTIHSFLVRFILKPYGVVQGVIPNQVVYKDVSIKASDRKEENIVKSKIVKKGIIPYEKIVSLSSNLLKENKRIRELISQRLQYLFVDEFQDANSGQFNIFEEIRKASSTEMYFVGDPEQSIMTFQNQGSQIQTLDKRPIYKAMNSGTIHKEYLDSNNRSSTTIIDFINNFHTSIIQSKTNEENKSQNKVTFIVGTYDLREIINSFNSLCNDRSICEKNPSNRFFLGYRSNTFQAVDNEYGLVQREDSHTSSLQYLKKCSTFVCEVLNISRTSVIDNLKIDDLTYRQLCLKIIDSIKSNPFINSKELISLITTNFKCDPYKSVHKKVQHNPNRIAEDFIKKINLEFQYLSLNIKEIKDYHLTIHKSKGLQADAVLVVAKSNNEVKKVARSGQAIEV

SEQ ID NO: 70752 - protein, 594 aa, Comamonas thiooxydans
MRICRITVENFANFKHVDFETDGSLVIVGENKVGKSNLLRALRLVLDPLLPDRERQLGLEHFWDGLGENKLGATVRVTVELTDFEEDDNLLAVLAGSLVDTNSPVVARLTYLYRPKAELEGTSPESMADYEFLVFGGTDEDNAFTAAQRRELPMDYLFALRDAEGDLLNWRRSPLRPIIEELASSLDEETREELQTQVSDAQKSLAQRPEVAEAAAKVSGRLKEMVGPEHAVALTLGVTPTNVDVLLRSLRLLIDGGARGIGDASLGTANLLFLALKGLELERTVEAGERSHTFLAIDEPEAHLHPHVQRLVYRHYLGEAETTLENVTTILTTHSPHIASVAPLRSIVLLRDEHHEPATVITSAAEVELTEDEEDDLQRYIDVTRGELFFARGIIFVEGDAERFLIPAYADKLGIDLDALGVTICSVASANFLPYVKLVGPDALNIPFVVITDLDPREGDTPLADLRVRNILKVWMDEQDIEDVVEDLLEQAEGEGIFVNDMTLEVELFKAGMGPAMATVLSKHANSWGAQRKAWMNAWIAAPTILDEKKLLGWVEEVGKGRFAQALAGHVNAAYCPDYIKRTLEYVKNGFTSL

SEQ ID NO: 70753 - protein, 602 aa, Comamonas thiooxydans
MSRMASHRSSSKYLQAARQLRGNPGQWEAYESTGSCCVLAGPGSGKTKTLVTKLARVMAEDVRAPRGVACITFSNEAARELSRRLRQLGLEQSPRLFVGTVHSFCLLHLLLPFGELADLPLPFPLKVATESQAASIYRAAAEELRGVGQPTRKDEVDRYRRVNLDRDSNAWTQDPELAALAEAYEEALHEQGLIDFDDIVHYGQRLVNEHDWVLNAIRAKFPVLAVDEYQDLGGALDRIVRRLTFEGGVRLIAVGDVDQSVYGFTGANSELLAELSQLDGIQAIPLTVNYRSGTGIIEVAQLALGKDRGYTSSEPDRQASVQTHKCDEGLQHQAEYAMQTLIPAALAAKAGRQLGDIAVLYRNRNVGDVAAIQALNARYPFVRIDNAAPYRKVPLTSWVEDCAIWCAGGWKTSAPPLRDLQSRWRSFHGALADRAARDASARLTAFLWSHRGNGLALGFVEALREELLDTLIAARGELADQAAHVEKMHKALHPKAPLAGMTKAQLGRRDGAPKQLNLLTLHSAKGTEYDVVIILGLDQGDFPSPNWFDNTPEKMEEARRLFYVGVTRARDEAHLMYSGFRQNQYGKIYRDGPSEFLNGLLP

SEQ ID NO: 70754 - protein, 744 aa, Clostridium sp. C105KSO15
MEIAFVEVQNFRKLQSCRIDFGKKSTVFVGANNSGKTSAMTALRKFLKKRQLMLDDFTISNLASVKKIGKKILDLNNESNITLEDWNPLLPSLDVWLNVEANELRYVAQIIPTLDWREGLIGIRLIYEPKDIEKLFASFSIAYKASHEGKSDLKLWPLDMCDFLREKISSYFTVNAYVLDPSKIVMPSENNIANPQLTPTGISPLDFDPFKELIRIDIISAQRGLDDSDDESDDKTAGNSTLLSDQLRSYYDKQLDPEHQPTQSDIKALKELQGAKEVFDKQISKKFSRSMKELAQFGYPGRYNPRIIIESKTRTSDVLSHSTSVRYPLYSDGEDQYKLPEKYNGLGYQNLISMSFKLMSFRDSWMNGDKRKPQDDADEIGVIPPIHLILIEEPEAHLHAQVQQVFIKNAYQILRNHSNLKTKSQYTTQMVVTTHSSYIALETDFSDLRYFRRIKSKDGLPVSAVSNLKTVFGKGDQTAKFVTRYLKTTHCDLFFADAVIMVEGAAERMFLPHFIENSYNALDQAYISILEINGRHAHRLKGLIEQLGITCLIITDIDTVDAKKKASVMPRRGEGQVSTNTTITDWLPNITLADDLWSAGFGQKEILYTNNKDAAIRVAYQTPVVVKFSNNSTHEFIPTTFEDSLAYENFNVFKRLQGNGSIKKLKNIFKTEDATLIPMKVYELIYGSNKKKPTMKKAEFALDLLYNKDPKSITPPHYIAEALEWLQKILIEKDDGDFLESEEV

SEQ ID NO: 70755 - protein, 620 aa, Clostridium sp. C105KSO15
MTVDYKIQDDNRDNSADEIIRDCLNQTDLRSFFLFAGAGSGKTKSLIDALNYLKDKYGNQFLTQKRNVAVITYTNAACDEIKRRANYNSLFVISTIHSFAWELIQPYTIDIKEWIKEDTIIRMADLERKQLTGKKQSQAYRDRDRKIESYKKRLDSLSLIKKFIYSPDGANNEKNSLDHSEVIKICANFLTSKQTLQNILIDRYPVLLIDESQDTKKELIEAFIELASNHKGSFCLGLLGDTMQRIYLDGKEKLQDIIPNDWEKPCKEMNHRSRKRIVDLCNEIRKHADGIQQKPRHDKTGGTVRIFVVDRKQDNYKVENQIRRKMIDMAKDSNWDDIEQVKCLTVEHQMAAKRLGFEHFFEPLYSVYKQGVTDGSLSAISPLLRILLPLYQANVDENKFEIARIVRKNATAYKNCIKERDLSKEDFERINNSINELLKLWKNNDPKCIELIDNIEKNDLFELPNDLKILLKRESSNGENNTKDSDIKKLDALATSLNAPFSEVVKYQQYISGIASFDTHQGVKGLQFERVMVIIDDEASQGSTFNYGKLFGIIPKSKTDIENEDQGKETTMDRTRRLLYVTCSRAIDSLAIVYYSDSVEEDINKISSCGWFIEDEIIKL

SEQ ID NO: 70756 - protein, 596 aa, Rhodobacteraceae bacterium HL-91
MHLSRIQIKNFRNFADFDVSVGGNLVVVGENRVGKSNLLHALRLVFDPAMPDSARQLGLSDFWDGLDELTKDDSILVSVEIKGFEDDEDILAILTDFRLDDDPETVRLTYELRPLADLEDDPTSAEDYEFICYGGESEAKQFGHKLRRRITMDVLPALRDAEADLSVWQRSPLRPLIEEAFKSVDTDSLKEISEAIEEATAKITQFDEVSTLEKNIADLFQEMSGQKQDIHPTLGFSPTDPARLYRSVRLLIDEGARGISDASLGSANLVFLTLKSLELRRLIEENHRDHTFLAIEEPEAHLHPHLQRSVYRHVFTEAQEAGAPLTMLVTTHSPHIASVAPLRSVVLLKDEGDAGTKGYAAEAINLEDDEVDDIARYLDVTRAEILFARGVLLVEGDAERFLVPAFAEGLGYVLDEMGITVCSVAGTNFRPYAKFLVGLGIPFAVITDWDPIQGKKPLGRNRSLRLVKDIETQRTGTEPTALIEELDAIADHDDFAERCEAYGIYTNSRTLEVDLFDDGFAAAIIAVLREYPFSAARKEHIDNWEADPEELDPALLLKMIDTIGKGRFAQRMLSYIDGIEAPDYIKDAIKYVAERV

SEQ ID NO: 70757 - protein, 602 aa, Rhodobacteraceae bacterium HL-91
MRSSTWPNVSDRRLYLKAAEELRPNSGQWAAYESEGHCVVIAGPGSGKTKTLTTKLARILSEDVQEPRGVACITYNNECARELEQRLDALGIEPGGRVFIGTVHSFSLTQIILPYAKVAGMGLPGDFQVATLQEQRGALERAYDRVIARGEDPHRFWRLRMDRYRRSHLKRDTAAFREQDAKCAELVVAYEEELRRAGLIDFDDMPLLSVRALREHQWLQDAIKAKYPVLIVDEYQDLGSALHQMVMGLCFSTGIRLFAVGDVDQSIYGFTGANPVLLERLSQREDVETVRLRLNYRCGSKIVTASQYALGEERDYEAPEGAEEGTVFFHPVNGNYDGQAGYVFDTLIPDAMARLPDLRLGEVAILYPAAWIGDAVANAAQARGYATIRADGNAIYPRSSRLMRWLEQCGTWCCEGWKSGNPRFSRLIDEGCRVFAESLTSEESRLDFQRALMRLLWEHRENAMSLHDWLLSVRHEILRELFAGSRTLADESDTLDAFILKTAPGGANEEMTLGQFCGHGEGNNRINLTTLHSSKGREFRLVVMFGMDDGRIPRPNPNERETREARRLFYVGFTRAEEEIHMLHSANNPSPFVIELAERLEE

SEQ ID NO: 70758 - protein, 798 aa, Enterobacter cloacae; identical to SEQ ID NO: 66256

SEQ ID NO: 70759 - protein, 622 aa, Enterobacter cloacae; identical to SEQ ID NO: 66257

SEQ ID NO: 70760 - protein, 659 aa, Enterobacter aerogenes; identical to SEQ ID NO: 66274

SEQ ID NO: 70761 - protein, 615 aa, Enterobacter aerogenes; identical to SEQ ID NO: 66275

SEQ ID NO: 70762 - protein, 594 aa, Enterobacter cloacae; identical to SEQ ID NO: 64492

SEQ ID NO: 70763 - protein, 605 aa, Enterobacter cloacae; identical to SEQ ID NO: 66703

SEQ ID NO: 70764 - protein, 566 aa, Enterobacter cloacae; identical to SEQ ID NO: 66008

SEQ ID NO: 70765 - protein, 541 aa, Enterobacter cloacae; identical to SEQ ID NO: 66009

SEQ ID NO: 70766 - protein, 767 aa, Pseudomonas syringae pv. tomato
MEELMHIQHLEIANFRKLLSVRIDLAAETTLLVGANNSGKSSAMLALRRFLVSKASAFRLQDLTLSHLVTIEAIGQAWEAAGAIPSANDWAEWLPTLDIWISAEQGELHHIRDLIPNFAWRGGLVGMRFRLEPEDMEDLYVDYRKQRERVEILKTEIQRLAAEGEDPPHLPLWPQSLHDYLNRRLGKMFKVRWYRLDPAQLQDPDPRTRSANRQSLSATSVALERNPLINLIRVHEINAQRGFGDSADEGHDDGKQSGGRKLSEQLRAYYNRHLDPGDSPDISDLGALRAIEAAQVAFDTRLSTSFEPALKEVAGLGYPNNSDPSIRVATRLAPTDGMNHEAAVLFELDSIGGAPGAPPLRLPETSNGLGYQNLISMIFRLMAFRDEWLKKFRTADEQSAAGVEPIHLMLIEEPEAHLHVQVQQVFVKHAYHVLCRDPLLERFPNLKSQLMVSTHSSHVAHEVEYQNLRYFRRLPAGMDGVQVPVSTVSNLSTVFGKKPQTKDFVTRYLRAQHADLFFADAVILVEGAAERMMLPHFLRKHFPFLDQCYITILDIGGSHAHRLLPLIDALGIVTLVITDLDAGSLRSAQPVQRDAGQQTNNPTLRHWTKAGGLPHSVDALLALADDLKTQQIDQLFAIRIAYQTPINIHLPLTGEQVEMLPNTFEDSLVLSNASHFSAKQVRRGLMRAFARALNGAESSNNLASLLFESLRDGDKAEFALQVLGDPGFAELTIPEYIREGLTWLQSKLERKQRELLVVPTAITEVTA

SEQ ID NO: 70767 - protein, 631 aa, Pseudomonas syringae pv. tomato; identical to SEQ ID NO: 62999

SEQ ID NO: 70768 - protein, 634 aa, Enterobacter cloacae; identical to SEQ ID NO: 66662

SEQ ID NO: 70769 - protein, 556 aa, Enterobacter cloacae; identical to SEQ ID NO: 66663

SEQ ID NO: 70770 - protein, 566 aa, Enterobacter cloacae; identical to SEQ ID NO: 66008

SEQ ID NO: 70771 - protein, 541 aa, Enterobacter cloacae; identical to SEQ ID NO: 66009

SEQ ID NO: 70772 - protein, 659 aa, Enterobacter aerogenes; identical to SEQ ID NO: 66274

SEQ ID NO: 70773 - protein, 615 aa, Enterobacter aerogenes; identical to SEQ ID NO: 66275

SEQ ID NO: 70774 - protein, 712 aa, Rheinheimera sp. F8
MHISKLSLVNYRNFPNTKLLFKKGINTVIGENGSGKTNLFRAIRLLLDDNMIRSAYRLEQADFHRGLGRWQGHWIIISLEFEEISADESVQALFRHGTGVIEEEANGKATYNLIFRPKKEIRLRLSQLNDGDQAGLDAILNPVTIDDYETIFTGRSEADFNDKAFYKDVVGDFENVRFNEEVEFRVIGAKIPNVLSVSKEISFTFIQALRDVVSEFHNNRTNPLFSLLKGKSGDIDPVAFQAITDGVKALNDSIEALPDVQVVRTDIRDTIKDAAGEAYSPSSLSIKSDLPDEADKLFQSLKLFVGESGESHEGPIHELSLGGANLIFLTLKLLEFKYQKAKQSIANFLLIEEPEAHIHTHIQKTLFDKLKYDDTQIIYSTHSTHISEVSNVQNVNILGREGGRCEAYQPAIGLNPEEIGNIQRYLDAVRSNLLFAKSILLVEGDAEEILVPILVKNVLGLSLDELGISLINIRSTGFQNVAVLFHDDRIRKRCSIVTDLDKAIIDTTPTVGDSEGLLRRKSKYQASQERGIARKALLEDTFKDNTWVSPFFAPHTFEVDFVAAGNARKVVGILSDVYKDAPTIATAKAELESADIALFGQRALTMADNYGKGWFAILLGKKIDPQTAIPKYILDAIAFAHPVVTKEVWFNVLSYRVNYIDAEDVFTASAVFDDFRAKLLAFRNGDIDFVGIRNEMLATFPHDRINDVLAVF

SEQ ID NO: 70775 - protein, 599 aa, Rheinheimera sp. F8
MFMWNKDDLNPEQEAAILKPGSVFLIACPGSGKTRTLTYKIAYELSRLKSNKQFVVAITYTHRAADEIHERIESLGVDTSRLWIGTIHSFCLEWILKPYGIYHEALDRGFRVIDQHEREKILEALCKPYQKPKITFWDCEFYYTETGYVLSCPQDWKHPGLHVILGKYFEILHESRQLDFELILYYAHQLIARHPAISTLLAQLFSFVLIDEYQDTKRIQYSIITAILRAGQGTTKAFIVGDPNQAIYQSLGGYPIAFEDFKAMANIDLEELELSRNYRSSDRIIDYFGNYNVYNTRIEAASEDKAYPSLISFNDTVSKNDLDAELIRLIRFNIETMGISPHEVCILAPQWTHLASITRRLVASMPEYSFDGPGMVPFARDTENFWYRLSKIALTQASPGMYVRRLRWAGEILNDLEAAGASVSNLTRRSLLRECNAIKIDETDGLTYLSAFFDQLFANLVIDFRLFTLLQEHHVAFFDSSQARVNRLKSEGSEFIGDIETFRKVFQQRTGITISTIHGVKGAEFDAVIAYALLEDMVPHFNDPNGQESAMKLLYVIGSRARKNLHLISERDRVRQYSGEEYQVTHKLAACSFGYDQIP

SEQ ID NO: 70776 - protein, 594 aa, Escherichia coli; identical to SEQ ID NO: 64492

SEQ ID NO: 70777 - protein, 605 aa, Escherichia coli; identical to SEQ ID NO: 64493

SEQ ID NO: 70778 - protein, 607 aa, Escherichia coli
MNILIDKVRISGFRGISNVEITLPRVTVLLGQNNAGKTSVIKAMQLAMGDYSRYLSDEDFHIGEDEKRREVITVDLRFIAVDGESRTKEFSENWQQVFGDKIQSEPDGNQFVCIRTIAKPDRVKGGYVVERFHLDIWPERTNWQDARVNSKNRLGKRLEFVPFIPIDAQRDIHSELKEKSSFVGRVLSSVEYDDNDVAALERMVAEINKEAIEKSEPLKRLKNHLDNLNQSFEGSGQTELTPFPKKIRDLSKRFSVNFGESDKSSFSMEYHGMGTRSWASMLTVKAFTELLVKNHEEEAEPFFPIMAAEEPEAHLHPNAQRTLYRQLVDAPGQVIISTHSPYIAGLAELHEIRFISKQENSVCVYQLRDEFDGDDLRKLGREVVHSRGELLFSKAIILSEGETEEQALPELFESYTGKHPFSLGINFVGVNGSGAKYRPFLILAKDFNIPVFIFSDGEEQTVKELKKNYEKVFGVTDIMNSANITILEGTDFEGYLLSQGFEQLIEKSILEIDGDGAIDKWIEKKNGTSLKRIRTDKPNCGTCNQPIFEDVLRDYIGDDGRVRAILEILDSRKPLYAKAITDNLIKLPKEKFPQKIVELFKKIESGV

SEQ ID NO: 70779 - protein, 630 aa, Escherichia coli
MNLSNAQRQIVEAPMDIAIQVLASAGSGKTRVLTERVRYILNNTKRDAVIALTFTNKAAEEMSTRLSDFDPDEDRAWIATIHSVAQHILEKYGHTVGLPSDLYIYDRDKDRMEVFMQSLREDGIDIDEYLSIADSRELKNRERNLQSYMDIFSKIKRELLTEFDVSELYPNNNIWKIYKDYQASLLNSGGIDYDDILVYAHRILLTHDWIAKIYRSKYKHICVDEAQDLNKAQYEFIKVLCGDVIKSILMVGDPNQMIYGFNGSSKDYFCENFINDFYPNQFELKENYRSTKAIIRAANKLRPGSQAEIDYALEGGVRISEFASEEDEAEMVVATIKHLLELKVHDEIEGNISLNNMVVISRNRFVFGKLENCLKNNSIPYSLRKGERALEPSTRFGKVLDYAIRLKLNSKDWVDGKKLCQVLGISEPAGWTPDVLRELAAQISSSTDDYSVVFEKLLTTIDSLNIENPKIPKLIKEFNDLLTSLVENHNGISDDKIEDVKLSIEELKEFSGMWTRFKRKGLGDSLVAFRNALALGQLAESSMDEGLTLSTVHTMKGLEKDIVFLIGMCEGVFPDYRARTTKELEEERNNAFVAVTRAKRWLYVSYPKQRMMPWGDLRFQRKSRFVSEIE

SEQ ID NO: 70780 - protein, 656 aa, Escherichia coli
MLIESVKLTNFRSFGPQGQQIKLDPMLTTLIGANGTGKTAVLQALQRLFGVTSEQRTVSRQDFHVPSTETDLPNIRNLSLEAIIAFPELDDAQGDHSAIPEFFRSMSIADENGRLKCRLRLDAQWDDDGTIDGYVTSQFHAITCWGNDEPDDSDFHKVRPADRAKIQLIYIPATRSATAQVSSFLKGRLWKAINWSTQVRASFAEKAHELNSAFESESAIDAITGRLTQRWQQLHSAGTDSTPKFRPVDVRFEEFVRKVDVLLHPDESGRDRSIEELSDGQSSLFHIAMTSATLDVEREIRLNSRRSAFLYDDLPLPSLTLLALEEPENNLSSHYLSRIISQLNELTGNIHAQAIISSHSSSILARIAPTQIRHFRLDVVSKNTIVRALTLPEEDNDAAKYIQQAVRAWPELYFAKVVVLGEGASEEVILPAVAGAMGTPIDRSFVAMVPLGGRHVNHMWRLLNDLQIPFITLLDLDWGRHGGGWGRIKNIISQLIEVGTVPQVFFQNVDPRGYKYNLLEFDTYSPSNKAHIDSWVDFLKRFSIFFSNPLDIDYSMLKAFSGYYQTPPEENASGPSTAGDPRDAVLGNEGIPAFYADDIHILRWYRYLFLGRGKPSTHIRVLSQIPSDQLAQNAPEELKALVQTLQHHLSNRGSQQ

SEQ ID NO: 70781 - protein, 633 aa, Escherichia coli
MKFISPEQWRPKEIDDLEPNAWNALRTPGSVSVIAGPGAGKTEFLAQKAAYLLETGICPPSQQILAISFKTDAAKNLADRVKLRCTEELSHRLVSMTFDAFTKSLVDRFRLALPQEWRPSKKYSISYPNRRDVAQFWARRQHRVSSSDARDIEYEIRHMDAASFESHVVGSYRIPENMSPPQSIKHYLVFWWLREQIKNENEEESALSFMTINRLAEYIVRSNIHILRALRATYTFVFVDEFQDTTYGQYDFLLSAFGQAKATITTVGDYKQRIMGWAGAKTNAFHQFEHDFSATRYQLQLNHRSSPELVRLQHIVAREIEHSVCMAHTRVPQRIEKECAFILNSRSVALEVSYIAKWISRNMQSRELRPRDYAILARQKPENYYDQLNQSLASYHLKLRNESVKIGNTTLQDLLAEEFTILFSNLLRFVIGQKEPRIWGQVYSSIEQLRGTLPDDIRAHKTIENQLVNLKQSLQTLLEQPYSTTTAQPVMEHIISFISLSDMRKAFSRYNTGDLLNITLEALEIHFLQCVSSTSNWQGCVDEFDGVDHIPLMTIHKSKGLEFDTVIFIGLDDNAWWSHQPGNAESMATFFVALSRAKQRAVFSFCSERGERQKLLDIYALLEKSGVKEYNIS

SEQ ID NO: 70782 - protein, 708 aa, Enterobacter asburiae
MYIKNLSIRNFRNFQSTKLNFKKECVNTIVGENSSGKTNVFEAMRLILDDSLPYYKRFLTERDFHRGCLPVFGQWILISLELGDISGDEESEILCQLNTTVDAGGTGRVTYIYRPQFHIREKLFNLSSIADLQKRREAYDKLLKEYIIDKTTYEAWTVYQGTCDFSDENEYVRIAGDFSNFIFPNPSVEYIDLLGNRQRGYNLLDHISCTYARALRDVVSELKNNRFNPFQKLLDFISKDISNDEELTSNIIDVNNKISTISEVRKLSTGILTSITNAVGSTYSPLVNISSELPSDVKDLVKVLQLKAGDSLSDGYTADLSEMSLGGANLIYLALKLYEYEEGVSKNLLSNFLIIEEPESHIHTHIQKTLFSNLKNKKTQVFISTHSTHISSVSNISSTNVLVKKLGYTQACSPSSGLDEPTINKIERFLDAIRTDILFAKNVILIEGDAEEILIPHLVKNSFGVTLDELGVSLISVRGTGFELLSSLFHPSRITKKCAILTDDDINIYNEDKPEYITQVMYDDAISSEKSGKERVEALKLLTANNNLLKAYFTKHTFEIDLALSGSKKYFEIIARESFEKDFYLTPYLDAFQSSDDTKIGSFALKLANKHKKGWFAMKVVEKLDHNFPIPMALCKALGFTSDFNKLTLARVIKYRCDYYTKTLGDNIIEVAFSDDSLEYIVDNIEPVLDIFKGHYSNDPLVHLLMEA

SEQ ID NO: 70783 - protein, 563 aa, Enterobacter asburiae
MDDEKKELLKIKKNLFVSACPGAGKTKFLLGMLGDNIRCDSGFKWHIVLTHTNAAADEINLRLDNQNILNDRVWCGTIHSFLLEWVVRKYAGAMARTKDGVRLISEREHRDLIRKIEKEKFPSTRLKFKWDEYGDPHVEPFCLLNEPEKIIDAQKNEAIVCEEYEKNKIDASLIDFNDILTLSLEFLTQNEKIAEYLSKLIGYIYLDESQDTSYIQLEVLSFITRYNKTIVLVVGDNDQAIYQDLGVSIKDEVSIKKILKLDELEVRQLTGCYRSTKSLVDYYKKYSYSKSNIESIREDLGKSPIIRHTLQTDLAGRVMNLIEAYNKSKGSVESLAIIGPNRYYLNDLINSIYERSNEFVFDFYSTNPLYTLKDTIYNDLVRLVLLDVSVNNYRARHALCISIKDKLPEFDGLSCSDLKKAVKQFNTKRTVFILWLKDFYEFLLSALPHSPKINSDYLICQSNLSAFPVKADIISIRKIINKEANVVKVTTIHGCKGEEYDYVISIGYHDQVVPHSSAVEKGAEYSESIAKRLMFVAFSRAKNHMNIYIDDRRVVSPYFIADT

SEQ ID NO: 70784 - protein, 756 aa, Burkholderia sp. RF7-non_BP4
MNIKTIKIKNFRLLHDISLQLEDETTVVVGRNNCGKTSLSDIIRKFLSERSTFEIEDFSSACYDKFCAAHRAYLKGAGVEEVRALVPSIDLRLHVGFDPTVPEFGPLREFVIDTDDSCTEAVIVCSRSLADGRIADLFEGHEETILHGPDESHSDGDRLALFRSLTDRVPTLFTTRMWAEDPQDPTNTRDVTPKAVTNLLSLGFVNAQRALDGTGARSTDVLAKVLESLFQSASVSTADGSQKNIADGLKKAVEEIQSGMDTDFKKELAKLMPAIEYFGYPGLDNVPLQPETKLEVGKLLSDFTKIQYASYSGVQLPESYNGLGYRNLLYILLKIVGFFREYRAHANAPGVQLIVIEEPEAHLHPQMQEVFIRQLPEIVKKLCALEGENVSWPVQFIVSTHSPHVANEARFDTIRYFAVTSTDLPVGVRCTQVKDLSSDLAGLKGPASDFLHQYLTLTRCDLFFADKAVLIEGTTERLMLPQVMRALDSVDPSLKLGSQYITIMEVGGAYAQLFIPLLKFLGLRSLIITDLDAVKRNSKKKLEACLVHEGETTSNSCIKHWFNTVEAPAPVPETPADKQTTTRDPMPQAASMAAASATAEVAVAETADDDEEEVADGATLFPLSTALAADNAAKTRGSLRLAYQVPEASNGPCGRTFEDAFILANQTLFGITGATNDALAKAAQDKAAKQKKSKFALTYAIERTDWVTPRYIEEGMRWLAASNVAVANPSVALAAEAQAIDAINVLTDTPLSGEAI

SEQ ID NO: 70785 - protein, 579 aa, Burkholderia sp. RF7-non_BP4
MSGVTHPNPAEAAAAAAWEALKDCLNDGSSFVFEAGAGAGKTYSLIAALRYILKDQSRELQRTHRQVACVTYTNVARDTIIAQTDGDPAIYCDTTHAFAWMLVSPFQKRLRELVRTLPGWVDRVEELDAANITAVGYALGRRSIEDGTANLHHDDIFPVFIKLMQFAKFRNAMASRFPLILVDEYQDTNVELVECIKDHFIGKPHAPQFGFFGDHWQKIYGDGCGSIAHDALKRIDKKANFRSAKPIVDSLNLIRPELAQAVKDPAAPGEVHVYHTNGWGGRRLTANHWQGSLPAAEATRALSNVRSELESVGWDFAGDTKVLMLTHRALATEMGYNSMRAVFAFNDSFTRKANEVIAYFHEHLEPAARAYRTKRFGKMFEAIDAERPVMNGPADKARWTDTMRRLCELRNTGTVGDVLAYLSSTGLPILSDSVVRQEKALADALAGGEPLTGRIKELHALHAVSYQEIIALCKYLDGHSPFETKHGVKGDQFENVLVVFGRGWNDYDFNLYLKMAGNPGLIGTRTADYERYRNLFYVAVSRPKRRLALLFTHLLEPGAMATLSGWFADHPIRDIGPAL

SEQ ID NO: 70786 - protein, 698 aa, Burkholderia sp. RF4-BP95
MRIEKVKVEGFRLLQDVEIMLESNSTVIVGRNNSGKTSLTDIFDRFTGETGARFRLEDFSAASRSKFFDAKTLREKEASPEEILAALPKIVLTLTFAYDSTAPNLGPLAPFVIDLDVASTKAIARVEYGPTLATLHTLLDIPPAAEGVKPNTHFLRSLRETLPKAYSIHVCAIDPTDDTNRRDFEGTAALAALVQCNFVRAQRTLDHARHGDTDVIGKLLSTLFKTATTPTAAAADQELAAKLKASVEGIERNVQEDFDEMLKKLLPAMEVLGFSSLNDTELRPETSLNVEALLSDHTKVVYTGADGVHLPEGYNGLGTRNLIYMLLQLESFHKSYRAKATRPVTHLIFIEEPEAHLHPQMQEVFINQLNAAIGKLSASYPDEPGWKVQFIITTHSPHVANAASFEAVRYFLNESTETASTRHTKVKDFKKGMTTIPPEDQDFLHQYMTLTKCDLYFADKAIMVEGTTERLLMPRLCELVDKTLGEKHRLARQYVTCVEVGGAYAHLFYPLLDFLELKTLVITDIDSIKLVEKENKQGKKIKVWEKCPVAEGERTSNAAIKEWFRPKDERDKDNWQITPAELATKTPAEKQSGYRRIAYQIAEAADSNVCARSYEDALVLANPDRFEWPKEQDEATEAWEIAQGLAKADTALRFAIREKDWTVPRYIREGLAWLSEPPPPGAAPPLEKMESPANVEAA

SEQ ID NO: 70787 - protein, 577 aa, Burkholderia sp. RF4-BP95
MIEAAENPALIAAKEAQRKIDEALDAGRSFRLEAGAGAGKTYSLVAALKRIIAERGPALVQAGQKVACITYTEVARNEIAQEIEDHPAILVDTIHGFSWAFLRQFQKALRDLVTEMEDRREKIEQGGGVGSKPIDYDLGFFGVDADRITLGHDDIPEMMATLLTREKFRRVLTQQFPVIFIDEYQDTHRQFMEAITEHFLKPNTGPLVGLFGDHWQTIYRSEYELAEYPIEEIGKGSNFRSVPVIVDVLNRLRPELKQAVRDPEAIGEARFFHANAYQGQRTNDRNSKEDLPPELARSTRESLMERLQTEGWELGKTKVLMLTHNVLAAEQGYPTVAEIFSGRTELFAKKEDPAIKFFAETVEPMCAAYDASRYGDMFKVLGSGPAITKHEDKASWRGDMDALQKLRTEGTVGQILDHLKKSRRPSPPDRLLRRDDELAALNGEPIPDDATALQRYSRLRNVRYDEIIEVVKFVEKQTPFATQHSVKGAEFENVLVVLGGGWNHYNWPQLLELLETGALNAKNTKAFYRARNLFYVSISRPMTRLAILATQTLSDTALAAVSRLFGQDNVEELAIPM

SEQ ID NO: 70788 - protein, 774 aa, Burkholderia sp. RF2-non_BP3
MHLKKLAVRNFRRLRNVVIDLASDISIFVGANNSGKTSVGHALQLFTGSGRFNIHDFSAELWADIVAFGEGDGEASLPTMEIDVWFEIGPDDVHRVIDLLPSLAWEGKLVGMRVAYAPTNPAATHARYVEVRQRVLDAVAKGEDGAPAFDPSPRNLREFLRDRLHDEYELRYFVLDPARFDAKMVAEAGYDPATLTGRDRSGREILNGLLHIDFLNAQRHLSDSPGGSRAEDLSRVLSRFYGRNLEQKGEDVEALRALAASEVSLNEHLERVFEPTLKSLSKLGYPGLSNPRMMIRSALDPAQIMSGRDGAVVHYALGGADDGNPDPPTLPDRYNGLGFKNLIFMVVELLDLHAQWLAIEENRPPVHLIFIEEPEAHLHAQLQQAFIRKVMDILTLKGEDRTHYTSQVVVTTHSTHILYERGFRPIRYFRRGRARNGSTSDVLNLSVFYDNTDPDIRSFLERYLKLAHCDLFFADGAVLVEGNVERLLLPQMIANAAPRLQSTYLTVLEIGGAFGYRFKTLIEFLGLTTLIITDLDSVFGPLGQDGEGAAPAGQPEAAEAVGEDAQAAGAEAEDIDDDEEDLPVAAEKPGKACIAGHPGAATSNQTLLQWLPKCDTVAALWEATAEQKIQARTDDNDALVRVAYQCRTDVTWGGETLALAGRTLEEAFALENLEWCQDKNRKPLQLRIAKADEKNLTTLAERIHKRVQAKSFSKTDFALALLAEDPSSWSVPTYIAEGLNWLETEIAPPEPVEDQPRVDAPQGVPAAVGDEVAA

SEQ ID NO: 70789 - protein, 625 aa, Burkholderia sp. RF2-non_BP3
MTSRIGSPDTQADLDVRGCLDRMPPRSFVMVAGAGSGKTTSLIKAIAHLAETRGPVLRRAGQQIACITYTEVAAGEISADVGVSSLFHISTIHSFLWSVIRPFHSDIAAWVATRIDEKIAERRAHYDKPRTQAKTKARLEQEIEDLEAELAAISEVEKFVYGTGSSYAEGILGHDDILKLTPACVAAHPLLRQLVAKRFPYIFVDESQDTNPEVVEALRHIAGDHPGLCLGFFGDPMQKIYMSGAGAIPLNDGWAEITKPENFRCPTSVLGVINAIRAPGDGLAQVRGRTTIVDGSEQPVAGTSNLFILPADTERSARLAAIRQWLAAETGDGLWLSDVREGDVRLLVLVHRMAANRLGFPNLYAALNDRAPMSLSEGLSDGTAWPLRPLVQHILPLVVAAQAGDRFTVISTLRSECPRLEPARLRGQATAPVLTALQQALDGLVGLLAAGSQATIRDVLTHVRDNELLRLDDRFAMHLVAEPVDDGSSGFENVQAYLACGVDELWAYRRYFTEESPFATHHGVKGAQFERVLVVIDDEEAAFRQYSYGKYLGYVPISDKDEANIAAGEESVLDRTRRLFYVCCSRAMKDLAVVVFVPDVAAARTAIVAQNLFPETAIRGAEHLG

SEQ ID NO: 70790 - protein, 756 aa, Burkholderia sp. RF7-non_BP1; identical to SEQ ID NO: 70784

SEQ ID NO: 70791 - protein, 579 aa, Burkholderia sp. RF7-non_BP1; identical to SEQ ID NO: 70785

SEQ ID NO: 70792 - protein, 749 aa, Burkholderia vietnamiensis
MKIKTIKIKNFRLLHNISLQLEDETTVVVGRNNCGKTSLTDIIRKFLSERSTFEIADFSSACYDKFCAAHRAHLKGAGDEEVRVLVPSIELRLHVSFDPTVPEFGPLREFVIDTDDNCTEAVIVCSRSLADGRIADLFEGHEETVLHGTDESHSAGDRLALFRSLADRVPTLFTTRIWAEDPQDPTNTRDVTPKAVTNLLSLGFVNAQRALDSTGGRDTDVLAKVLEGLFQSASVSTADGSQKNIADGLKKAVEEIQSGMDTDFKNELAKLMPAIEQFGYPGLDNVPLQPETKLEVGKLLSNFTKVQYAGYSGVQLPESYNGLGYRNLLYILLKIVGFFREYRAHVNAPGLQLIVIEEPEAHLHPQMQEVFIRQLPEIVKKLCALEGENVSWPVQFVVSTHSPHVANEARFDTIRYFAVTSTDLPVGVRCTQVKDLSSDLAGLKGPTSDFLHQYLTLTRCDLFFADKAILIEGTTERLMLPQVIRALDAADPSLKLRSQYITIMEVGGAYAQLFIPLLKFLGLRSLIITDLDAVKRNAKNKLEACLVHEGETTSNSCIKHWFSSAEATTPEPNAPADKPATMPVTTPQAASTVPVLATAGVTDDDDEEEVADGATLFPLSTALAADNAAKTRGSLRLAYQVPEAADGPCGRTFEDAFILANQTFFGITGATNDALAKAAQNKAAKQKKSKFALTYAIEKTDWVTPRYIEESVRWLAASNTAVADPGVALAAEAQAANALVDKPTSGDAT

SEQ ID NO: 70793 - protein, 579 aa, Burkholderia vietnamiensis
MNENTRPNPAEAAAATAWEALKDCLDGGSSFVFEAGAGAGKTYSLIAALRYLLQGRARELQRRHQQVACITYTNVARDMIIAQTDGNPAIYCDTTHAFAWMLVSPFQKRLRELVRTLPGWADRVEELDAANITAVGYALGRRSIEDGTANLHHDDIFPVFIELMRSAKFRNAAASRFPIILVDEYQDTNAKLVECLKDQFIGKPYAPQFGFFGDHWQKIYGDGCGSITHDALKRIDKKANFRSAKPIVDSLNLIRPELAQAVKDPAAPGEVHVFHTNGWGGKRLTANHWQGDLPATEAAQALRNVRAELESVGWDFAGDTKVLMLTHRALATEMGYGSMRTVFAFNDSFTRKANEVIAYFHEHLEPAARAYLSKRFGKMFEAFDAERPVMNSPADKVRWTNAMRRLCELRDTGTVGDVIAHLSSTGLPILSDAVVRQERALADALAGGEPLTGRVKELHALHAVSYQEIIALCKYLDGHSPFETKHGVKGDQFENVLVVFGRGWNEYDFNLYLKMAGNPGLIGTRTADYERYRNLFYVAVSRPKRRLALVFTHRLEPSAMATLSKWFTGYPIRDIGPAL

SEQ ID NO: 70794 - protein, 775 aa, Burkholderia sp. TSV85
MRIEFIEIANFRKLLSTRVGLSSERTVFVGANNSGKTSAITALRYFLVDQERSSFCFNDFTLSHWPAINAMGAAWETEHIASQPLPEPEWDQVLPFLDVWLLVAENEVHYVQKILPTLDWDGGRLGVRMRLEPKDAAQLQHEYVTARSQALALQAAGAALAEEQGKAAVDFQVAIWPQNLVEFLKRRLASFFIVRAYVLDPASCVDPENGVAKPQALNGSEPIDGDPFRGLIRIDEISAQRGFGVGGEDNGEEAAAAISGSRKLSTQLRQYYTRHLDPYENPDAQDLLALKAIEEAQKAFNLRLNDGFKSPLKEMHKLGYPGVTDPKLNISTRLRPVEGLNHDAAVQFVVPIHDGANAINLYLPEDSNGLGYQNLISMVFRLMAFRDSWMRVGKAKHKAADDTIIPPLHLVLIEEPEVHLHTQVQQVFIRQAHKILRNHVDLAASENFVTQMVVSTHSSHIAHECEFDSLRYFRRLPGGEKAIPTSCVVNLENAFGRDPDTKRFVTRYLRVTHCDLFFADAAVLIEGPAERILVPNFVNSHPEFEKLSESYITWLEIGGSHAHKLRSLIEKIGLTTLVITDIDSCNATGASTQPVRGAGCTTRNTTLRTWWPVINDLDPLLDKPENEKVKVYADENFSIRVAYQSPIQATFKGATAEALSYTLEDAIVMANLDLFEVLPGTGLIAKFRTAITGSADLIALSGALKTALEGGGKAEFALDLLEMENPLSLKPPAYIRDGLLWLAAQLEHKQVELGLAHVAGEDDGRAATAPEEVTA

SEQ ID NO: 70795 - protein, 632 aa, Burkholderia sp. TSV85
MNNVTAEPSNVTLDDHVDEELTRFLSLEKPKSFFLFAGAGSGKTRSLVNALNYLAKTYRDSLRLRGRQVAVVTYTNAACDEITRRTEYDPLFVVSTIHSFAWSRIQGLNTDIRAWLKDNLQREIADLQAEEEKGRAGTKASAARQTQIESKQRRLDRLADIKTFTYNPSGDNRERNALNHGEVIKIFSTFLLEKPLMQRIFVEKFPFLLIDESQDTSRALIDALLVVQKAHADRFCLGLIGDTMQRIYPDGKSRIESEIPQSWATPEKKLNHRCPQRIVRLINQIRGAADNHKQEPRDDRPEGWVRLFVFPVDAPEKPTLERRVRDYMAVLTGDQDWTDASKCKILTLEHQMAARRMGFLQMFEALASVDDYRTSFLDGSFAPTRFFTHYVLPLVTAQQKGNKFAATKLVRESSPLLSKEALKGNDKPIAQLRAAQTAIDSLMALWTNGEPTCGAIVANIAETNLFAVPDGLKAALAVVKQAGPAETPDDEAADPVGDHIAALVAFLDCAFSEIAPYAAYVAHEAPFDTHQGVKGLEFERVMVLMDDGEARGFLFGYDKLLGAKAPTAADVKNAHEGKETSLDRTRRLFYVTCSRARSSLALVAYSPEPAAVRAHVVANEWFAADEVLSELP

SEQ ID NO: 70796 - protein, 576 aa, Burkholderia vietnamiensis
MMLLTSLKIEHYRGIKALELSLGPTTVLVGENNCGKTTVLHALRACLSALRSAGRASPFDEFDLHFENRAADPTTAPPIVITLTFEEAQAGEWSDEVEQRLGGDGGVIVLVPPDDRSRVQLRVSAQYSSVIQEIETTYEFLDAVGNPLPAKSRNRLTGLQQLRPLFYLSALRDAGKEFSRTSQFWSPFVKNSQIDEATKAAIETQLEDINAQIIEAHGTFKGVREHLAKVQELVALGGQDVVSVDAVPARVFDMLNRTQVSIASATGARLPIGRHGEGTQSLTVLMLFDAFLKSELARKQGVKESKPIVALEEPEAHLHPNAVRALWKTIEDIDGQKLVATHSGDLLSEVDVHAIRRLYKKDGQVSVGAIHQGLLDERQLQKFDYFVRRTRGELFFARVWILVEGETDVIILSGAARALGIELEQAAVRIVDYAQSDLSIFIAAADSLGILWHVFSDGDAAGAKNLKKARDALAGRPEKSHLTLLPNGEPIEPFLCRNGFVEIYEEHASPQNRPRYITVDKDNDAYPSQLYQCLPNNGKPSAAHAVVASMITRGRDSVPTEIVECLGTAMKLAEGR

SEQ ID NO: 70797 - protein, 637 aa, Burkholderia vietnamiensis
MDFLAKLNDSQRAAAMWNEGPLLVLAGPGSGKTATLTARVARLVEQSRDESYRILCLTFTRKAAAEMRERLLKLVPDARDRVLLTTFHSFATDILRQHGSHFGLSPDFEILEESERVGLLRSVLAEKSDELTKFVSAEKALTAIDFLLRNVTPDAQVPSLLKDTEAGQQLQTLFVRYKELLKQQNCLDYGSILYFCEELLRERPRVSKQLRTVYRFVCVDEFQDTNAAQYRVLRVLVPDRDANVFIVGDDDQTIYQWNGASPARVKELEQHYDLTTIQLPENYRCPPEVVALANALIVHNGERSPDKKPLLPMKVGSGTNPIQLLSFEDDQKEAEGIAECVAARLKNGARPADIVVLARATKLLERVQRALEALSVPSHVQRRKSQFESAPMRFVMSALKLALVRSDDDLASMVTKALSDCVEQDSSEEDLAGFSAALNGDQLEALGALVADSPAVAKELQDAVSVLVQGRYAEFIQETLAYFDAVESAGRDGVDEQYAEYTTERNVWQNIIREIGGEDEAYSLSLGQFLQELALANKTPEAPSNSVRCLTIHSSKGLEFLHVYLVGMSEDQLPSFQSKKSGDDSREIQEERRNCFVAITRTIETLTMSFGERYNGWRKAPSRFLFEMGLLDSGSEA

SEQ ID NO: 70798 - protein, 766 aa, Burkholderia vietnamiensis
MTEKAAVVAPSSGSITLRFLELCHFRRLGKVQLEIDEKTTILVGANNSGKTSVLAALRHFLSDGAAFGAFDISLSQWTKLRELGKQWEELAEDPATSAGTDANDWTAQLATLLSAMPTLDLWFNAEAGMYHFVAPFLSKFNWQGGAVGVRLRLEPATDVTSLKELAWSYHTARLPVKDMGNDSLAWPIDLLDYWLREPLKMGQVRAYKLDAENNPLDGKAAYKTQILPADAAPIERKHLAKLIRVDFVAAQRGLGGEEADSRSASGPHRVGMFSNQLLQFARRHLNVAATGHGHRADLIKAVAEAQKELDKKIHDAIAPSVEEVKELGYPGLHDPQEIRFRTRIHTADLLDHGTAVQYSMKKDSAEDLLPEYSIGLGYQNLQSLSYQLVSFKTARLNPEKGSPTPVHLVMIEEPEAHLHVQVQRIFPDKAHKLISPTDKDMAALKSQLLISTHSSHLAHAEDFDRLRYVRRIAKSKDHPMPTTEIVNLGQVFGSDDATRQFAERYFRVQHTDLLFANAAIFVEGVAERMLVPLFMERDYESLNRRYVSFLDIGGSHAHRLKPLVESLRIPTIVITDIDPVEVKVGAKGQSVRVAVANTGQAGLECGNATLRNWHPKRVQLDDFKAPKPEDLTWTEVAECMVRFAWQLPVAEAGNTWPSSFEDSLILSNIEWFKELSEEKESKDGKRVKPPTGALGAAASTVAEAKTHPELASALHALMHDSFSKGDFAASIFEKVAAGETIACPKYIADALAWLQTQLEPITDVVL

SEQ ID NO: 70799 - protein, 651 aa, Burkholderia vietnamiensis
MSGAVFLEGNDRDAGVVEEICGYLTGQPPRSFFLFAGAGSGKTRTLVEVLRRLTGVVPHEAGGVLGRRLRLGGRSIRVVTFTKNAVAVINGRLGSNDLVSVSTIHSFCWELIDGFDDDIRDALVAVKKIELEKAREKAAAKKRGVSATDLTKFAEIEAEIEQFSKIEKFIYHPDRNTYGPGAIQHRHVLDATAWLLLNRPTLKTILRDRHPLILIDESQDTMKGMLDALMALAELQDCGLTLGLLGDHRQRIYSDGHSDLPGLVPDGWAKPALQMNHRSQRRIVTLINKIWESKMQGRTQPVTGVKQYPRIEKTGGMVRLFVGDASLSPEEKRDRELWCADQMWALAQADAWKVGGYQLLALEHKLVAARGGFLRVYEAMDLIDPNAAAPVGSGENNGPSAARLLLDELAQLEACVRPDGTVNEFAATDVLRRCGSLDHLPIDAVKRHVRTDEMLKAIQAFAKACVDQKSTVANVIEPILAVNLFEVDPRLAESFADKSDPPAPPVPRRETETTQARMRRGWCALFAAPWEELGRYRRYLAGDSVLATHQVVKGSEFAHVMVVMDDSQAGGFLISYDKLFGGKELSDTDVSNVDAGKETTIDRSLRLLYVTCSRARESLALVLWSAQPAAALAHIRDKSDWFTPEEILAIP

SEQ ID NO: 70800 - protein, 766 aa, Burkholderia vietnamiensis
MTEKAAVVAPSSGSITLRFLELCHFRRLGKVQLEIDEKTTILVGANNSGKTSVLAALRHFLSDGAAFGAFDISLSQWTKLRELGKQWEELAEDPATSAGTDTNDWTAQLATLLSAMPTLDLWFNAEAGMYHFVAPFLSKFNWQGGAVGVRLRLEPATDVTSLKELAWSYHTARLPVKDMGNDSLAWPIDLLDYWLREPLKMGQVRAYKLDAGNNPLDGKAAYKTQILPADAAPIERKHLAKLIRVDFVAAQRGLGGEEADSRSASGPHRVGMFSNQLLQFARRHLNVAATGHGHRADLIKAVAEAQKELDKKIHDAIAPSVEEVKELGYPGLHDPQEIRFRTRIHTADLLDHGTAVQYSMKKDSAEDLLPEYSIGLGYQNLQSLSYQLVSFKTARLNPEKGSPTPVHLVMIEEPEAHLHVQVQRIFPDKAHKLISPTDKDMAALKSQLLISTHSSHLAHAEDFDRLRYVRRIAKSKDHPMPTTEIVNLGQVFGSDDATRQFAERYFRVQHTDLLFANAAIFVEGVAERMLVPLFMERDYESLNRRYVSFLDIGGSHAHRLKPLVESLRIPTIVITDIDPVEVKVGAKGQSVRVAVANTGQAGLECGNATLRNWHPKRVQLDDFKAPKPEDLTWTEVAECMVRFAWQLPVAEAGNTWPSSFEDSLILSNIEWFKELSEEKESKDGKRVKPPTGALGAAASTVAEAKTHPELASALHALMHDSFSKGDFAASIFEKVAAGETIACPKYIADALAWLQTQLEPITDVVL

SEQ ID NO: 70801 - protein, 651 aa, Burkholderia vietnamiensis
MSGAVFLEGNDRDAGVVEEICGYLTGQPPRSFFLFAGAGSGKTRTLVEVLRRLTGVVPHEAGGVLGRRLRLGGRSIRVVTFTKNAVAVINGRLGSNDLVSVSTIHSFCWELIDGFDDDIRDALVAVKKIELEKAREKAAAKKRGVSATDLTKFAEIEAEIEQFSKIEKFIYHPDRNTYGPGAIQHRHVLDATAWLLLNRPTLKTILRDRHPLILIDESQDTMKGMLDALMALAELQDCGLTLGLLGDHRQRIYSDGHSDLPGLVPDGWAKPALQMNHRSQRRIVTLINKIWESKMQGRTQPVTGVKQYPRIEKTGGMVRLFVGDASLSPEEKRDRELWCADQMWALAQADAWKVGGYQLLALEHKLVAARGGFLRVYEAMDLIDPNAAAPVGSGENNGPSAARLLLDELAQLEACVRPDGTVNEFAATDVLRRCGSLDHLPIDAVKRHVRTDEMLKAIQAFAKACVDQKSTVANVIDPILAVNLFEVDPRLAESFADKSDPPAPPVPRRETETTQARMRRGWCALFAAPWEELGRYRRYLAGDSVLATHQVVKGSEFAHVMVVMDDSQAGGFLISYDKLFGGKELSDTDVSNVDAGKETTIDRSLRLLYVTCSRARESLALVLWSAQPAAALAHIRDKSDWFTPEEILAIP

SEQ ID NO: 70802 - protein, 595 aa, Burkholderia vietnamiensis
MRISKIRIVNFANFANLEVETGGNIVIVGENKVGKSNFLWALQLVLDPGLSELDRRLGLEHFWDGLGENKLGATVEVSVELTDFDDNPDLIACLADAIVSPGPPTVARLTYRFRPMASLAGKPPESLAQYEYVIFGGTDENNPIGTSLRRRLPLDVQAALRDAEKDLLSWRRSPLRPLIEELTEDLDADAREEILQMVREAQTELADRDEVVSTAERIGKRLLDIVGDKHAVPIKLGLAPTRVDALLRGLRILIDNGARGVSDASLGTANLIFLALKSLELDRLVVEGERNHTFFGIEEPEAHLHPHVQRLVYRYFLGVNAAPAQQPRSLSTILTTHSPHIASVAPLRSIVLLRKDVMQGATIATSSAKVPLEEREVSDLQRYIDVTRGELFFARGVIFVEGDAERFLIPAFAEKLGIHLDVLGISVCSVSGVNFTPYVKLLSTRSLHIPHAVITDMDPTEGGEPLAIRRISKMLQARNGPPTAPGLTNERIIELGEASGFFVNENTLEIDVFKAGLGPAMCDVLEQEISFNDKSKAIIDTWRKDAGKLDGERFLKAVERVGKGRFAQALAPHITSAACPSYIRKALEYIRNAVS

SEQ ID NO: 70803 - protein, 443 aa, Burkholderia vietnamiensis
MADRTLPAWHANEELAALAELYEIELHRVGLVDFEDLVRYGTRLVREHDWVLPLIRAKFPVLAVDEYQDLGASLHQIVKRLAFDGGVRLFAVGDPDQSIYGFNGADSKLLEELTNRKDVESVRLEINYRSAEHIVRVAERALGEPRGYKAFDETRSARVVMVKCPDGLASQAQHAVSKIVQEALASKPGRQLGDIAILYRTAELGDIVAEAATNEGLDFIRVDNAAPYRKCTLTSWIEDCAAWCSGGWGEAKPRLQSLLSRYASFRRRPPDERTIREESRRLTEFLWNRRGNGVALDFVSALRTEMLDAMAATEATLADQMAQVNAMSKALAKGGAIHGLDMARLGGRDGSPDHLNLLTLHSAKGCEYDVVVMLGLDEGVFPWSNEEGATLAESRRLFYVGLTRARDAVHMLYSGWTVNKYGRKFYNGRSRFLDELAGRKEGG

SEQ ID NO: 70804 - protein, 699 aa, Burkholderia cepacia
MRIEKVRVEGFRLLHDVEIMLESDSTVIVGRNNSGKTSLTDIFDRFTGETGARFRLEDFAAASRSKFFNAKALREKNANPEEILAALPKIVLTLTFAYDSAAPNLGPLAPFVIDLDVASTKAIVRVEYGPTLATLHTLLDVPPATEGTKPNQHFLRSLRETLPKAYGIHVCAIDPTDDTNRRDFEGTAALASLVQCNFVRAQRTLDHARHGDADVIGKLLSTLFKTATAPTAAAADQELAAKLKASVEDIERNVQEDFDEMLKNLLPAMEVLGFPSLNDTELRPETSLNVEALLSDHTKVVYTGADGVHLPEGYNGLGTRNLIYMLLQLESFHKTYRAKATRPVTHLIFIEEPEAHLHPQMQEVFISQLNAAIGKLSASYPEEPAWKVQFVISTHSPHVANAASFEAVRYFLNDPTDKASTRHTKVKDFKKGMTAIPTDDQDFLHQYMTLTKCDLYFADKAIMVEGTTERLLMPRLCSLVDETLDDKHKLARQYVTCVEVGGAYAHIFYPLLDFLELKTLVITDLDSTRLVEKENKQGKKIKTWEKCPVSEGERTSNAAIKEWFRPTGEKNKDDWQITPAELLAKTAAEKQSGYRRITYQVAETADSNVCARSYEDALVLANPDRFEWPKEQEEATEAWEIAQGLAKADTALRFAIREKDWTVPRYIREGLVWLSEPPPAPEVPPPADSPDAPATTEVA

SEQ ID NO: 70805 - protein, 577 aa, Burkholderia cepacia
MIESTENPALVAARVAQKKIDEALDAGRSFRLEAGAGAGKTYSLVAALKRLIAERGPTLVQAGQKVACITFTEVARNEIAQEIEDHPAILVDTIHGFSWAFLRQFQKALRDLVSEMEDRREKINQGGGVGAKSVDYELGFFGVDKDRITLGHDDIPVMMATLLHREKFRHILAQQFPVIFIDEYQDTHRQFMEAITEHFLEPKAGPLVGLFGDHWQTIYRSEYELAAYPIEEIGKGSNFRSVPVIVDVLNKLRPELAQAVRDPNAIGEARFFHTNAYKGQRTNEPHSKEDLPPELARSTRDSLMKRLQAEGWELSKTKILMLTHNVLAAEQGYPNIAEIFSGRNDLFAKKEDPAIKFFAETVEPMCEAYGASRYGDMFRAFGSGPAITAHKDKAAWRADMDVLQELRAEGTIGQVIDHLKNSRRPSLPDRLLRRDEELAALNGEPVADDATALQRYSRLRNVRYNEIVELVKFVEKQTPFATQHSVKGAEFENVLVVLGGGWNHYNWPQLLELLETKALNAKNTKGFYRARNLFYVSISRPMTRLAVLATQTLSDTALTTVNNHFGKDNVEELAVPA

SEQ ID NO: 70806 - protein, 784 aa, Burkholderia thailandensis; identical to SEQ ID NO: 62512

SEQ ID NO: 70807 - protein, 639 aa, Burkholderia thailandensis; identical to SEQ ID NO: 62513

SEQ ID NO: 70808 - protein, 623 aa, Burkholderia cepacia
MPTYAPESGVAITDVRVSNFRSLANVEVELNDLTVLIGANNAGKTSFLDAMFAAIGSGRRLLGQDDIRLMHGEAMPPKDRRVCVDIRIRPVDENGRVVDKFPEGSFWTALWGPGIVLDDHDFDEFMAFRTTLAWRAEKADYVVERLFLKEWKPFDEWIDTPTQDKPITAAQLEPVALHYIDAKRDLEDDLRRQGSFWRRMTEDLGLSGDEVAELEAALTGINQQIVDKSSMLQRLKTNLSDLQAVVSADSAGIDIAPVARKLRDLSKGVDVSFSTAGAQSFPLARHGMGTRSLASLLVFRAFTAWRGDVAAKNNDKLHSVLALEEPESHLHPQAQRSLFAHIKKIKGQRVVSTHSPYFAGQAQLEDLRLFIKKGGDTGARKLDLSKLEKADDIRKLQETVIESRGDILFARAVVLFEGQTEEQALPIWAEAYWGASIHELGFSFVRANGTDYFPFIWLAKSLEIPWYVVGDGEQKPINDLEAALKKAGQPNIASSPNVVVVSPGKNFETQLLEDGYLAEIETALNEAHGRESFLDEFIDKHHGLELAKGKGVRDYKSDGGRARAAADAMKASKTRLAKPLARTISGLKDPERRFPKHIERLFSVIGQNHGIQKLAVEAEVEEQ

SEQ ID NO: 70809 - protein, 608 aa, Burkholderia cepacia
MRLSMLQAQVVEHVDGALLVVAGPGSGKTRVLTERVRSLLTNVPGHFRVLALTFTNKAADEMRDRLSDLGENRQRAFIGTLHSFCLEMLVERGKLVGVEGEPHIFEQHKDRKEVLLEAIRQDPVLDEELNQIVDRKERNRRVDNWLQMVSRVKAHPITCAVLSDELDKRVLDAYDAGLHACGAYDFDDLLLLGYRLLTNNPKLADFYRRLYRFVCVDEAQDLNEAQYALLCALCGDSYKNVMMVGDPKQSIYGFNTSSPEYMEKFRFEFAAKLIELTENFRSSRAVVNVARSIDPNYLVDAQLPIKGGARVFVGDDEEHEARLIVDELELLFVQGHPDVEGGVEPSKCAILGRTRFALLAIENELRRRTVPFYKRLTANHENESDLVDEFQLSLRVLANPRDRLHWAALATKWMTRPPESVTDAMVALSQMAQSAAEQRAKAVAEAVASIVQNTARLDLMPAFKLLRSYADSLDENTRRAIYEDVAVFQQEWDQYLRSDGTSRTLSGFMSSKALGATQKAHRDGVALLTVHSSKGLEFDVVFVAGMAEGTFPDYRAIGRVREMAEESRNAFVAVTRSKRLLYLTYPRVKLMPWGDYRAQQASRFIPTS

SEQ ID NO: 70810 - protein, 591 aa, Enterobacter cloacae; identical to SEQ ID NO: 70522

SEQ ID NO: 70811 - protein, 632 aa, Enterobacter cloacae; identical to SEQ ID NO: 70523

SEQ ID NO: 70812 - protein, 771 aa, Enterobacter asburiae
MHLRKLAVRNFRRLHDVVIDLASDISIFVGANNSGKTSVGHALQLFTGKSRFNIHDFNAECWTDIVTFGEGADAASLPSLELDIWFEVTPNDVHRVVDLLPSLSWSGSLVGMRVAFSPINPEEIRSRFLAVRQLAIDATPKDENGTPKYDPSPRNLWEYLRDRLNDEYELRYFVLDPARFNAEMISEEGYEPTPLTGRDRSGREILNSLIQINFLNAQRHLSDGSGGSRSEDLSRVLSRFYGRNLEQKGEDYEALIALAASESAFNQHLERVFAPTLKSLAKLGYPGLSNPRMMIRSALDPAQIMNNQNGAVIHYALGEDDGNPTPPTLPDSYNGLGFKNLIFMVVELLDIHNQWLAIEENRPPVHLIFIEEPEAHLHAQLQQAFIRKIMDLLAMESQELMHYTTQVVVTSHSTHILYERGFRPIRYFRRKRSSNMSATDVLNLSVFYDNTDPEIRDFLERYLKLTHCDLFFADGAVLVEGNVERLLLPQMIATAAPRLKSSYLTVLEIGGAFGYRFQKLIEYLGLTTLIITDLDSVYCTPPVQDATEARADELDALAENPAANDDGEEPDDEEEEQANTETPGKACIASHPGAMTSNQTLRQWLPKCDTVAALWEATEEMKIQSRTAECDALVRVAYQCQTDVTWKEETLALAGRTLEEAFALENLSWCQDVSCKPLKLRIARAVSMDLLQLAQRIHKRVQSKSFSKTDFALNLLLKKPDEWSVPTYIAEGLKWLEAEIAPPELEVAEGQEEDVEDMSVALAETDGGRVA

SEQ ID NO: 70813 - protein, 625 aa, Enterobacter asburiae
MTSRIGSPDTQADIDVRTCLDSSPPRSFVMVAGAGSGKTTSLIKALAHLADTRGSALRRAGQKISCITYTEVAVGEIAADVGNSQLFHISTIHSFLWSVIRPFHLDIAKWVVARIHEKIAEKQAHYDKPRTQAKTKSRLEDEIAYLSAQLECIDDVDKFIYGTGSNYAKGILGHDDILKLVPACVEAHPLLRRIVAKRFPFVFVDESQDTDPDVISALRTIANDNPDMCIGFFGDPMQKIYMSGAGAIPLSDGWAEITKPENFRCPTSVLGVINSIRASGDGLQQIRGRTTIVDGVEQTVSGTVNLFILPSNVERSAYLTSVRRYLANETSDEQWLSDTREGDVRLLVLVHRMAANRLGFPNLFSALTDKAPMSLSEGVNDGSAWPLRPFVQHILPIFEAAQANDQFQIMSIMRNECPKLEPSRLHGQAMVAVLNELQRDINGLLALLEEGSQATVRDILLHVRDCELLRLDDRFDNHLRDEPVNDGNDDFENVQNYLRCDAHELWAYRRYLSEESPFATHHGVKGAQFERVLVVIDDEEARFSQYSYGKYFQYIPLSDNDLANLEEGKESVLDRTRRLFYVCCSRALKDLAVVIFVPDVAVAQSAIVGQNLFPASVILGAHDLD

SEQ ID NO: 70814 - protein, 770 aa, Enterobacter aerogenes; identical to SEQ ID NO: 64882

SEQ ID NO: 70815 - protein, 649 aa, Enterobacter aerogenes; identical to SEQ ID NO: 64883

SEQ ID NO: 70816 - protein, 769 aa, Enterobacter cloacae; identical to SEQ ID NO: 66294

SEQ ID NO: 70817 - protein, 649 aa, Enterobacter cloacae
MTNSSALDDNDRDAGVVEEICGYLTDIPPRNYFLFAGAGSGKTRTLVEVLRRLTGVTEHEKGGQLARSLKMYGRSIRVVTYTKNAVSVINRRLGDNNLVSVSTIHSFCWELINGFNDDIRESLIAVKEAQLAKETAEAQAKPRGITAAKQRDLDEITNEIEVLRTTEVFKYHPDRNTYGPGALPHNYVLDATAWLLQNKPTLQSILKDRHPIILIDESQDTMKGVLDSLMVLAKKSERDLTLGLLGDHRQRIYMDGHADLPSIVPESWATPELQMNHRSQRRIVTLINKIWETELEGRTQPTKGSAQHPRTEKAGGTVRLFLGDTSRSPEDKVLSERWCAERMFEISGLADWNQGQYQLLALEHKLVATRGSFLDVYEAMVLLDPNAAAPSGSGDNKGPSTVQILLNELAHLEACVSDEGIVNEFKATEVFRRYGGLDNMPEDSESRVERTDEMLEAIAIFAMACANSESTIAEVLAPVLSANLFEVDHRLLEAYVDKSPAPQAPGRGEDESKQTRMRRGWCALFASPWKQLKCYRNYLAGISELATHQVVKGSEFNHVMVVMDDALAGGTLIKYDKIFGGTQLSPTDKKNAEAGKETTIDRTLRLLYVTCSRAQESLALVLWSSDPAAAMARIEESMWFTKDEIQVIP

SEQ ID NO: 70818 - protein, 594 aa, Enterobacter cloacae; identical to SEQ ID NO: 66680

SEQ ID NO: 70819 - protein, 593 aa, Enterobacter cloacae; identical to SEQ ID NO: 64657

SEQ ID NO: 70820 - protein, 565 aa, Vibrio harveyi
MYIKKVTINNYRSFRFFEAQLQQLTVVIGENDTGKTNFFTALSLPLSGNQIDFNQKRLSVSDINKDAVIDFLKSVVDDEAEENQLTKIPKVSVTVEFADPKDAYETALLAKWIVADGDEETYKIRYDFKPKDDKDLLEVVKKSLAGKTVDDINWFTLPVELYDYQVVSVNNEKPIAYSDLKHVSIHSINAERDDFSESSSMKSNSIFTKLLMNTLDDDDKGQINTAYSEFFSAIEKTETFDKVIGTNDDFKNYDSIIKQLECTPNLPNLKNILSNITLKYGNEFLYQKGLGQRNLIYILILFAYYKSCGDTFNLCCIEEPEAHLSVNNLRLVRDFIEKSSSNSGSLVQTIISTHNPSIINKLKISNVLAFTGEKAISLSDTPPKLVDYLRKRPNFDILKLLFANKVILVEGPTEEMLISTYLSKQPALNDIDIIPIGQRGYATFLDIWLNLNKDNQNKKIGVVRDYDNSDAAKAKHDAYDTANTNVTVRTTTNYTLEIDLVEAEDNLALLNGLFGMEGDLAAVSDHMINGKTARMLDVCDAMVDEENPLDIKLPAHIAEVIEAVS

SEQ ID NO: 70821 - protein, 456 aa, Vibrio harveyi
MIEVQIAGAGAGKTYGLAKTLIDHIKACTSHKKTFALTYTNSATTKIEQEIIKQHGFIPSNLCIQTVHSFLLNEIIYPFSSFTLGDVYNDTSIMISNPKYKNALFARLKKINVIHTDNVYNIAKQIVDETTSKHNNRAKKAKVRRLLAILGSCFDKIFIDEVQDLDKDALRFFDVLGCNDIDVYMIGDPKQAIKFPQDLDAFVQKVAPKEYATILPINNQTRRVPTEILAVSNSFCYEDQQQESLSEMVGELMYIESTDGRYDELLTNYLDTKQLVCIDKKNGRYTTSSKHKHAFPREIEEMIRDSNHKKDKALFVKAAFSDFMDDVAEVGARTAINRLKASHGLTLNGQHFAQLYELCNSCTGNDVQFKVQSIESIKGLDADVCVIILSSNTLKYLTQNGISEASRFNKEWKKVYVALTRAKKRLVLALDHELLAKEDMAAVRDSVGALGFIPHD

SEQ ID NO: 70822 - protein, 703 aa, Vibrio alginolyticus
MHIKSLEITNFRKFRDKSNTITFVEPTSKTDDESMISSSTTLVVGKNNSGKTTVTQALNMVVSEQGKINGHDFNYSYIDGLLNDYLEGRFNRFPNISFKITFITNPKEASLVNSKKAISLGQTTNKNKDVDSVSEFSLVVDFQLNNKIKFEEDVKELLDKFLTKDRSFKFRKLLDLISEFKFEKFVRSDEGVAKSINISSLIELKVISAANNIHDNRLLSKAFNKIIKYKYQTDKNDFEEVNDLIENNNNGITTNIRETHESVIQNVLQGIVGTDSLGIDLRADLTFDKLMDGLITYEHKDAGFLVPEGQFGLGYANLISIVSEIIDYIERNPSGEKTTKVRLICIEEPETFMHPQMQVNFIRHIDNAVRKIIGEGEKIKSQLLITTHSSHILNSKIHSSSSLDNINYIYPHKSFCESISIKDEDISIKSGNKDEFYFVKKHIKHQVPELFFADGVVFVEGITEERLLNFYIERDEKLSKKLISVFRVDGAHAKVYDKLMKQLKIPSLIITDIDFKRSKEELTQSAETKDGNLVSWNIYPQMTEILDSRMSTNKTLSYYYDSSKVKDYNHYYESSNIKVVFQKDPVKIKLDEEHTAAYYATSLEEALVLENYDNEIFRGVINSTVPSVYSDVVLEDTCEYLDLAHNSFRIQKELSSAKSKFANNIIYELVVNEDSTSLPVLPSYINDGLQWLSLRLDGQPEGV

SEQ ID NO: 70823 - protein, 693 aa, Vibrio alginolyticus
MVDRVLLEKEAKIQQLIFDQLDEKKSFYFLAGAGSGKTYALVETLKYSIKKNMRDFDKNGSHLACITYTNAAKDEIIERLYNSNYIDVSTIHSFLWDIIESYQVELIKVHRKNIINIINKLHYELYVCDEFGKKNAFKKIRALNYEETLDLETIVVDRIDDIYNCFRAEGASKFWSELEGVIGSELLSKIQSSRGDVEKIMRNIIKISRLKYCTRMIDIDHPDYSYISYNEKGSREILHKNLIGHDTLIQYSLSMVKEYSLLLRVIIDTFPQIYIDEYQDTHSQVIKIMDMLISYGKDNNMPFFVGLFGDPVQSIYSNNESYNSINNEIDIIHKDINRRSCQNVVDIINKIRGNHQEIHQEPFNSNINGDVSLSYYGKDSVDEIPFIYNEIEQVKTSWGITEDNKLTCMVLRNKTIAQLCGFGNLYDLYSEIYSDKSSYLSYNQINDEALNKDVNKLGIFPLSVLNIAEPLFKINYDSSAPLSDVFSDESLDNHSLDEVATCLDYIRDKDYVSLGDALSDLLVQTFENTSLTSLYSDLSKGWMNNKRDKRDIGSIDDLITYLCSSISSSPSDSLRDNVKALLSMDLKEVFNWIRFVSGIEIDSKVNYITCHGSKGLEFDNVLAVIDDKFGKDLKNKPEKNKFSRLLSSGLHEKHEADLENTRNLLYVICSRAIENLKVILLKEGDGQGAISIE

SEQ ID NO: 70824 - protein, 591 aa, Enterobacter cloacae; identical to SEQ ID NO: 70522

SEQ ID NO: 70825 - protein, 632 aa, Enterobacter cloacae; identical to SEQ ID NO: 70523

SEQ ID NO: 70826 - protein, 798 aa, Enterobacter cloacae; identical to SEQ ID NO: 65816

SEQ ID NO: 70827 - protein, 622 aa, Enterobacter cloacae; identical to SEQ ID NO: 65817

SEQ ID NO: 70828 - protein, 689 aa, Burkholderia cepacia
MKLRHIKIKNFRLLSDVDLALEDLTTVVVGRNNSGKTSLSEVIRRLLADGNAQFQLEDFSSACYEGFRLAWEARSNDEHDDIVRALIPYIELRLTFLYDPNQPQLGPLSPFVIDLDPDCTEALVVVRYELKDGQLSQLFDGLPPTPLSAEARLTFFRTLHDRIPANYATRIWAEDPNDAGNQRQLPPNAVKGLVKTGFINAQRGLDDVTSRESDVLAKTVELLFATASSASADAADKQIADSLTEAVQGIQSQIDTNFGGQLKGLIPALKSFGYPGLGNQELHTETLLDVRKLLSNFTKVRYAGYSGVALPESYNGLGARNLIFILLQLAGFYKAYRAEATAPGVHLVFIEEPEAHLHPQMQEVFIRQLAKTAQLLVDSTEDKTPWPVQFVVSTHSSHVANEAGFESIRYFLGRDVPGAQPGVRQTMIKDLRRGLGGVSEPDKKFLHQYMTLTRCDLFFADKAILVEGLSERLLLPVLVGKLEEAESNFPKLSSQYVTTIEVGGAYAHLFFKLLHFLELRSLIITDLDAVEKSGGLACEVHKGTYSSNACLKAWFSDDDPFTLAGLLAKGEAEKIREGNRVAYQCAEAEGGPCGRTFEDAFILANRALFGLTGNTKEELEVAARSKAGEFKKSDFALRYAIEEKGWNAPKYLVDGVRWLAAGIEPDQADPALALAADAIVAKAEAAPHG

SEQ ID NO: 70829 - protein, 578 aa, Burkholderia cepacia
MADIQSPAELASQRALDAMFQCLDEGRSFRLEAGAGAGKTYSLIKALQYLIERNRHGFPKKNQQIACITFTNVARDEIAARTDKSPLVYCETNHAFCWSLISGFQKQLRSLVEAMPHWQERLAEVGGTLGARMVEYNLGHRSIREDRVSIHHDDVLPLTISLMEHLKFRRMVADRFPIILVDEYQDTDSDWVEAIKRLFLSNSDGPMFGFFGDHWQKIYGDGCGRLEHESVTEIGKEANFRSVKTIVDCLNRMRPELRQEVRDPDSVGQVSVFHTNGWEGQRRAGGHWAGDLPADVGHQALEQVKELLAQQGWDLAPGSTKILMLTHRLLATEQGYTNLPTVFRYNDAFTKKEHPHIAYLVDELEPACDAFAANRFGVMFEALGGTTPLLRSHADKAAWHIAMTRVLELRATGTVGDVIDYLLDQRKPRLPEAIEKRERELRDFDRTAGEEMPERLAEVERLRAVPYAEISALRAYLDGHSPFETKHGVKGAEFDNVLVVIGRGWNQYNFGEMLGLAAGQAIPAEREESFERNRNLFYVACSRPKRRLALLFTQLLSPVAMGTLEQWFSPESIHAIVL

SEQ ID NO: 70830 - protein, 741 aa, Agrobacterium sp. D14
MKLKKLQIENFRSLKNLEVDLEEYLSIIVGKNNVGKTSLLVALERFLGSSQSSFDFEDFNLDFRQHVAALAESKIQPDDPYPFCGIRLRVFIEYSDDDDLGNVGNKVIMDLDPDNKWIVLDFLYHLSSEYLEILRRDFKAHQDRKKDKAQDVLKFLRENHREYFKVARRSVQFDHLDQKVQEDIFVDLIKESIRIDDIISFKRIAARRSVSNKETDKTLSTMSSRIYSAMSSDAGDEEVFDTFKEALSHTDVQLDTIYGKLFKEVIDDVRRFGGIKEGDTQLQIRSTLQHRELLEDNTTVMYGQGAELHVLPESYNGLGYLNLISMIFDIKIILNEFKRGNKPKPADINLLFIEEPEAHTHPQMQAVFIKNIKNLVGRSVSNADGIKCPLQTILSTHSAHIVAESDFDDIKYFKKSGGTTVAKGLRDLHAMYKVAGKDGHYTFLRQYLTLHRSQLFFADKAILVEGDTERILLPAMMRKIDQLDEATAFADTEIAPLPLMSQNISVIEVGAHSQIFEIFLDFIGVKTLIITDLDSAVERQRMKDGNLVTNKKGQPVIDIVAHPVEGGTHTTNAALRFFFGVGSALTYFLELALEHKTVKKKPDAVWAADPAGEIMCAYQVTETNAENETYCARSFEDAFFHVNRAFMTSASAVADDDDPPKFPSLKQGALAEFIGGGKPDVMADNGIDKKPSFAIEILLNSETTKLTKTDKGGQARDFTLEFSNWNIPKYIHEGLRWIKAG

SEQ ID NO: 70831 - protein, 623 aa, Agrobacterium sp. D14
MDQGGLKLEPEVERVLKHVADGKNFLLSGGAGSGKTYSLVQVIGELLRTQPSASIACITYTNAAVREIESRVADERLAVSTIHDFLWAAIGPFQAELRLVLIDLMTGDSPRIKPGSIAVSDGMYDGKPIEYKEFRILAEGIISHDEVITLAHGVFEKYPKIREILRDRYRYILVDEYQDTSPDVVKILLDFLPLAHRKGVCGFFGDSMQSIYDEGVGSIKDYVAVASVMEVQKVQNRRNPRLVFELANRLRSDGIVQKESDDENAPNMHDGAVKDGSIRFYYAADGGDKLDAVRKTLGWDFNEVAGTKELNLTHNLIAPQAGFGDLMEIYDKDGVLKFRDRLLDHIKGNDDLTKYDADTFGEVMAKFPGVAPTPGMRDFIDAHPDWLTDAKSCNFLVFRRMYVDKDQLVDDKKQTEEEAARKGSQRCPFIKHIFKILDVVHLYNQRKFNEFLRRTEFKLGSAKDKVQLRECINEIGAMSDRPIIEVIDYAEKHGLVRKDDALTNFVTRKPYLFNRVSPIKCSSYLALYEYLEGRTTYSTQHKIKGREFDRVLVVLDSGGWNKYNFTYLFEGGGTASVRERTEKLFYVCCTRSKDSLAVYFRDPSLKVIARAKEWFGDGNVIAV

SEQ ID NO: 70832 - protein, 689 aa, Burkholderia territorii
MKLRHIKIKNFRLLSDVDLALEDLTTVVVGRNNSGKTSLSEVIRRLLADGTAQFQLEDFSSACYEGFRLAWEARSNDEHDDIVRVLIPYIELRLTFLYDPNQPQLGPLSPFVIDLDPDCTEALVVVRYELKDGQLSQLFDGLPPTPLSAEARLTFFRTLRDRIPANYATRIWAEDPNDAGNQRQLPPNAVKGLVKTGFINAQRGLDDVTSRESDVLAKTVELLFATASSASADAADKQIADSLTEAVQGIQSQIDTNFGGQLKGLIPALKSFGYPGLGNQELHTETLLDVRKLLSNFTKVRYAGYSGVALPESYNGLGARNLIFILLQLAGFYKAYRAEATAPGVHLVFIEEPEAHLHPQMQEVFIRQLAKTAQLLVDSTEDKTPWPVQFVVSTHSSHVANEAGFESIRYFLGRDVPGAQPGVRQTMIKDLRRGLGGVSEPDKKFLHQYMTLTRCDLFFADKAILVEGLSERLLLPVLVGKLEEAEPNFPKLSSQYVTTIEVGGAYAHLFFKLLHFLELRSLIITDLDAVEKSGGSACEVHKGTYSSNACLKAWFSDDDPFTLAGLLEKGEAEKIKEGNRVAYQCAEAEGGPCGRTFEDAFILANRALFGLMGNTKEELEVAARSKAGEFKKSDFALRYAIEEKGWNAPKYLVDGVRWLAAGIEPDQADPALALAADAIVAKAEAAPHG

SEQ ID NO: 70833 - protein, 578 aa, Burkholderia territorii
MADIQSPAELASQRALDAMFQCLDEGRSFRLEAGAGAGKTYSLIKALQYLIERNRHGFPKKNQQIACITFTNVARDEIAARTDKSPLVYCETNHAFCWSLISGFQKQLRSLVEAMPHWQERLAEVGGTLGARMVEYNLGHRSIREDRVSIHHDDVLPLTISLMEHLKFRRMVADRFPIILVDEYQDTDSDWVEAIKRLFLSNSDGPLFGFFGDHWQKIYGDGCGRLEHESVTEIGKETNFRSVKTIVDCLNRMRPELRQEVRDPDSVGHVSVFHTNDWEGQRRAGGHWAGDLPADVGHQALEHVKELLAQQGWDLAPGSTKILMLTHRLLATEQGYTSLPTVFRYNDAFTKKEHPHIAYLVDELEPACDAFAANRFGLMFDALGGMTPLLRSHADKAAWHNAMTRVLELRATGTVGDVIDHLLDQRKPRLPEAIEKRERELRDFDRTAGEEMPERLAEVERLRAVPYAEISALRAYLDGHSPFETKHGVKGAEFDNVLVVIGRGWNQYNFGEMLGLAAGQAIPAAREESFERNRNLFYVACSRPKRRLALLFTQLLSPVAMGTLEQWFLPESIHAIVL

SEQ ID NO: 70834 - protein, 689 aa, Burkholderia ubonensis
MKLRHIQIKNFRLLSDVDLALEDLTTVVVGRNNSGKTSLSEVIRRLLADGTAQFQLEDFSSACYERFRLAWEARSNDEHDDIVRALIPYIELRLTFLYDPNQPQLGPLSPFVIDLDPDCTEALVVVRYELKDGQLSQLFDGLPPTPLSAEARLTFFRTLRDRIPANYATRIWAEDPNDAGNQRQLPPNAVKGLVKTGFINAQRGLDDVTSRESDVLAKTVELLFATASSASADAADKQIADSLTEAVQGIQSQIDTNFGGQLKGLIPALKSFGYPGLGNQELHTETLLDVRKLLSNFTKVRYAGYSGVALPESYNGLGARNLIFILLQLAGFYKAYRAEATAPGVHLVFIEEPEAHLHPQMQEVFIRQLAKTAQLLVDSTEDKTPWPVQFVVSTHSSHVANEAGFESIRYFLGRDVPGAQPGVRQTMIKDLRRGLGGVSEPDKKFLHQYMTLTRCDLFFADKAILVEGLSERLLLPVLVGKLEEAEPNFPKLSSQYVTTIEVGGAYAHLFFKLLHFLELRSLIITDLDAVEKAGGSACEVHKGTYSSNACLKAWFSDDDPFTLAGLLAKGEAEKIREGNRVAYQCAEAEGGPCGRTFEDAFILANRALFGLTGNTKEELEVAARSKAGEFKKSDFALRYAIEEKGWNAPKYLVDGVRWLAAGIEPDQADPALALAADAIVAKAEAAPHG

SEQ ID NO: 70835 - protein, 578 aa, Burkholderia ubonensis
MADIQSPAELASQRALDAMFQCLDEGRSFRLEAGAGAGKTYSLIKALQYLIERNRHCFPKKNQQIACITFTNVAKDEIAARTDKSPLVYCDTNHAFCWSLISGFQKQLRSLVEAMPHWQERLAEVGGTLGARMVEYNLGHRAIREDCVSIHHDDVLPLTISLMEHLKFRRMVADRFPIILVDEYQDTDSDWVDAIKRLFLSNSDGPLFGFFGDHWQKIYGDGCGRLEHESVTGIGKEANFRSVKTIVDCLNRMRPELRQEVRDPDSVGHVSVFHTNDWEGQRRAGGHWAGDLPADVGHQALEHVKELLAQQGWDLAPGSTKILMLTHRLLATEQGYTSLPTVFRYNDAFTKKEHPHIAYLVDELEPACDAFVANRFGVMFEALGGTTPLLRSHADKAAWHNAMTRVLELRATGTVGDVIDHLLDQRKPRLPEAIEKRERELRDFDRTAGEEMPERLAEVERLRAVPYAEISALRAYLDGHSPFETKHGVKGAEFDNVLVVIGRGWNQYNFGEMLGLAASQAIPAARVESFERNRNLFYVACSRPKRRLALLFTQLLSPVAMGTLEQWFSPESIHAIVL

SEQ ID NO: 70836 - protein, 713 aa, Burkholderia ubonensis
MHISKLTLVNYRNFANATLRFSKGVNTIIGENGAGKTNVLRAIRLMLDDNMVRASYKLNELDFHRGLGSWRGHWIIISVEFEEISADEAIQALFIHGTGVGQAGGAVRRATYNLIFRPNKQIRMNLAALADFDAAGMNAILDRITIDDYETLFTGKSVADFADPAVYRRIVGDFGNAVFSNEVEFPELGSRIPGTLSVTKEVSFTFIQALRDVVSEFHNNRTNPLLTLLKSKSGQIDPVQFQPIVDRARQLNREIENLNDVRTVRSDIAETIHGAAGQTYSPSLLAIKSDLPDEADLLFQSLKLFVGEFDAAHEGNIQELSLGGANLIFLTLKLLEFKYQHERQVLANFLLIEEPEAHLHTHVQKTLFDRIGYAGAQIIYSTHSTHISEVSNVQSVNILGRNGIACEAYQPSAGLAPDQVGNLQRYLDAVRSNLLFAKSVLLVEGDAEEILIPLMVKKALGVSLDELGVSLVNIGSTGFANVSVLFHETRVRRRCSIITDLDAAFMNPYPLPGDDPETLKFKSKLLASQTSGAARKVVLDAQAAGNAWLRPFYAANTFEVDFVACGNTETVVASVNDVYTQPATRAQSIAELNSGDPAQFGRRVLTMADYEGKGWFAILLGKRIDHRIVVPPYIRQAIIFAHGTFSTELLFSILKYRVTVNNPGGGTTPPALQRYWERLLEYRAGLVDFNTIKAEAAVGLPGDQILAFLGDLP

SEQ ID NO: 70837 - protein, 600 aa, Burkholderia ubonensis
MTFAWTRTELNDEQSEAVREESSVFLVACPGSGKTRTLTYKIAYELSRLQSKRQFIVALTYTHRAADEIHERIEGLGVDTSQLWIGTIHSFCMEWILKPYSIYEPALARGFRIMDSHEQEKLLEELCRMQPGITHWDCEYYFTDQGYVLACRDQSKHERLHAIFALYFRHLADNRQIDFEQILFYASRLIQSQPQIARVLANIFSWMLIDEYQDTKRIQYAVVAAIVRAGAERTKLFVVGDPNQAIFGSLGGFAMPVAELRQLCGIRLEERALSENYRSTDRLIRYFSNFAVQATGIRGAASDRAFPSSISYNTYVERDQLEAELVRLIRLSTAQGFAADQICVLAPWWILLAGVTRRLAGALPEYQFDGPGMVPFSRDQENFWYRLSRIALTEASPAQHVRRLRWAAEVIRDLGNAGIDTRELSAKRLLRESNSILLNQPDGLLYLKEFFTSLMACLRIDWESHPLLLEHHQAFFVSSAARIDRLRREGAAYIGGIDFFRKVFQHRSGITVNTIHGVKGAEFDVVIAFGLLQGMVPHFSEEAEADGGINSAKKLLYVVGSRARKHLHLISERQRIRGGGRGPYAATDTLAACVFDYDVV

SEQ ID NO: 70838 - protein, 587 aa, Burkholderia ubonensis
MYLKTLRIQGFRRFDDLSLNFRDGLNIIVGPNNAGKTAVVDALRVLLAASDEGNLRLTELDLHEKPGGLTSSNATFTFLFSDLSEQNEADFMTALIPVKDDEGKITGYDARFSVQYTQAEPGGRLRLRRWVGLHEENVMTTEMLEELRAIYLQPLRDPEQGLKPGRLSQLSKLVQNMMPEKGAREALVQKLVEIDEELAKNEPILSTNSAITNKHKAMLGAVLAQTLSLDLTASDFNRFAARVGMVVGGRDVEQNGLGFNNLIYMAVVLSELAFNKKASFCGLLVEEPEAHLHPQLQAVLLDYLKTVEKPAEGERPVQVFVTSHSPNFAALADIDSICCVYDSPTGPVAFTPRDVAFGKGKKEKLQQYLNVTRAELFFARRIVFVEGSAELFLVDALARRAGYDLRKHSISLISTDGLNFDAFLPLFGEKAMQIPVAVVTDADPPAPEHYPAAKDALSLSAAATVISASQDNYVKCFFAQKTLEYDLAFDAGRRTLMIDALTEMHPEIGADLKVDVNAAVSDHEKARVLFAGMFDRPTGKANVMKGRFAQTLAYRISQSNDTIELPAYLRSALDFVTDAAAKGPRHV

SEQ ID NO: 70839 - protein, 598 aa, Burkholderia ubonensis
MPLRRGHVMSNFEPTLEQQAIIAAELKSLAVIACPGSGKTATAVRRLAEVRRRLDETGSRSHVALLSFSNVAVDTFRNEYRQLRGHDGDFDRVVIQTMDSFITSFILRPHGTRAMGCSRTPYLVLGGEPFLASYRFGTDPQKLIGIDELALDLADGKVTIHRRFKSGGSKRLEVKDTELAKDVIRKLGVTGGYTYATGRLWARHLLKKEPRLTRALARRFSHILVDEAQDIGRFEGALLDLLSEAGCTISLIGDYHQSIYGFNFATGEYLRTFAARVDVLELPLTQNRRSLESIVQAANSLAGTVSKPFRTPPERPNGTFFWKYDPQELPLLMSAWVTALNASRYSIDEAAVLCRGNGLLAKLAAASSEVGQSAVKHFATAAIEREQATDISKVLDHCAKGVMTILSGLPHSFIADLKSMRGDTHVQTLRRLVWTLIRKPTTGIPLATLPARTGWLKQLKVNLEVWLNLVEQTTPFRRQPTWTSRVTAKELPQTGPLIAADIGQNDWSALRCGTVHSAKGEGLSAVMYLTDWDDLKALVNGTGGEEGRIGFVAVTRARDLFVVAIPESTSIDMIERIKAHGFAESDPAKLTVAGTQSI

SEQ ID NO: 70840 - protein, 713 aa, Burkholderia ubonensis; identical to SEQ ID NO: 70836

SEQ ID NO: 70841 - protein, 600 aa, Burkholderia ubonensis; identical to SEQ ID NO: 70837

SEQ ID NO: 70842 - protein, 587 aa, Burkholderia ubonensis; identical to SEQ ID NO: 70838

SEQ ID NO: 70843 - protein, 598 aa, Burkholderia ubonensis; identical to SEQ ID NO: 70839

SEQ ID NO: 70844 - protein, 713 aa, Burkholderia ubonensis; identical to SEQ ID NO: 70836

SEQ ID NO: 70845 - protein, 600 aa, Burkholderia ubonensis; identical to SEQ ID NO: 70837

SEQ ID NO: 70846 - protein, 587 aa, Burkholderia ubonensis; identical to SEQ ID NO: 70838

SEQ ID NO: 70847 - protein, 598 aa, Burkholderia ubonensis; identical to SEQ ID NO: 70839

SEQ ID NO: 70848 - protein, 777 aa, Burkholderia anthina; identical to SEQ ID NO: 69084

SEQ ID NO: 70849 - protein, 651 aa, Burkholderia anthina; identical to SEQ ID NO: 69085

SEQ ID NO: 70850 - protein, 599 aa, Burkholderia ubonensis
MRISRITVENYANFENVDFATDDSLVIVGENKAGKSNLLRALRLVLDPMLPDRDRQLGLEHFWDGLGDAKLGATVRVVVEFTDFEDNDNLLTVLGGSLVDTKTPVVARLTYLYRPKAALEGAAPQTLADYEFLVFGGTNEDNVFTAARRRELPMDYLFALRDAEGDLLNWRRSPLRPIIEELTASLDEKAREELQQLVSNAQSTLAQRPEVSAAAGKVYDRLVEMVGDEHAVSLTLGATPTNVDVLLRGLRLLIDGGARGIGDASLGTANLLFLTLKGLELERAVEAGERSHTFLAIEEPEAHLHPHVQRLVYRHYLGEEDDAPQNVTTILTTHSPHIASVAPLRSIILLREDAEGGSTSITSAAEVELLPDEEDDLQRYIDVTRGELFFARGIIFVEGDAERFLIPEFAAALDVDLDTLGVTVCSVASANFLPYVKLVGPDALNVPFVILTDLDPPDDGGAPLAFARVRDILALWMEQEDIDQYEEFDDLREDGEMNGIFVNDKTLEVELFQAGMGPAMAPILQKHANSWGPQRRAVMKGWIDDPTTLDEGKLLGWVGEVGKGRFAQALAGSATEAVCPEYIKKALTYVKNGFSPVES

SEQ ID NO: 70851 - protein, 599 aa, Burkholderia ubonensis
MASPQSSPKYLQAALQLRDDPGQWAAYESTGNCCVLAGPGSGKTKTLVTKLARVMAEDVQSPRGVACITFSNEAARELIRRLRQLGLEQSPRLFVGTVHSFCLLHLLLPFAQLAGLELPYPLKVATESEAASIYRAVADKLRGIGQPVRKEDVDRHRRVNLDRDSKAWTWNEEMTGLAEAYEQELRKQGLIDFEDIVHYGQRLVNEHDWVLKVIRAKFPVLAVDEYQDLGAALDRIVRRLTFDAGVRLIAVGDVDQSVYGFTGANSELLEELSKENDVETIRLKINYRSGTGIIEVAQRALGKDRGYESSEPERQASVQAHKCDKGLQHQAEYAVQTLVPAALAAKEGRQLGDIAVLYRNRNVGDAAAVEAVRAKYPFVRIDNAAPYRKVPLTSWVEDCAIWCAGGWKISSPPLHDLQGRWISFHGGLSDKQARDGAARLTRFLWNHRGDGAALDFVAALRAELLNVLIAVRPELADQTAHVEDMHKALEKGGVLVGTTKAQLGRRDGAPKQLNLLTLHSAKGTEYDVVIILGLDQGEFPSPNWADNTPERMEEARRLFYVGITRARNEVHLMYSGFRRDRFGRTWREGPSQFLDGLLP

SEQ ID NO: 70852 - protein, 766 aa, Burkholderia vietnamiensis; identical to SEQ ID NO: 70798

SEQ ID NO: 70853 - protein, 651 aa, Burkholderia vietnamiensis; identical to SEQ ID NO: 70799

SEQ ID NO: 70854 - protein, 689 aa, Burkholderia ubonensis; identical to SEQ ID NO: 70834

SEQ ID NO: 70855 - protein, 578 aa, Burkholderia ubonensis; identical to SEQ ID NO: 70835

SEQ ID NO: 70856 - protein, 606 aa, Burkholderia cepacia
MRISRVVIRNFRAFQHLDISLDNNISCVIGENNTGKSAFLHAIRLCIDANLPSTYRSLSMRDISTAIDIGKPSEVLIGLEITDYAGKVNEEALAGAWSVESNRARLIYRFRPRPSIRERLAAADPTLGKLVLSDYQWELQGGGDAEINLAKIEWDEDVGFGIRFSDLQAFQVVFLPALRDVESDLRQPRSSPFVKLIEASAITDAEKQKLVTALEKANGTISSSDTITKLARAVDKSFNEVAGPAFEMTIDVGLAEPTFQSVVRALRLLLSNDAVTDADPSSNGLGVNNVLYIAILIEYFKRRLQQENSAGQLILFEEPEAHLHPQLQLSLYAALEGLPFQTILTTHSTHITAQAGLNKFVALTNVGTGCSHSSVPSACDNLSDDDVADLERYLDATKSGLLFARKVILVEGPAELLLIPALVNQVLGRDLDREGITVIPIYGVHFDVYAKLFSKYGLPKKCAIIADGDLTPSDAAESGLSEEEAPFNAPDLSRLESKYVKVFANVTTFERAVTMYGNIEMFARTASSLGAVAVAAQLRRWREEWKMLEPGSDGAKELAERCRGKVLSTAKRYGKARFAQVAARNIATATSIPPYIREAVEWLSQP

SEQ ID NO: 70857 - protein, 417 aa, Burkholderia cepacia
MYERRQVDFASLLYHSLTLCLTYPEICDHLSARFAWILVDEFQDTTDLQVAIFEEVHRRGNTKFFLVGDLYQSIFGFAGAAPELAESFAERIGALRDFALSGNFRSAPAIIDDANAIFPRVPAMTAEGRHKGLDLQTDLVIASNPTHAVTDFFLPRIAELGIPPGESVVLANSWFKLMPIAKELRIRGIPVLGPGARPYRRQRLFATVAERICGHLCEPDFEALVGVERSLYDMILEVANRAPHRLFTYDGRRLIYQILSDAANARDRSTGGMEFLYLLAERVSAHLVAEGYICTHEAEALRESVEEMERDVRKNNIDPESLSIEEMGILARPKRAVKLLTFHAAKGREFSAVAMVDLNEGSIPFYQLRTEEEFAEAQRLFYVGLTRAQKYLMYAPDMRDYRNRPSRFVGAGFLGKQ

SEQ ID NO: 70858 - protein, 694 aa, Burkholderia cepacia
MRVEKVRVEGFRLLQDVEIMLEDNSTVIVGRNNSGKTSFTDIFDRFTGETGARFRLEDFSAAQRERFFTAKTLREQAAKPEDVLAALPTLSLTLTFRYDGTAPNLGPLAPFVIDLDVDSTTAIVRVEYRPVLAALHTLLDIPPAPKGVEPRTHFFRSLRDTLPKAYSIHVSAIDPTDDTNRRDFDGTAALSALLQCNFVRAQRTLDHAKHGDADVIGKLLSALFKTASAPTAATTDQELAAKLKASVEDIERNVQSDFDEMLKKLLPAMEVLGFPSLNDTELRPETSLNVEALLSDHTKVVYTGTDGVHLPEGYNGLGTRNLIYMLLQLESYHKAYRAKATRPASHLIFIEEPEAHLHPQMQEVFINQLNAAIGKLSASYPEEAAWNVQFVITTHSPHVANAASFEAVRYFLNEPPTQVNARQTKVKDFKKGMSSISSDDQDFLHQYMTLTKCDLYFADKAIMVEGTTERLLMPRLCELVDKSLDDKHKLARQYVTCVEVGGAYAHIFYPLLDFLELKTLVVTDLDSTKPVEKQNKKGTTITTWDKCPVADGQRTSNAAIKEWFRPKDTQDKDDWQITPAELVTKTAAKKQSGYRRIAFQIPEKPDTNVCARSYEDALVLANPDRFEWPKEQDEATEAWEIAKGLAKADTALRFAIREKAWTVPRYIQEGLAWLSEPPPPPMQNVEAPAKGAAV

SEQ ID NO: 70859 - protein, 577 aa, Burkholderia cepacia
MTEPTENPALIAAQEAQKKINEALDAGRSFRLEAGAGAGKTYSLVAALKRLIAERGPALVQAGQKVACITYTEVARNEIAQEIEDHPAILVDTIHGFSWAFLRQFQKALRDLVGEMDDRKEKVDQGGGISSKPVDYDLGFFGVDTDRITLSHDDIPEMMAKLLHKDKFRRILSQQFPVIFIDEYQDTHRQFMEAITEQFLKPATGPLIGFFGDHWQTIYRSEYELADYPIEEIGKGSNFRSVPAVVDVLNRLRPELPQAVRDPDAKGEARFFHANAYKGERTNSSHSKEDLPPDLARNTREALMQRLQAEGWDLSKTKVLMLTHNVLAAEQGYPNIAEVFSGRTDQFAKKEDPALKFFAEIVEPMCAAYNTSRYGDMFRVFGSGPAITKHEDKAHWRRDMDTLQKLRTEGTIGQVIDHLKTTRRPSPPERLLRRDAELVALNGAPIPEDASALQRYSKLRDIPYKEVVEVVKFVEKQTPFATQHSVKGAEFENVLVVLGGGWNHYNWPQLLELLKTNALNAKNTKGFYRARNLFYVSISRPMTRLAVLATQTMPDAALAAVNHLFGSDNVEELAIAP

SEQ ID NO: 70860 - protein, 766 aa, Burkholderia vietnamiensis; identical to SEQ ID NO: 70798

SEQ ID NO: 70861 - protein, 651 aa, Burkholderia vietnamiensis; identical to SEQ ID NO: 70799

SEQ ID NO: 70862 - protein, 784 aa, Burkholderia ubonensis
MHIEFAEIANFRKLLSARVDLSLKTTLFVGANNSGKTSAMLALRRFLTPRRCPFDIHDFTLCHLPALVDIGEAWLQANLEGVVADLTLDPWVQALPALDLWLQVKEDEVHRVRDLVPLMDWTGGRLGVRLRYEPKDLKALFKEFITAVTEANAMRAAAVAAAAAKAAGAAPSPKLTVWPETLVDFLTKRLTSMFTIRAYPLDPALLVNPEKLRALPQSLPASALPIEGDPLSGLIKVHDIPAQRGFGEIPNGGEDEGELQTSAGGTRLSEQLRSYYAKHLDPAKGPDPTDLEALQAMEAAEDAFDLKLMESFNECFTEVAGLGYPGVSDPRPRVSTRLRAIDGLNHSAAVNFEVDVVSDAGAVTPILLLPEGSNGLGYQNLISMIFRLMSFRDAWMRVGKASKSSEAASIEPLHLVLVEEPEAHLHAQVQQVFIKKAYEVLRRRPELGESDALRTQLIVSTHSSHVAHETPFASLRYFRRLPAGMVAKVPVSTVVNLSQVFGEGTETERFVTRYLRAQHADLFFADAAILVEGPAERMLIPNFIRAHYKVLHQSYVTLLEIGGSHAHRLRPLIDHLGLLTLIVTDLDSLTATGGSSVQPALGAGQKTNNATLKTWVPALDDVDALIGATPAAKTITDAGDTLFAVRAAYQTPVEVTMPGSTAKETAYPYTFEDALVFENVAFFAAFAGPGLNAKFRTAIAKGGGATAVGASMYTALKDGKKAEFALDVLMADDFNNLKVPQYIAEGLEWLLKQMKQKQVEILTTTPATAVSVATTASPGPGAKP

SEQ ID NO: 70863 - protein, 639 aa, Burkholderia ubonensis
MTAADDQFDAEADATIIACLDLCKPRSFFLYAGAGSGKTRSLVSAVRKTINGEHGRQLTLTGKKVGVITYTNAACDEIKQRLEFDPRVEVMTIHAFSWSLIEGFNADIRQWVAKNLEEEIAELEEQHKKGRPNTKAGVERLRSMESKRRRLARLDSIVKFIYSPTSDNRTRDSLNHSEVIAMTAAFLTSKPGLRRMLVSRCPVLLIDESQDTNKALMDAFLHLEEEFHGRFSLGLFGDMMQRIYSDGKERLDKAIPARWAMPRKRMNHRCPSRVVEVINSIRHDVDGVEQVPRSDAEKGVVRVFIAPQAGADPFAIEAAVRQRMATIAGDPAWQNSDTVKTLALEHLMSARRFGFAEFFEPLWAIDNLRTSLLQGAGAGLGFFIRDVLPLVKALRANDRFGATAIIKASSPLLDRAALQEAGSNQVAQLGKAKAACDGLLALITEQPEINAQTVLEFVAQTGLFSIPDTLAPFVSGDAKAVAAEDNAGQGDQVERTEDGEAEDTSPELSAWSKALEAPLSQIERYDLYARGQSQFGTHQGVKGLEFPRVLVVINDDEARGFLFAYDKFFGTKEKSKADLENEAAGRETGSDRTRRLFYVTCSRAEKSLAIVYYSPDPALARSAILQYGWFEQDEVELIN

SEQ ID NO: 70864 - protein, 689 aa, Burkholderia ubonensis; identical to SEQ ID NO: 70834

SEQ ID NO: 70865 - protein, 578 aa, Burkholderia ubonensis; identical to SEQ ID NO: 70835

SEQ ID NO: 70866 - protein, 689 aa, Burkholderia territorii
MKLRHIKIKNFRLLSDVDLALEDLTTVVVGRNNSGKTSLSEVIRRLLADGTAQFQLEDFSSACYEGFRLAWEARSNDEHDDIVRALIPYIELRLTFLYDPNQPQLGPLSPFVIDLDPDCTEALVVVRYELKDGQLSQLFDGLPPTPLSAEARLTFFRTLRDRIPANYATRIWAEDPNDAGNQRQLPPNAVKGLVKTGFINAQRGLDDVTSRESDVLAKTVELLFATASSASADAADKQIADSLTEAVQGIQSQIDTNFGGQLKGLIPALKSFGYPGLGNQELHTETLLDVRKLLSNFTKVRYAGYSGVALPESYNGLGARNLIFILLQLAGFYKAYRAEATAPGVHLVFIEEPEAHLHPQMQEVFIRQLAKTAQLLVDSTEDKTPWPVQFVVSTHSSHVANEAGFESIRYFLGRDVPGAQPGVRQTMIKDLRRGLGGVSEPDKKFLHQYMTLTRCDLFFADKAILVEGLSERLLLPVLVGKLEEAEPNFPKLSSQYVTTIEVGGAYAHLFFKLLHFLELRSLIITDLDAVEKSGGSACEVHKGTYSSNACLKAWFSDDDPFTLAGLLEKGEAEKIKEGNRVAYQCAEAEGGPCGRTFEDAFILANRALFGLMGNTKEELEVAARSKAGEFKKSDFALRYAIEEKGWNAPKYLVDGVRWLAAGIEPDQADPALALAADAIVAKAEAAPHG

SEQ ID NO: 70867 - protein, 578 aa, Burkholderia territorii
MADIQSPAELASQRALDAMFQCLDEGRSFRLEAGAGAGKTYSLIKALQYLIERNRHGFPKKNQQIACITFTNVARDEIAARTDKSPLVYCETNHAFCWSLISGFQKQLRSLVEAMPHWQERLAEVGGTLGARMVEYNLGHRSIREDRVSIHHDDVLPLTISLMEHLKFRRMVADRFPIILVDEYQDTDSDWVEAIKRLFLSNSDGPLFGFFGDHWQKIYGDGCGRLEHESVTEIGKEANFRSVKTIVDCLNRMRPELRQEVRDPDSVGHVSVFHTNDWAGQRRAGGHWAGDLPADVGHQALEHVKELLAQQGWDLAPGSTKILMLTHRLLATEQGYTSLPTVFRYNDAFTKKEHPHIAYLVDELEPACDAFAANRFGLMFDALGGMTPLLRSHADKAAWHNAMTRVLELRATGTVGDVIDHLLDQRKPRLPEAIEKRERELRDFDRTAGEEMPERLAEVERLRAVPYAEISALRAYLDGHSPFETKHGVKGAEFDNVLVVIGRGWNQYNFGEMLGLAAGQAIPAAREESFERNRNLFYVACSRPKRRLALLFTQLLSPVAMGTLEQWFLPESIHAIVL

SEQ ID NO: 70868 - protein, 648 aa, Burkholderia multivorans
MKLARLRLCNFRSFGSDFAEIELDDMTFLLGPNGTGKTVVLQALACMFSLDPSQRKVSRSDFHIPVDEAPENAPDERKLWIEADFEFPELDEDDAGEHELPAVPGNFAHMQLLAEDGPVQVRFRLEATIDQDGDIEESFTYVTKVGEDGSPLEESRVSKQDRNAIQVHYLPARRDPADHISYSANALLGRALRSADWSTEREQISVLTGQISESLTGNAAIGGIAQALTSQWSDLHKGAYYASPSVSFARNEIENLLRHLTVRFSPGHGESIVDFSRLSDGQQSLLYVSLVLAMHSIGSKVLSGELGTAFDIDKLRPAVFTLIAIEEPENSLSPHYLGRVVRALTAFAGDQNAQALVATHSPALLRRVPPESVRYLRLDENRKTIVKRIELPEDESAQKFVREGVQAFPELYFSRLVVLGEGDSEEIVLPRLLAARGILVDDASVSVVPLGGRHVNHFWRLLHGLGIPHVTLLDLDLARYQGGWGRIRYAANQLLKYADVSGNDLTQEEIDGIPKWNDDQGILIDDDGWIERLENFGVFFSAPLDLDFLMMTTYPDAYLIEAGDLEKPDEETIKSVLGKKHDVLGGQYSEEEQSYFDAYHAKFKLGSKPTWHIRAMSSMDDQELVDEMPEVLERMFDRVEAALEDLPE

SEQ ID NO: 70869 - protein, 553 aa, Burkholderia multivorans; identical to SEQ ID NO: 63587

SEQ ID NO: 70870 - protein, 689 aa, Burkholderia territorii; identical to SEQ ID NO: 70832

SEQ ID NO: 70871 - protein, 578 aa, Burkholderia territorii; identical to SEQ ID NO: 70833

SEQ ID NO: 70872 - protein, 587 aa, Burkholderia ubonensis; identical to SEQ ID NO: 70838

SEQ ID NO: 70873 - protein, 598 aa, Burkholderia ubonensis
MPLRRGHVMSNFEPTLEQQAIIAAELKSLAVIACPGSGKTATAVRRLAEVRRRLDETGSRSHVALLSFSNVAVDTFRNEYRQLRGHDGDFDRVVIQTMDSFITSFILRPHGTRAMGCSRTPYLVLGGEPFLASYRFGTDPQKLIGIDELALDLADGKVTIHRRFKSGGSKRLEVKDTELAKDVIRKLGVTGGYTYATGRLWARHLLKKEPRLTRALARRFSHILVDEAQDIGRFEGALLDLLSEAGCTISLIGDYHQSIYGFNFATGEYLRTFAARVDVLELPLTQNRRSLESIVQAANSLAGTVSKPFRTPPERPNGTFFWKYDPQELPLLMSAWVTALNASRYSIDEAAVLCRGNGLLAKLAAASSEVGQSAVKHFATAAIEREQATDISKVLDHCAKGVMTILSGLPHSFIADLKSMRGDTHVQTLRRLVWTLIRKPTTGIPLATLPARTGWLKQLKVNLEVWLNLVEQTTPFRRQPTWTSRVTAKELPQTGPLIAADIGQNDWSALRCGTVHSAKGEGLSAVMYLTDRDDLKALVNGTGGEEGRIGFVAVTRARDLFVVAIPESTSIDMIERIKAHGFAESDPAKLTVAGTQSI

SEQ ID NO: 70874 - protein, 713 aa, Burkholderia ubonensis; identical to SEQ ID NO: 70836

SEQ ID NO: 70875 - protein, 600 aa, Burkholderia ubonensis; identical to SEQ ID NO: 70837

SEQ ID NO: 70876 - protein, 634 aa, Burkholderia cepacia
MKLQSIRLSGFLSFGPEPTELTFNDITYLIGPNGSGKTAALRALCRLFAFDPSLRRIQRSDFHVPYDEDAVPDERQLWIEADFVFPELDEDCDNSTVAPHFSHMRLDTADGLPRVRYRLSAIMGVDGDIEETLVYVLDLNGDGSPLTTAQVPRAERNHVQVHYLPARRDPAEHIAYSTSALLGRMLRAVNWENEREEVKGFTDQISESLAANPSIAALSESLKATWGTLHKGSFFADPHITFVASEIEALLRHLSVSFSPGHDEELVDFSRLSDGQKSMLYLSLVLSAQSIGRAVLAGEDDSFDPDKLRPPVFTIVALEEPENSLSPHYLGRIVNALVAMTGNEDAQALIATHAPSMLRRVDPQHIRYLRLTDERTTKITRIRMPKKTDEAHKFVREAVQAYPEIYFSRLVILGEGDSEEIVLPRILRAKGVPVDESAVTVAPLGGRHVNHFWRLLSALEIPHLTLLDLDVARYQGGWGRFKYANDQLSKYRAKDVLPKHYGIPEWNSDENKVRKYPWYIEALEKRGVFFSFPMDLDFAMLLSYPDEYGVESNPPSEPTIKAVLGDSHHDAKQYNANELGLFGTYHKRFKLGSKPAAHIDALAQLSDEELLADMPESLSRLADAVIAKLKGLPE

SEQ ID NO: 70877 - protein, 554 aa, Burkholderia cepacia
MIAADTWHPADGLTLEPNAWRAAMETERCLALTAGPGAGKTEMLAQRADFLLRTGTCPYPKRILAISFKVDASKNLKERVKRRCGSDMAARFDSYTFHAFAKRIIDRFRPVLTGQDALDVDYRIGGQRVARRQIEFTDLVPLATQILRVSAVARRAVRQTYSDVFLDEFQDCTNHQYELVKIAFQRTAIRLTAVGDTKQKIMGWAGALDGIFQTFATDFGAVSLNMYRNFRSKPRLLRMQNEIIRVMDLSSVMPDEQLGGEEGHIFAWRFPDSQQEAEFVANAIDNWINHDKLVPSEIAILVARQPDLYADHLMAAMERRNIPFRNEQQIQDISVEPAARLIVDYLSCLYGQRAPKAWIRLMDQLIPFGDEDVQTNLRRNTQRFIAEQRKKAVLVESLGEPATDWWESVREFLRHVGIETLSALSPDYESKARLKEVIADTKVRIEELQKIEPDLPKALARFSDDQAVRILTIHKSKGLEFDSVVILGVENQTFWGNADAERCAFFVAVSRAKSRLVLTVSDRRQTPPSNPFRWQENRTTHSEFMAYATPFISL

SEQ ID NO: 70878 - protein, 755 aa, Burkholderia ubonensis
MKIKTIKIKNFRLLHDISLQLEDETTVVVGRNNCGKTSLSDIIRKFLSERSTFEIEDFSSACYDKFCAAHRAYLKGAGIEEVRALVPSIDLRLHVSFDPTVPEFGPLREFVIDTDDSCTEAVIVCSRSLADGRIADLFEGHEEIILHGHDELHSDGDRLALFRSLTDRVPTLFTTRMWAEDPQDPTNTRDVTPKAVTNLLSLGFVNAQRALDGTGARGTDVLAKVLESLFQSASVSTADGSQKNIADGLKKAVEDIQSGMDTDFKKEVAKLMPAIEYFGYPGLDNVPLQPETKLEVGKLLSDFTKVQYASYSGVQLPESYNGLGYRNLLYILLKIVGFFREYRAHANAPGVQLIVIEEPEAHLHPQMQEVFIRQLPEIVKKLCALEGENVSWPVQFIVSTHSPHVANEARFDTIRYFAVTSTDLPVGVRCTQVKDLSSDLAGLKGPASDFLHQYLTLTRCDLFFADKAVLIEGTTERLMLPQVMRALDAVDPSLKLGSQYITIMEVGGAYAQLFIPLLKFLGLRSLIITDLDAVKRNAKKKLEACLVHEGETTSNSCIKHWFNTVEATAPVPEAPADKQTTTPDPVPQAASTAPASATAEVAVAETADDEEEVPDGATLFPLSTALAADNAAKTRGSLRLAYQVPEASDGPCGRTFEDAFILANQTFFGITGATNDALAKAAQDKAAKQKKSKFALTYAIERTDWVTPRYIEEGMRWLAASNVVVANPSVALAAEAQAINAINIPTNTPTSGEAT

SEQ ID NO: 70879 - protein, 579 aa, Burkholderia ubonensis
MSGATHPNPAEAAAAAAWEALKGCLDDGSSFVFEAGAGAGKTYSLIAALRYILKDQSRELQRTHRQVACVTYTNVARDTIIAQTDGDPAIYCDTTHAFAWMLVSPFQKWLRELVRTLPGWADRIEELDAANITAVGYTLGRRSIEDGTANLHHDDIFPVFIKLMQFAKFRNAVASRFPLILVDEYQDTNVELVECIKDHFIGKPHAPQFGFFGDHWQKIYGDGCGSIAHDALKRIDKKANFRSAKPIVDSLNLIRPKLAQAVKDPAAPGEVHVFHTNGWGGRRLTANHWQGSLPAAEATRALNNVRSALESVGWDFAGDTKVLMLTHRALATEMGYSSMRTVFAFNDSFTRKANEVIAYFHEHLEPAARAYLTKRFGKMFEAIDAERPVMNGPADKARWSDTMRRLCELRDTGTVGDVLAYLSSTGLPILSDAVVRQEKALADALANGEPLTGRVKELHALHAVSYQEIIALCKYLDGHSPFETKHGVKGDQFENVLVVFGRGWNDYDFNLYLKMAGNPGLIGARTADYERYRNLFYVAVSRPKRRLALVFTHLLEPGAMATLSGWFAGHPIRDIGPAL

SEQ ID NO: 70880 - protein, 623 aa, Burkholderia cepacia; identical to SEQ ID NO: 70808

SEQ ID NO: 70881 - protein, 608 aa, Burkholderia cepacia; identical to SEQ ID NO: 70809

SEQ ID NO: 70882 - protein, 630 aa, Burkholderia cenocepacia
MQVARIHIENFRGVKDTTLEFTKHAVLLGDNNTGKTTVLEALDLVLGPDRLNRTPPIDEHDFYHGRYAAKFNKSALKDQDEGEQKKPATENGGAGEQESDAGEGPPAEDQALQIRVDVTIIDLSEEQHNRFGDYIEFWDNKGKDLYQEAAPEGVDADTVSSALRVTFIGEYDPEEDDFDGRTFFTLTLVDGGKPQTFSRKDKQVCGFLYLRSIRTGSRALSLEHGSLLDIILRLKEVRPQMWEDAIGKLSAFSVAEDPSLGISGILESINNALKKYVPKEWGIEPHLKVSNLTREHLRKMITAFIATGDGAHAAPYYRQGTGTINMLVLAMLSQIAEDKQNVIFAMEEPETAIPPYAQKRIIHEVRNLASQALFTSHSPYVLEEFSLDETIILSRDFAGTMKQSRVSLPESVKLKRYRQEFRTRFCEGLLARRVLVAEGATEASAFPVACRRLAELDPTKYASLEALGVCVVDAGGEGSIPDMAKLYKEIGKRTFALCDLQDAAAQAQIQAQVEHMYMHSEKGIENLILKHTPQAAMERFCDLLQWPADLASKFPSPKSDIVNALMAYFAKKKGDFGIAEYVAQCSEAEIPQWIRDACIHLKGLCMPSPTPAAAGATPSDISGSDDDEAH

SEQ ID NO: 70883 - protein, 601 aa, Burkholderia cenocepacia
MRLTEKQKEVVEADGNLLVIGGPGAGKTTISIFKAATVAASLRPGQAVLFLSFARATISRVIEAIEYEHDLPSAIKSRINVETYHSFFWRVLQTHGYLLGLPRPLTILTPANEAIALSTIRSEYKAEGKLNEVERGEKKDKEKTERLRLAKVEGRVCFDLFASQVAELLERSKRIRQLIAARYPVIILDEFQDTNADQWRVVQQLGREGTLVALADPEQRIYDWIGADPARLDQFRAKFKHTEFVLQGENHRSAGTEILLFGNEILTGKFSKKKYLGIEFKFYSANENEACTALVTQTYAARKRLVDSKKKDWSLAVLVPTKKMTRTVSDMFRQPLAKMSPIRHSAAVDFDAAILGAEIVSFMLQPPSLFHIDGMIDLLCNYYHGKGGDSPTKSDLQQATSIRKAFVLYAEKQADGKALPKNSLMVPFLQTYEQVRAIPLTGDPDQDWRAVRRGMENGSCARLKEVAVEVKNIRLLERGTQLRQELSQDWRTFGRYENALEITRQAFVREHFATQSNRETGIVVMNMHKAKGKQFDEVIIFEGWPRYVKKKIVANPDRIVRTNLKENIDGQTRQNLRVSVTRGKQRTTILTPREDPCVIFI

SEQ ID NO: 70884 - protein, 694 aa, Burkholderia cepacia
MRVEKVRVEGFRLLQDVEIMLEDNSTVIVGRNNSGKTSFTDIFDRFTGETGARFRLEDFSAAQRERFFTAKTLREQAAKPEDVLAALPTLSLTLTFRYDGTAPNLGPLAPFVIDLDVDSTTAIVRVEYRPVLAALHTLLDIPPAPKGVEPRTHFFRSLRDTLPKAYSIHVSAIDPTDDTNRRDFDGTAALSALLQCNFVRAQRTLDHAKHGDADVIGKLLSALFKTASAPTAATTDQELAAKLKASVEDIERNVQSDFDEMLKKLLPAMEVLGFPSLNDTELRPETSLNVEALLSDHTKVVYTGTDGVHLPEGYNGLGTRNLIYMLLQLESYHKAYRAKATRPASHLIFIEEPEAHLHPQMQEVFINQLNAAIGKLSASYPEEAAWNVQFVITTHSPHVANAASFEAVRYFLNEPPTQVNARQTKVKDFKKGMSSISSDDQDFLHQYMTLTKCDLYFADKAIMVEGTTERLLMPRLCELVDKSLDDKHKLARQYVTCVEVGGAYAHIFYPLLDFLELKTLVVTDLDSTKPVEKQNKKGTTITTWDKCPVADGQRTSNAAIKEWFRPKDTQDKDDWQITPAELVTKTAAEKQSGYRRIAFQIPEKPDTNVCARSYEDALVLANPDRFEWPKEQDEATEAWEIAKGLAKADTALRFAIREKAWTVPRYIQEGLAWLSEPPPPPMQNVEAPAKGAAV

SEQ ID NO: 70885 - protein, 577 aa, Burkholderia cepacia; identical to SEQ ID NO: 70859

SEQ ID NO: 70886 - protein, 689 aa, Burkholderia ubonensis; identical to SEQ ID NO: 70834

SEQ ID NO: 70887 - protein, 578 aa, Burkholderia ubonensis; identical to SEQ ID NO: 70835

SEQ ID NO: 70888 - protein, 634 aa, Burkholderia cepacia; identical to SEQ ID NO: 65854

SEQ ID NO: 70889 - protein, 555 aa, Burkholderia cepacia; identical to SEQ ID NO: 65875

SEQ ID NO: 70890 - protein, 595 aa, Burkholderia anthina
MRISKIRIVNFSNFANLEVETGENIVIVGENKVGKSNFLWALQLVLDPGLSELDRRLGLEHFWDGLGENKLGATVEVSVELTDFDDNPDLIACLADAIVSPGPPTVARLTYRFRPMASLGGKPPESLAQYEYVIFGGTDENNSIGAPLRRRLPLDVQAALRDAEKDLLSWRRSPLRPLIEELTEDLDADAREEILQMVREAQTELADRDEVVSTAERIGKRLLDIVGDKHAVPIKLGLAPTRVDALLRGLRILIDNGARGVSDASLGTANLIFLALKSLELDRLVVEGERNHTFFGIEEPEAHLHPHVQRLVYRYFLGVNAAPAQQPRSLSTILTTHSPHIASVAPLRSIVLLRKDVTQGATIATSSAKVPLEEREVSDLQRYIDVTRGELFFARGVIFVEGDAERFLIPAFAEKLGIHLDVLGISVCSVSGVNFTPYVKLLSTRSLHIPHVVITDMDPTEGGEPLAIRRISKMLQARNGPPTAPGLTNERIIELGEASGFFVNENTLEIDVFKAGLGPAMCDVLEQEIPFNDKSKAIIDTWRKDAGKLDRERFLKAVERVGKGRFAQALAPHITPAACPSYIRKALEYIRNAVS

SEQ ID NO: 70891 - protein, 443 aa, Burkholderia anthina
MADRTLPAWHANEELAALAELYEIELHRVGLVDFEDLVRYGTRLVREHDWVLPLIRAKFPVLAVDEYQDLGASLHQIVKRLAFDGGVRLFAVGDPDQSIYGFNGADSKLLEELTNRKDVESVRLEVNYRSAEHIVRVAERALGEPRGYKAFDETRSARVVMVKCPDGLASQAQHAVSKIVQEALASKPGRQLGDIAILYRTAELGDIVAEAATNEGLDFIRVDNAAPYRKCTLTSWIEDCAAWCSGGWGEAKPRLQSLLSRYASFRRRSPDERTIREESRRLTEFLWNRRGNGVALDFVSALRTEMLDAMAATEATLADQMAQVNAMSKALAKGGAIHGLDMARLGGRDGSPDHLNLLTLHSAKGCEYDVVVMLGLDEGVFPWSNEDGATLAESRRLFYVGLTRARDAVHMLYSGWTVNKYGRKFYNGRSRFLDELAGRKEGG

SEQ ID NO: 70892 - protein, 630 aa, Burkholderia stagnalis
MQVARIHIENFRGVKDTTLEFTKHAVLLGDNNTGKTTVLEALDLVLGPDRLNRTPSIDEHDFYHGRYAAKFNKSALKDQDEGEQKKPATENGGAGAQESDAGEGPPAEDQALQIRVDVTIIDLSEEQRNRFGDYIEFWDNKGKELYQEAAPEGVDADTISSALRVTFIGKYDPEEDDFDGKTFFTLTLVDGGKPQTFSRKDKQVCGFLYLRSIRTGSRALSLEHGSLLDIILRLKEVRPQMWEDAIGKLSAFSVAEDPSLGISGILESINNALKKYVPKEWGIEPHLKVSNLTREHLRKMITAFIATGDGAHAAPYYRQGTGTINMLVLAMLSQIAEDKQNVIFAMEEPETAIPPYAQKRIIHEVRNLASQALFTSHSPYVLEEFSLDETIILSRDFAGTMKQSRVSLPESVKLKRYRQEFRTRFCEGLLARRVLVAEGATEASAFPVACRRLAELDPTKYASLEALGVCVVDAGGEGSIPDMAKLYKEIGKRTFALCDLQDAAAQAQIQAQVEHMYMHSEKGIENLILKHTPQAAMERFCDLLQWPADLAAKFPSPKSDIVNALMAYFAKKKGDFGIAEYVAQCSEAEIPQWIRDACIHLKGLCMPSPTPAAAGATPSDISGSDDDEAH

SEQ ID NO: 70893 - protein, 601 aa, Burkholderia stagnalis
MRLTEKQKEVLEADGNLLLIGGPGAGKTTISIFKAATVAASLRPGQAVLFLSFARATISRVIEAIEYEHDLPSAIKSRINVETYHSFFWRVLQTHGYLLGLPRPLTILTPANEAIALSTIRSEYKAEGKLNEVDRSEKKDKEKIERLRLAKVEGRVCFDLFASQVAELLERSKRIRQLIAARYPVIILDEFQDTNADQWRVVQQLGREGTLVALADPEQRIYDWIGADPARLDQFRAKFKHTEFVLQGENHRSAGTEILLFGNEILTGKFSKKKYLGIEFKFYSANENEACTALVTQTYAARKRLVDSKKKDWSLAVLVPTKKMTRAVSDMFGQPLAKMSPIRHSAAVDFDAAILGAEIVSFMLQPPSLFHIDGMIDLLCNYYHGKGGDSPTKSDLQQATSIRKAFVLYAEKQADGKALPKNSLMVPFLQTYEQLRAIPLTGDPDQDWRAVRRGMENGSCARLKEVAVEVKNIRLLERGTQLRQELSQDWRTFGRYENALEITRQAFVREHFATQSNRETGIVVMNMHKAKGKQFDEVIIFEGWPRYVKKKIVANPDRIVRTNLKENIDGQTRQNLRVSVTRGKQRTTILTPREDPCVIFI

SEQ ID NO: 70894 - protein, 630 aa, Burkholderia stagnalis; identical to SEQ ID NO: 70892

SEQ ID NO: 70895 - protein, 601 aa, Burkholderia stagnalis; identical to SEQ ID NO: 70893

SEQ ID NO: 70896 - protein, 698 aa, Burkholderia pseudomultivorans
MRIEKVKVEGFRLLQDVEIILESNSTVIVGRNNSGKTSLTDIFDRFTGETGARFRLEDFSAKSRSKFFDAKTLREKEASPEEILAALPKIVLTLTFVYDSVAPNLGPLAPFVIDLDVASTKAIVRVEYGPTLATLHTLLDVPTPAEGVNPNTHFLRSLRETLPKAYGIHVCAIDPTDDTNRRDFEGTAALAALMQCNFVRAQRTLDHARHGDADVIGKLLSSLFKTAATPTAAAADQELAAKLKASVEDIERNVQEDFDEMLKKLLPAMEVLGFPSLNDTELRPETSLNVEALLSDHTKIVYTGSDGVHLPEGYNGLGTRNLIYMLLQLESFHKTYRAKATRPVTHLIFIEEPEAHLHPQMQEVFINQLNAAIGKLSASYPDEPAWKVQFIITTHSPHVANAASFEAVRYFLNDSTEKASTRHTKVKDFKRGMTTIPAEDQDFLHQYMTLTKCDLYFADKAIMVEGTTERLLMPRLCELVDKTLDERHKLARQYVTCVEVGGAYAHIFYPLLDFLELKTLVITDLDSTKLMEKESKHGKKIKTWEKCPVAEGERTSNAAIKEWFHPKDKKDEDDWQITLAELATKTATEKQRGYRRIAYQVPEVDGSAVCARSYEDALVLANPDRFDWPKEHDEATEAWHIAQGLAKADTALRFAIREKNWTVPRYIREGLAWLSEPPPAEIVPTIENPEVLANAEKA

SEQ ID NO: 70897 - protein, 577 aa, Burkholderia pseudomultivorans
MTEPTENPALVAAQDAQRKIDQALDAGRSFRLEAGAGAGKTYSLVAALKRLIANRGSTLVQAGQKVACITYTEVARNEIAQEIEDHPAILVDTIHGFSWAFLRQFQKALRDLVTEMEDRREKIEQGGGVGSKAVDYDLGFFGVDADRITLGHDDIPEMMATLLQREKFRRVLTQQFPIIFIDEYQDTHRQFMEAMTEHFLKPGAGPLIGLFGDHWQTIYRSEYELAEYPIEGIGKGSNFRSVPVIVDVLNKLRPELTQAVCDPNALGEARFFHANAYRGQRTNDRNSKGDLPPELARTTRERLMEQLQAEGWELSKTKVLMLTHNVLAAEQGYPTIAEIFSGRTDLFARKEDPAIKFFAETVEPMCAAYSTSRYGDMFRAFGSGPAIMKHQDKASWRGDMDALQKLRNEGTVGQVIDHLKKTRRPPPPDRLLRRDDELRAFNGQSIPDDATALQRYSKLRNVRYAEMVELVKFVEKQTPFATQHSVKGAEFENVLVVLGGGWNHYNWPQLLELLETGALNAKNTKGFYRARNLFYVSISRPMTRLAVLATQTLSDTALTAVGRLFGNGNVMELAIPT

SEQ ID NO: 70898 - protein, 765 aa, Aeromonas hydrophila
MSDPLAKPPLVPEVSLTCIELSRFRRLAKACVQIDRRTTVLVGANNSGKTSILIAIRNFLASSQVFGAFDISIDQWPTLKALGSEWEKLTEDPTSISEDIDTWKEQLAALLGSMPTLDLWFDAQPGSYNLVAPFITSLDWGGGAVGVRLRLEPASSVEDLQRLAWRYREARNPVKDFKKQAHAWPVDLIDYWLRHPSDLGSVLVYRLDPALGPLATPPATAPQSLSPKSVAIDRTKLSKLLRVDFVAAQRGFGTEEAESRSSSGTNRVGLFSNQLLKYARQHLNIATKGQGHQPELIAAIAQAQEDLDDRIKVALTPSIEHVKKLGYPTLHDPQEIHFRTRIQTGDLLDHSTAVQYRLDGVQADVYLPEYSIGLGYQNLQSLSYQLVSFRDARLTPTEGSPPAVHLVLVEEPEAHLHVQVQRIFPQRATELISPTAPEHAHLSSQLVISTHASHLAHAENFDRLRYVRRIPSTVGTMPCSDVIDLATAFGTDKETRTFAERYFRVQHTDLLFADAAIFVEGAAERMLVPLFIERDFEELDKRYISFLDLGGRHAHRLRPLVERLGIPTVIITDVDPVKVTKGENDKVIRKAAAIVDPNSLECGNDTLNSWHPKKKELHLLADPVEADQTWSNGSGGRVRFAWQVPVSQNGPWPSSFEDSLILSNIDWFKNIGQGIGKKPAEGEVATPKVTGPLRVAVNTVLAEQDPAKLCIALHSMLRENFAKAEFAVTMFERISVGDKLACPSYIADALAWLDNELAPSKKELT

SEQ ID NO: 70899 - protein, 661 aa, Aeromonas hydrophila
MVSEIIDPNERDAGVVDEIVSYVTSTPPRSFFLFAGAGSGKTRTLVSVLRRITGGEQQDAQPGSKDTADDLALRFARELRARAQTIRVITYTKNAALVVTGRLGINDLTQVATIHSFCWDLIAGFDDDIREALLALNSSAVEKAREVAAGRKKGPTDKDKAVIAELTAKAITLSKTPQFIYSPDRKRFSDGALSHAQVLSVAAWLLNQKPTLRRILRDQHPVILIDESQDTMKNILDALLEVAAEDPTRLMLGLLGDHRQRIYMDGHADLPSIVPPEWATPKLEMNHRSQRRIVDLINDIWDADLEGRTQSKKAVRQHSREEKSSGIVRVFIGDTAASPEDKLRREALCESAMETAVGTTEWQRDNPGHKILALEHSLVARRGDFLEIFEALALLDPDSVRPDTTGEASGPAAVQVLLREMMDLADCVENGQVSSNFAVMEVLHRYDRLLNLSADRDSRAQQLRAYRCGIEHFAAVCSRPSATVREVLSPIVHSGLFESDKRLLAAFNDTQPPPDAPEPRQKESVENRLARGWHALFASPWIQVRRFKTYLSGNSHLATHQVVKGSEFKHVMVVMDDEDAGGFLFSYDRLFGAPLGASDLKNVEENKETSIDRTLRLLYVTCSRAKESLALVLWTRDAGYALAYAHKSKWFLPEEIQAIPE

SEQ ID NO: 70900 - protein, 650 aa, Aeromonas hydrophila
MFIERLTLTNFRCFGAETNIDLTPGLTTFIGANGSGKTAVMQALQRLFGITGDQRHIRRQDFYVPADEAVAPLQRHFSLEAILAFPELDTEEVGAAAIPEFFQQMAADEAGRLKCRLRLEATWTDDGSLDGAIEQKYWAIRAFGEFTDEDCVELKAVDRARIQMIYVPASRDGSSQVTSFLRGRLWRAINWSQGVRDTFDEAGTTLNGAFAGEAAVDVVADAVRRRWQEVHTAGTDTTPLFRPVDLRFQEFIRKVEVVFRPDEAGRERALDDLSDGQRSLFHLAMTAATLDVENSIAGDPVAAGFQPGGVPLPALTIIAIEEPENNLAPFYLSRIVRQVEDLTGGSRAQAVVSSHSASILSRVDPSQVRHFRLDSANRTSLVRAICLPEGLEEESKFVREAVRAYPELYFARFVVLGEGASEEVVIPHLAEAMGFDIDRSFVAVVPLGGRHVNHLWRLLKDLEIPYATLLDLDRGRDGGGWGRIKTACTQLLEIGVAPQALFGQDPDPNGADVNLARFDKLPAENTAGMQEWTNWLRRFEVFFCAPLDLDYSMLCAFPAAYQVIEPGRQGPSNQGDPRIAVLGETGRRELYGADQEASLRWYRYLFLGRGKPSTHVRVLSSQASETLAAGAPEEIRALLMAINARLDPAN

SEQ ID NO: 70901 - protein, 626 aa, Aeromonas hydrophila
MVLIPPENWRPRGIEDLEPAAWRALRHEGSACVVAGPGAGKTEFLAQRAAYLLETGICPAPYRVLAISFKSDAADNLAARVRKRCPPDLANRFTSLTFDSFTKGLVDRFQAAIPVAWRPTRPYDVAFPTRRQVEQSIARARQHAAVQWQATIGGYSPVTFESHKVGAYRLPIARNAPHSAEEFAIHHWWREQLEHQPNSSLTFVSLNRLAELLLRSNPHIRRALQHTYPFVFVDEFQDTTYAQYDFLLSAFSGSDIAVTGVGDDKQRIMTWAGARPDSFNRFSEDFGAVRIPLLFNFRSSPDLVRIQQVVARALDPDAPQAEAQALRRVDGDVAQVWNSRSRNQETTHLARWIVNDMANRALSSRDYAILVQQRADDFEAELAPAFAQVGLRIRNESHALGRTTLQDLLSDDFAKIAIGLLRLGASRRAPAAWQLVSSALWVIRAIAPDDELGAMRIETELSRFIATLRADMAHCPPSVANANVFANRVVEFLDLAALRRTYIEYASSDLLNIMEEAFHLHLAASSDTADWIGCLDAFEGIDQIPMMTVHKSKGLEYDTIVFVGLDDQAWWAHRPGNLEGLATFFVALSRAKQRAIFAFCQERGQRQRIAELYRLLTDAGVPEVVI

SEQ ID NO: 70902 - protein, 668 aa, Bacteroides cellulosilyticus; identical to SEQ ID NO: 63484

SEQ ID NO: 70903 - protein, 605 aa, Bacteroides cellulosilyticus; identical to SEQ ID NO: 63485

SEQ ID NO: 70904 - protein, 638 aa, Pseudomonas syringae pv. syringae
MYLRTLDIHGFKCFGEPFTIEFHDGLNVLVGENGAGKTGVVAAVRQLFNDSESGKRLINERDFHRGFHEEAVTAQRIDIQATFSDLDENDAIAFRDWCGNEEEAKLTFTALNLESRGRFKSQLYGGYARATALETETLDLIHCIYLPPLRDAETKLRDGRQSRLARLLKALCRKELDIARKEGKPHPLEERVGAFNQELSASDDYAIKQANERIGNSLRAALGMHLSQNTHIQFSEVSFSRIVEGLRFLYFPSLAAADATQFRSLEENSLGYNNLLYIASILAELTLEVEEERGEETYLRLLLIEEPEAHLHPQLQIRLLKHLSTVAKEKSIQVIVTTHSTVISSAVSVDEIIHLSNKCTPVAIPLRTCGLPESSRKFIDRWLDVTKSNLLFSKGSILVEGIAEAMVIPELARRVLAQYGDGENTLEDYGVSVINLGGIYFKHFMQLFCDVTDESAGENVPVRCAGLTDKDPPKTIKIDVDGGKQMAVEYMPNDDDLRDGENHALAYIAKIGQSQFGRLYAGKYKTFEYDIAMEGANLQMMLSVAADLWPAQDGTVAPELREKAKLTFDEMKSPERAGHAAELLYRIDSTSIGKGIYAQAFAEELEKQEGIFVVPAYIRDAILWACGLEEPPLNDQAD

SEQ ID NO: 70905 - protein, 584 aa, Pseudomonas syringae pv. syringae
MIKLTDEQKAYIGAPIDQHVYLNACPGSGKTEVVAAMVAKIVEEWTSFPSGIAVLTFSNSATDELKNRLVRYLGEPLGFPHQVSTFDSFVHSRMVANIASEVTEFPGKEGDSRIRILENKADIFHTRNRICGRSISACKYNYDLETKGFVFSTSERTRDKQLNDAPVNEVAREDLINTKKRFWAAGFATYKDVDIIALTALKKPALKSYFQRVAKRFPLIIVDECQDLSAEQLAIVRKLHGLGVKFHFIGDLNQSIYGFRKSNPDNVKALLAELGFAELPLTANWRSGQSIVDLCSDLLRIKRISGNPEIASVKPLLLQYEKCPSELIPKIIELTNGYEEVVVVARGHSTLQRFRRGDSFKGVEVLALACVAANKGSNKELNVAVALFAEWFADRLSLQVTRSGPHCPVAIESKLAWRKFIHHCLKHLVAAGAADTNLTWKEWVAVAKKTMRNLPDQAFVLDEISSDLEPLRELILRSPANQGAIALSVRLDQVVTQQPTMGALRYETIHQVKGETHDATVVVSSLQKGIHLSHWKEWLADPRSEGARFAYVASSRPRYMLIWAVKRLKAGEKETLAGLGFELV

SEQ ID NO: 70906 - protein, 765 aa, Pseudomonas syringae pv. papulans
MRIQHLELANFRKLKSVRIDLAAETTLLVGANNSGKSSAMLALRKFLVKPTTFRLQDLTLCHIATLDAIGQEWEQADDSFAIPASNAWAEWLPTLDVWLRAAQGELHHIRDLIPNFSWSGGMVGMRFRLEPDDLPTLYSDYRKERARVATLLEEIENQAADGQVRPTLQLWPQNLHDYLNRRLAKAFKVRWYRLDPDKLSPPNAETRTANLQPLSDMAIPLERNPLLNLIRVHEINAQRGFGDSADEGQDGSKPGSGRKLSEQLRTYYRRHLDPGDSPDVHDLEALRAIEAAQSAFDSRLSVSFAPALREVAGLGYPNNSDPNIKVATRLAPTDGMDHEAAVLFELDSVAGAPGEPRLSLPETSNGLGYQNLISMIFRLMAFRDDWLRKSRTPEERSAANVEPIHLVLVEEPEAHLHVQVQQAFIKHAYHVLCNDPLLEEFPNLRSQLVVSSHSSHVAHEIEYEHLRYFRRLPSGMANIPIPVSTVSNLSTVFGQPGKTKEFVTRYLRAHHADLFFADAVILVEGAAERMILPHFLREHFKFLDQCYITILDIGGSHAHRLRPLIDALGIATLVITDLDAGKAKAAQPVARGAGQITNNPTVRHWMRVVGRGHDVDTLLDLPAEQKVEEIDALYSIRIAYQTPITIRLPKTGAQTEALPNTFEDSLVLSNVERFAGKSRRGLMRAFSEAVQTADTAQVLGEALFEKLRTGDKAEFALEILGDPEFSQLVVPTYIREGLTWLQSKLELKRKDLLVVPPAIVEVTEE

SEQ ID NO: 70907 - protein, 624 aa, Pseudomonas syringae pv. papulans
MSPSAPERDNPIRDADDIIRECLDLDHPRSFFLYAGAGSGKTHSLVTAVRELKSRAQKRLTFEGRQVAIITYTNAACEEIARRLEHDPLVVVSTIHAFSWRMIQGFNDDIRDWLRTKLAESIEELKDKIAKARDPNNKTARANRASLESKTRRLAGLDEVLSFTYSPTGENRGRQALNHAEVIQMAAAFIQRPPLLDVMADQHPVLLIDESQDTYGPLMDAFLTAQSLIPNRFCLGLLGDTMQRIYNDGKEQLEQAIPAEWATPEKPVNRRCPTRVVELINVIRSAADDHQQDPKPGAIQGSVRMFCTRQPANGGFELESQIAQRMAQITGDEQWAAGASERKTLILEHKMAGRRLGFEGIFTPLYAVEHLRTSLLDGTLPILKLFFDGVMPILDGARSSEFALMEAARMRSPLLDSEHMKAAPDQLGLLQQVGAGCQTLCDLVAGNDPSLADVVLVLAETGLLEIPDRLAAALAQGVTDEEPPETVDREALEVHAYRILLGRRYSEMVAFAGYAQGLSPFDTHQGVKGLEFPRVMVILNDEEAGGFLFSYEKLLGVKAPSDSDIKNQRAGKDDALSRTRRLLYVTCSRAEKSLAIVVYTAQPEIAKERVVEARWLEADEIEII

SEQ ID NO: 70908 - protein, 581 aa, Leuconostoc gelidum subsp. gasicomitatum KG16-1
MHFENIKIIHFRNFETLDIKLDNKNVIFGLNDVGKTNFLNAIQAVFDYKFRNSINEKDFFEMDFHTPIDIIISLSLEQEVADEDDQLLIANLKGALHDNVSDPNVIKIRLKISWDEKHRDTIVEMFWGNNDNSTELSVIPTRGISRTEIDNLFSPVYMEPLNDGVKDFQRSRNSLLSLFEESDSTLTAQIQDKNSEMNELLSKSDIVTSLQEELTSEYSYLRNENSKIILNSEQQIGRLSTGLKPYVQLENNSSLYPSSGDGRKKILSYAIKNLLAKKNEQQKIIIHLIEEPENSLHKSLQKSLSRKIFNPNDSNFYKYLFLTTHSSEIVSEMDDTMLIKLGLSNSHSTMFTVPDNFKNIRKMYSEQVSEAIFYNKVFLVEGPSEKLLFESILNMSNIFMEEKGGYILNIRGIGFKPYFKLLTDIGINVFIRTDNDIKPNNSGKQDYTFPGVKRLIDLFNDNKHVLQQTQTWSHGVHYNSVVKDLEQQKKFIYTSQDINSLRTQNLFISKNDLEHDMVLASSDSIIDDLKDKRLTSTANVVNYLQSSKQKNMVEFVKVMSNTTSQKLYENLDGLKEFVDAN

SEQ ID NO: 70909 - protein, 514 aa, Leuconostoc gelidum subsp. gasicomitatum KG16-1
MQIKKMILEDEDIRTSILSDSDNIVVTASAGTGKTFTIINKIAKILETKKNFKKIVAITFSKKAAAEIKDRLKNSANTTLRYDSVLTGTMHSWAVSEIIEPFYSDYYPLKNDMPITPYFGNQRPPVTTYEEGIQTFRDSGFLMPYIRQRPRYGENSNFRYGNDGYDFIFDFAFDILQKSSAAKKYIMTAYTTIFIDEYQDVNKSQHKLISYIVNSLNIQLCIFGDNKQELYGFRGANPDFLNSFIQDTKFKHYELTHNFRSSRDIVDYANSFAHDTSTVTLANLTDVQIEQSDKLVPIIKHLRQTFKDESILILFASRKRRENDRFELIKNSDPIFNDFFIENELAYSESDNAGILTELVKIIFGNSTLYNLSPFIETTKIHQKFDDLNYTINLIKENDQYLETNLYLLINIINSIYIKQIDQPDTQFLLDTITNREQLESIIQTKNPLKLLTIHGAKGLEADNVIIFGNDFFWQGGFKPELHYVAITRAKRKLIVLDSGNQYINMLNSKPNVL

SEQ ID NO: 70910 - protein, 713 aa, Burkholderia ubonensis; identical to SEQ ID NO: 70836

SEQ ID NO: 70911 - protein, 600 aa, Burkholderia ubonensis; identical to SEQ ID NO: 70837

SEQ ID NO: 70912 - protein, 769 aa, Serratia marcescens
MSEAATTMSLSGQISLRFIELSQFRRLGKVQMDVDPKTTILVGANNSGKTSILAALRHFLADGSPFGAFDISISQWPKLRGLGRAWDALEEDPSTSGVSEDEWGEQLGTLLSAMPTLDLWFDAKAGMFHYVSPFLSKFSWKGGGVGVRLRLEPATNIEDLKQLAWKYHLARIPVKDMGKDSLAWPIDLLDFWLREPSLLGQVRAYKLDADNNPLDGIKTYVSQVLDADSSPIDRKHLQKLIKVDFVAAQRGLGSEEADSRSASGPHRIGLFSNQLLKFARQHLNVAATGHGHRADLIKAVAEAQQELDKKIHEAIGPSVEEVKELGYPGLHDPQEIRFRTRIQTAELLDHGTAVQYSMQKDSLEELLPEYSIGLGYQNLQSLSYQLVSFKAARLNPEKGAPAPVHLVMIEEPEAHLHVQVQRIFPGKAHKLISPNGSDESGLKSQLIISTHSSHLAHAENFDRLRYVRRIAKCEEQNMPTTEVVNLGQVFGDDKTTRQFAERYFRVQHTDLLFANAAIFVEGVAERMLLPLFIERDFATLNSRYLSFLDIGGSHAHRLRSLVERLRIPTVIITDIDPVEERPGKPKKNGDPTTTLVAVANTGQPGLQCGNPTLRGWHPKLQQLEDFKNPKDEHLVWNEIAECSVRFAWQLPVAEADGQWPSTFEDSLIIRNIPWFKQLINEKVDGDGKQIKPPKGALGSVAKQVAENDNIPELLAALHKLMHGSFNKGDFAASIFEMVAADEPIICPKYIEDALEWLQTQLEPSREVMP

SEQ ID NO: 70913 - protein, 663 aa, Serratia marcescens
MAPDTVGTKQGGDAMTNSQILDGNDRDAGVVEEICGYLTDIPPRNYFLFAGAGSGKTRTLVEVLRRLTGVIEHERGGQLARSLKMYGRSIRVVTYTKNAVSVINGRLGDNSLVSVSTIHSFCWELISGFNDDIREALIALKEAQLARHTAEAEAKPRGITAAKQRDLDEIANEIEDLRTTEVFKYHPDRNTYGPGALPHNYVLDATAWLLQNKPTLQSILKDRHPIILIDESQDTMKGVLDSLMVLAKKRERDLTLGLLGDHRQRIYMDGHADLPSIVPESWATPELQMNHRSQRRIVTLINKIWETELEGRTQPTKGSAQHPRTEKAGGTVRFFLGDTSRSPEDKVLSERWCAERMYQISGLADWNQGKYQLLALEHKLVATRGSFLDVYEAMVLLDPNAAAPSGSGDNKGPSTVQILLNELAHLEACVSNEGILNEFKATEVFRRYGGLDNMPEDSEVRAERTDEMLEAIVVFAMACANPESTVAEVLAPVLSAKLFEVDHRLQEAYADKSPAPQAPGRGEDESKQTRMRRGWCALFAAPWKQLKCYRNYLAGISELATHQVVKGSEFKHVMVVMDDALAGGTLIKYDKFFGGVELSTTDKKNAEFGKETTIDRTLRLLYVTCSRAQESLALVLWSSDPDAAMARIKESEWFSEEEVQIIP

SEQ ID NO: 70914 - protein, 671 aa, Pseudomonas syringae pv. broussonetiae; identical to SEQ ID NO: 69810

SEQ ID NO: 70915 - protein, 385 aa, Pseudomonas syringae pv. broussonetiae; identical to SEQ ID NO: 69811

SEQ ID NO: 70916 - protein, 594 aa, Serratia marcescens
MYLSKLEIRNFRNFEAADIPLAGNVVLLGENRVGKSNLLFAIRLVIDPTLPDSARQLKLSDFWDGCDLESNPQIEVHLEFADFDSDPSLSALLTDFRIAEDPTVARLSYIFRKKEEVDGAPRSGEDCEFIVFGGGQESRAIPGRVRRRISIDMLDALRDAEAQLASWRNSPLRPLLEDAFSSLSRADLDRVATELQAATETMEKFPSIKDLEDSLRGGILDLAGTAHDLDARLRFAPADPLRLMRSISMFIDDGKRGIIEASLGSANVALISLKLAEFAWRREKNERNFSLLCIEEPEAHLHPQLQRAVFDKLFNNADKDQSLIVTSHSPTLATIAPLRSVVRICRDPEGRSRAFSLADLPVTSEELDDIARYLTATRSELLFANGVIFVEGDAEEVLLPGFAQAMGINLDQLGITVCNVAGVNFEPYVKLAASLGLPFSVVTDWDPLDGTKQPMGKTRSIGIWQAYSDVSEKQGKLTPENINWFNNSSYEVCKPVFERIGIFLNDQTFEVAVANTTGLKEALLDILDEQGFGVLRSSRIASWRAGIVPDPTQLLAMISDIGKGRLAAKLKQKAPGLAPPEYIASAIQYVVSNV

SEQ ID NO: 70917 - protein, 593 aa, Serratia marcescens
MSDRRALSEALNELLPNREQYAAATYPGHCVVIAGPGSGKTKTLTTAMARALIEEVADPRGVACITYNNECASELEGRLACFNVIGDDRNFIGTVHSFALNQVLIPYSRCIPGLLPDDFHVATRDESRAAVEVAYQARFGSVGDPHARWKFAEEKRRRDVNRLLPAWRNNNPELADFIEGYEAELRRLGLIDFDDMPLIAFRIISEHEWVRNAIRSRYPVLFVDEYQDLGHALHELVLLLCFNGGIRLFAVGDADQSIYGFNGANPGLLDSLVSRADVRPFRLRFNYRSGAKIIRASLGALGEDRDYVGPDGNPEGELGFHGVNGDYDAQAHFIAHDLIPSLIERGFQPERIGVLYRAAWLGDKVADELKARNIAIIRADSNALIKRNSRFARFIEACSQWVTGGWKEASPPFNLLLGQAIFLVYGRRASRAEEQLLTIQLITFLRNGIDKAESAHEWLRRLNDEIITGWMGISQNTQQEWDVIAELLKRTDPVRGLDVALDVFAGKVEGTGRITLSTLHSAKGREFDVAIMFGVNKYDFPSKRDLASDNALREARRLFYVGVTRPRKELHLVYEKGKHSPWIAELYHRSQQI

SEQ ID NO: 70918 - protein, 711 aa, Serratia marcescens; identical to SEQ ID NO: 69196

SEQ ID NO: 70919 - protein, 676 aa, Serratia marcescens; identical to SEQ ID NO: 69197

SEQ ID NO: 70920 - protein, 711 aa, Serratia marcescens
MYLKSLVIHNFRKFGDVNNKVCFVKAGKTLPEQSPVAASTTVVIGKNNSGKTTITNSLSLICSDTEKLTGNDFNHNYLRKILSSMMASDFSKYPEIKFEMEFILDDIHNDSTSNFAPFIDISSLSSTPGEENNAATALALITFKINDESIFQDKMKDLIREKQENSYNDTEVFRRFLDLISMTEFKRVIKNKSNRVIEKVRIKNIIDLRVIKVANNIHDQRLLAKSFNRIIKFMYEKNKDELKSILHLVDGNNHSLTEMIKLSHQDNVESVLNTIILDESLGIELRANLTFDKLMGDLITYEHRDGNNLIPEGQFGLGYANLINIISEIIDYSNRSLHEQKQLKIQLLCIEEPEVFMHPQMQVNFIRHIEEALVKILGLNFKDISSIKSQIIVTTHSSHILNSIIHGSGTFNEINYINSSKRNSECIVLNDDELCDGGKEFDYFKFIKKHVKHQVPELFFSDAIILVEGITEERVLNYHIDNNDILSRRNISVFRIDGAHGKVYSNLLKKINIPTLIITDIDFKRDSSLFKQVTIMEDGSEVTTEHFPQMEKIDNSTETTNSTLSYFLGSKKVGEYPTHHISDNIYISYQLERISIDIPGSKQSHFYATSFEEAFILKNYKNNLLREVLLRVVGKDYSDIISTKQDDYYLLATNSFKIQKKLSDCKSAFANSIIFELITSNKTKPILPSYILDGLSWLERQKTKKEGFDHV

SEQ ID NO: 70921 - protein, 676 aa, Serratia marcescens
MYEIDENKAKKEEEIIERIYSLINKKESFYFQSGAGSGKTYALVKAIKHSGKLDLIKDNHGFRKILCITYTNNATSEIVERLPKSDLYYISTIHYFIWELLKNYNKELIDVHVSFLESEIINIEDAIFHNPDSKPSYKKFRDITITDLEFAIEKIYIDKTNYYEVAFGPAKEYWNYLESIMGTTTLQRIKSNKQDVCDVIKFLMNIRNYKFCLESIQNGHLEYKKIIYNSNQNIEILHRNIIGHDTLLKYAKMLLLKNRGLSKLVIDSYPYIFIDECQDTNPDIIDFFSEIYDYSKQSEDDFVLGFFGDPMQTIFSKEIVHTPFYSRLNVINKDFNRRSYDEIINSINIIRGNHQPIIQTSIFKNKKGGLVKFQRLDELYNEKSLIRKIIAEHVREWNISSESSFACLVLKNKMLASLCDYEKVYSLVARLYQAENSSYHNKVNEEFVVREIKKAGRLAITLHKILLPLFFIVKNDRLSLNEVFPVISKGQYNLNEVREAISFFKSVSNCSLLEYIDNIRNKLNSTYPREIKELIGCNFPTELVNADSSLEATILGLSGFKRVSECSPILSELLQVNTNEFLNWMNYLHGEKKNSGTNYLTCHSSKGLEFDNVLILLEDSMLHDKNIFSELLSSDLNITLNDKLERARRIFYVSVSRAIKNVSIVLFSKNAVDFQT

SEQ ID NO: 70922 - protein, 712 aa, Serratia marcescens; identical to SEQ ID NO: 63712

SEQ ID NO: 70923 - protein, 599 aa, Serratia marcescens; identical to SEQ ID NO: 63713

SEQ ID NO: 70924 - protein, 425 aa, Variovorax sp. WDL1
MERGTLLDNILRMKEARKGMWESIRKRLATLDPPIDADATELGPILDEIEARLAEYIAPGSEGRSTRLFVSQLTREHLRKTIAFFLTMGRGEEAVPFQQTGSGTLNTLLLALLTFIAELKKDNVIFAMEEPEIALPPHTQRRIANYLLEKTSQCFVTSHSPYVIERFEPDGILKLNRDQHGTLSGTAIKLPAGMKAKNYRQNFRRAIAEAMLGQGVIVGEGITEQDALLVVAQKMEDSDPALFPLDVAGLSVINADGDGNLEKLGAFFKEIGTPAFAFFDRKKRTDAEIATLQGSYVVAKEIQQKGAEVLMAEETPLDRQWQYLEALRTEDADGRFGIPAARPADDELRKLTTSTLKGLKGEGGAAKLLQLCAVAELPKTITDFLADIYQRYPKPKRKEAPAAQVDAGAEAAGDNAAAADDPEEL

SEQ ID NO: 70925 - protein, 577 aa, Variovorax sp. WDL1
MALVICAQRQSILDENGAILVTGGPGSGKTTIALAKARLVIERGLSLGQSVLFLSFSRAAVARVAEASKTQLPAALQGKLSIQTFHSFFWRILQAYGYLLGAPKSLRLLMPHDEAAMRHEFENNGGDWNVERQRLFRETGRVAFDLFAPKAHELLSRSARLRELFSSCYPLIVVDEAQDTAEDQWQCVRLLSAGTQMMCLADLDQQIYDFRPGVSSDRVTHIMAALQPLRVDLAGENHRSPNSEIVAFANDVLLNTPRGAAYQGVSRINYRANREYRDRAIRQAIGIAIQRAKEAAQGDIESLAVLATWGRGVNVVSRALTGNGANLIPHRVMIDEASVLLSSRMVAFMLEPRRPAAEELLDLADGLDLAATVFRARGGNTNLATAQRLAASAVQSRGGTSPRANGVASKLLDALRTLRIHEFSGDPKRDWLDARSILRNAGANPLQVIAEDAEQLVAFQRGRRISAALTELWQTQGAYRNARGALDTAIAEDQLLSGGNDLRGIHVMTIHKSKGKEFDAAIIFDDPNSSPLLFTQEAAPHPRCRKLARVGITRAKHHVLMLCDMFTPTALLQGHQL

SEQ ID NO: 70926 - protein, 615 aa, Hyphomicrobium sulfonivorans
MYLSKLTVTDFRKIGSVEFEFVPGLNILLGPNNIGKTAIIDALRALLGGHDEAPLRLYSEDCRRQKALPPQPIKFTYTFDGLGPDDEADFMAALKPAGGGKLVAEFSIRYVDADASGRLKARRWCGDHEDNAVTADMLENLRGVYLPPLRDASQGLRPSRTSQLARLLQLLADDPAKSDIEQALQDLDKALKSKSAIVKTHEAITARHLSMLGEKLRQTLDVGLSANDFQRLASRLSILADNFEIEQNGLGFNNLIFMAVVLSELSTNPDAAFRALIIEEPEAHLHPQLQAVLLRYLSAIQGGEGEKPVQLFVPTHSPNFASIADLDRLSCLMQTDVGVEVFLPRSVAFAAGKKEKLQRYLDVTRAELFFARRVIFVEGAAEMMLVSELAKKLGLDLRDHGVSLISVEGLNFDSFFPLFGEKALRIPVAVITDADPSGGAADLAAVDAADKSKAEVSASATATVATEEVKDANATDSGDAADQDGVYPALNDTPEVSANTAAMKALEDKYVKVFHGVKTFEYDFALHEANRLLMLEALKDLHPRVASNLAKNISQVSSDAEKAKLLFKGMFERKSNNVQKGRFGQALAQLVSKTPNDACVVPSYIEDAIRHACQD

SEQ ID NO: 70927 - protein, 524 aa, Hyphomicrobium sulfonivorans
MIVLSQEQQDVVDAAISPLCVIACAGSGKTTTAVRRLIKVREALNTSRGRVALLSYSNVAVDTFRDNYDELMQPLGLSRCRSLVEIDTLDAFFSRNLLAPHGHRVMKSKRAAFLLHGGEGYLAGQTCGYGKDTRPITKAKVRYRNGKAEFYRSENGNNFDLPPATVGAIEKLGRSGGYTHDLGRYWCHRLLVEYPELLRAFARRYPQIIIDEAQDIGSAHQMVLDLLIAAGSVVSLIGDPDQSIYAFADADGQYLRDYASRSGVATLAITQNRRSIPKIVNAASKLAGRSDAAIRSPLKDTHGVFLTSYKKGEEQKLIDAFKLEVASEELAPENSAVLTRARELADTLGGKKEALGQGLTQRLAHASLLRDRDHDYEGAFREVVAVFSSLIEDGPDDLVTQLTAPSRQSVSLDLKRQLWSFTRNPDDGLPSATLPGSSEWHPKMFARVKEALKEIAQRDKLNSTSNLGNRLAKTKLTAEPLLPKADLAKDTSSELEIRVDTVHKAKGESLDAVLYWQVGLPTVP

SEQ ID NO: 70928 - protein, 675 aa, Xanthomonas translucens; identical to SEQ ID NO: 70514

SEQ ID NO: 70929 - protein, 579 aa, Xanthomonas translucens; identical to SEQ ID NO: 70515

SEQ ID NO: 70930 - protein, 800 aa, Pseudomonas fluorescens
MKLQAYRLQNYRRLRDVVIELDDEISIFVGANNSGKTSAVQGLYSMLRGEAKKFELFDFSAALWAEIDAIGRTPPGDEDAPKQLPSILLDLWFRVGEDDLATAMSLLPSTEWDGKCVGIRVAFEPQDAHALVRKFHELHEKANNAANALVARRSVGAEAGAENAAAVVADPGEYKPWPESLTKYLTKELSKEYTFRYYVLDERAFVGYQPKEVDYAPLPLGKEPGGAAILKSLVRVDFLRAQRHLDDPDAGSSDRAESLSRRLSRFYHRNLEKRGDDHAALKALDTSEKELNFHLKEVFSDTLKRLAKLGYPGVNNPEIVIRAALDPTTVLGQDSKVHYVVPGAITAQLPDSYNGLGFKNLVYMVVELLDLHEQWKAEEDKRAPLHLVFIEEPEAHLHAQIQQVFIRNVLRLLEDANDHATFFHTQLVVTTHSPHILYERGFSPIRYFRRVSDQLDHNTEVRNLSLFKTGAADAPAREFLQRYLKLTHCDLFFSDAVILVEGNVERLLLPAMIETAAKRLRSSALTILEVGGAFAHRFQELIAFVGLTTLVITDLDSVAVKTDAENAAEQDTGAGAVDGDNEEDDLKPFELEDDDEAAPGGKKKSKKRGSTCHAHVEGAFTSNQTLISWIPKKRLVAELWEVTAEQKTLSLAEGTSAEVRVAYQTKVLVTVGATTSQLCGRTLEEAFGLENSDWCQAEANRAVGLKLKRAPNSPEELAEKLHERVIGKNFDKTRFALEVLASGPLNCWKVPTYIAEGLAWLETKVAHEIEADAAIANEVATIEPTAAGVVAVIAGAGQTT

SEQ ID NO: 70931 - protein, 643 aa, Pseudomonas fluorescens
MSRRIDSPDTGADREIHACITETPPQPFVVRAGAGSGKTTSLIKALDWVISEHGASMRAKKQKVACITYTDLAAKEILADVNDDPLVHVSTIHSFYWSITKTFQADIKVWLQNDIRRRITELEEEFKNYSSRVRQTTRDRNKADQERYARSLEAIAGVKTFNYGVGSDYAKGVLGHEDILQLADFLLQNRPLFRRVVALNFPFVFIDESQDTFLSVVKSFKEVEAQMRRKFCLGFFGDPMQAIFMRGAGDIPLEDHWRAITKPENFRCAKQILDVANAVRAQGDGMEQVRGLHERVDGELKPVEGSARMFILPNTLNRIEALARVRAWSAATNNDEGWTTPDIALKILVIVHRMAANRLGFGGIYSALNDKTSEGMKQGMQDGTGWPVRPFLSFALPIVAAVKAGNEFAAMNLLRKFSPRLAPGALTGRRAAAVLRELHAAMSRLVAMLDEAGTTIGDIALHLCDTGLFEFDDRYARVLGFVRDVADAAQEPEAADAVPAEGLSSDAAMAKFFKCSAQELWPYERYVSEGSPYATQHGVKGAQFERVMVVMDEEESDYRTYNYERVFASAEARAADRARALGGDENTWSRTLRLLYVCCTRAQRGLVLTFFVADPTTTLENVVASGILPRSAVFTQEVLAGWP

SEQ ID NO: 70932 - protein, 633 aa, Pseudomonas fluorescens
MYLRTLDVQGFKCFGETFSIELHDGLNVLVGENGAGKTGVVSAIRQLFNDSESGKRVISERDFYRGFSKDDVAAEEIKIQATFSGLDKNDVIAFDTWCGNQPEAKLTFTALNQESRGRFKHHTYGGHEYTKAFETEKLDYVHCVYLPPLRDAETKLREGRQSRLARLLKALCRKDIEAARKARVLHPLEQHVGDFNRQLSESDQFAIKAANQRIGDSLKAALGAHLSQGTMIQFSEVSFSRIVEGLRLLYFPDLSKADAAQFRALEENSLGYNNLLYIASILAELTYEADAGQGEKTYLRLLLIEEPEAHLHPQLQLRLLRHLKKAAEARGMQVIITTHSTVITAAVSVDHVIHLSNLNRPKAVPLRNCGLPTQSRQFVDRWLDATKSNLLFAKGTILVEGIAEAMVLPALAKIVLQPFGEGRNSLDDYGVSVINLGGIYFNHFMQLFCDVRAEHQGKNIPVRCSGLTDNDPPKSVIEDDGEGGQKSVPFLPHADNCIVGNNPALGLQKHIGLSEFARLFAGKYKTFEYDIAMEGNNLKTMLIVAAGLWEAQNGTVVKGLKADAKLDFAAMSSAQRAPYAGALLDRIDSDDIGKGIYAQAFADVLEANGAGFVVPVYIRQAILWACGLEEGAA

SEQ ID NO: 70933 - protein, 597 aa, Pseudomonas fluorescens
MAAQDKAAQAGAADIEFTDQQQKYIDAPLDKHVYLRACPGSGKTEVVAAKVCKIIQEWNHHPSGIALLTFLNSATDELQSRVHKYLREPMGLPHYISTFDSFVLTHLLSSIASEITGFQGRDGDFRIRIIDKSADIYRTRIKICGRSVSACRYNYDKGSKRYVFSTNDRKWDNEANLAQQDEADQKALLTNKKRLWAAGFATYGDIDILALVGMQEEKFKDYFSRIARRFPLVIVDECQDLSAEQLLIVKRLSLLGVKFHFVGDLNQSIYGFRRSNPASVRRRMEELGFEEYVLNENWRSGQAVVDVCSNILQSDRVVGNPRIASVKPRVIEYQNCPSEVLPAIREMSLIHDKVVVVARGHTTLQRLRTGRAFEGIELLALACINLKAGRLTDIAQCLETFGKWLAARLKLQVTKAGPYCPMDIESKLAWRIFLHDGLQFLVEHGAGDGNQTWSDWARAAKITLGKLPDQTFVPVEVREHLEGLRGLNLRARSGQGKMLISERLTGVPDVAAKRDCLRFETIHGVKGETHDVTVVVSSQKPGVHQSHWKDWLRDRTSEAARFAYVASSRPKHVLIWAVKKLKAEDRLVLEGLGFELP

SEQ ID NO: 70934 - protein, 800 aa, Pseudomonas fluorescens; identical to SEQ ID NO: 70930

SEQ ID NO: 70935 - protein, 643 aa, Pseudomonas fluorescens; identical to SEQ ID NO: 70931

SEQ ID NO: 70936 - protein, 634 aa, Pseudomonas agarici
MKLQTLRLSSFQSYGPGPTDVGLETITYLIGPNGSGKTAALQALCRLFAFDPSQRRIQRSDFHVPADEKDIPEERELWIEADFLFPELLKDEDNSTVAPHFGHMRLDEPDGIPRVRFRLSAVMGQDGDIEETFVYVLDVNPDGSPLTTAQVPRAERNHIHVHYLPARRDPADHIAYGANALLGRMLRAVQWDKERDVIRELTDGISDSLAANPSVNAFSEHLQMTWASLHKGSFFADPKITFVASEIEALLRHMSVSFTPGHDENFVDFSRLSDGQKSMLYLALVLSSQAIGRAVLAEKDKSFDSDKLRPPVFTLVAVEEPENSLSPHYLGRIVSALNAMTSQGDAQALIATHAPSMLRRVEPEHIRYLRLTEARQSRVTCIQLPEKTDEAHKFVREAVQAFPEVYFSRLIVLGEGDSEEIVLPRLLRAKGAPIDESAVAIAPLGGRHVNHFWRLLEALQIPYLTLLDLDLARHQAGWGRFKYVNDQLGTFRADKVLPKDHGIPKWNSSEHKVREYPVYIEAFEERDVYFSDPMDLDFAMLLAYPDAYGVEKELPDADVIKAVLGKSHHDSSQYSEDELKLFGTYHQRFKLGSKPAAHISALAQLSDQELLENMPASLSRLADTVIAKLAELPE

SEQ ID NO: 70937 - protein, 558 aa, Pseudomonas agarici
MIAVEAWQPADGLTLEPNALLAAKEQERCLALTAGPGAGKTEMLAQRADFLLRTGTCRYPKRILAISFKVDASKNLKERVQRRCGPDLASRFDSFTFHAFAKRIIDRFRPVLTGEDALDAGYKIADSKVGRSRTQIVFGDLVPLAIQILRKSKVARNAIRQTYSDVFLDEFQDCTNLQYELVKLAFQDTSIRLTAVGDTKQKIMGWAGALDGIFETFAADFAAVPLNMYRNFRSKPRLLRVQNEIIRVLDLASAMPDEQLAGDEGEVFAWQFEDSRREAECLADLIANWIRVEQLPPSETAVLVSKQLELYADHLMAALEVRGIPFRNEQQMQDITVEPVARLIVDYLSCLYGQREPKAWVRLMNQLIPFADDEIQSSTRKNLDRLIKQQRKEAVVAELLDVPFSGWWESVRSFLKQVSIETLVALSPDYESHDRLREVVRDTKMRIEELLKIEPDLPKALERFSDEQAVRILTMHKSKGLEFDSVILLGVENQTFWGKADEERCAFFVGVSRAKRRLVMTVSERRETPPSKPYRWIEQRVPHAEFLSYARPFLSNAT

SEQ ID NO: 70938 - protein, 712 aa, Pseudomonas fragi; identical to SEQ ID NO: 64278

SEQ ID NO: 70939 - protein, 594 aa, Pseudomonas fragi; identical to SEQ ID NO: 64279

SEQ ID NO: 70940 - protein, 575 aa, Burkholderia sp. LMG 29326
MLLTSLKIEHYRGIKALELSLGPTTVLVGENNCGKTTVLHALRACLSALRSSGRTSPFEEFDLHFDSRAADPTTAPPIVITLTFEEAQAGEWPDEVEQRLGGDGGVIVLVPPDDRSRVQLRVSAQYSPVTQEIETTFEFLDAVGNPLPAKSRGRLTGLQQLRPLFYLSALRDAGKEFSRTSQFWSPFVKNSQIDEATKTAIETQLEDINAQIIEAHGTFKGVRDHLAKVQELVALGGQDVVSVDAVPARVFDMLNRTQVSIASATGARLPIGRHGEGTQSLTVLMLFDAFLKSELARKQGAKESKPIVALEEPEAHLHPNAVRALWKTIQDIDGQKLIATHSGDLLSEVDLTAIRRIYKSRGQVKVGAIAPGALDPRDQRKFDFLVRRTRGELFFARCWLLGEGETEAILFSGVAQVLGLDLEQAGVRCVEYRLGDIDYFLDAANALGISWHCLTDADAQGASDAKKADDRIPETPKRPWRYISVLAGAASIEPYLAANGFLDVYEAIAVPAKKAAKLTVAPGDPAYADQIIKCIPDKPSAAYAVVEAMRQRGALSVPKALRSAVIKAIALAGRS

SEQ ID NO: 70941 - protein, 637 aa, Burkholderia sp. LMG 29326
MDYLKKLNASQLTAAQWDSGPLLVLAGPGSGKTATLTARVARLVEQSQDDSFRILCLTFTRKAAAEMRERLLTLVPNAKDRVLLTTFHSFATDILRQHGSHFGLSPDFEILDESERVGLLRSVLAERSDELTKFVSADKALTAIDFLLRNVTPDAQVPSLLKDTEAGQQLQTLFVRYKELLKQQNCLDYGSILYFCEELLRERPRISKQLRTVYRFVCVDEFQDTNAAQYRVLRVLVPDRDANVFIVGDDDQTIYQWNGASPARVKELEQHYNLTTIQLPENYRCPPEVVALANALIVHNGERSPDKKPLLSMKVGSGTNPIQLLSFEDDQKEAEGIAECVAARLKNGARPADIVVLARATKLLERVQRALEALSVPSHIQRRKSQFESAPMRFVMSALKLALVRSDDDLASMVTKALSDCVEQDSSEEDLAGFSAALNGDQLEALGALVADSPAVAKELQDAVSVLVQGRYAEFIQETLAYFDAVESAGRDGVDEQYAEYTTERNVWQNIIREIGGEDEAYSLSLGQFLQELALANKTPEAPSNSVRCLTIHSSKGLEFLHVYLVGMSEDQLPSFQSKKSGDDSREMQEERRNCFVAITRTIETLTMSYGERYNGWRKAPSRFLFEMGVLASGGEV

SEQ ID NO: 70942 - protein, 689 aa, Streptococcus pneumoniae; identical to SEQ ID NO: 62612

SEQ ID NO: 70943 - protein, 605 aa, Streptococcus pneumoniae; identical to SEQ ID NO: 62783

SEQ ID NO: 70944 - protein, 729 aa, Enterococcus faecium; identical to SEQ ID NO: 62500

SEQ ID NO: 70945 - protein, 597 aa, Enterococcus faecium; identical to SEQ ID NO: 62501

SEQ ID NO: 70946 - protein, 710 aa, Citrobacter freundii
MFIKTLSIRNFRNFKATSLSFKKECVNTIVGENSSGKTNVFEAMRLILDDTLPYYKRFLLENDFHRGLGSAFGHWVIVSLEFDEIGGDEESELLCQLNTTVNGGGTGRITYIYRPQFYIREQLFKLNEIEDYEERKGAYHTLKEQYLIDKTTYESLVLCQGTADFSDNQTYSLVVGDFNALLFSDPKLERINLIGNRQRNYNIQDNISCTYARALRDVVSELKNNRFNPFQKLLEYVSKGIDNDETLSKNIRDVNEKISSIDEVKKLSDGILLSITNAVGTTYSPVLNVTSELPSELKELVKVLQLKAGDSLSEGYVSELSEMSLGGANLIYLALKLYEYEEGISKNLLANFLIIEEPEAHIHTHIQKSLFSNLKNNRTQVFISTHSTHISSVSNISTTNVLVKKGLETISCSPSKGLEEEKVNRIERFLDAIRTDILFAKNVILIEGDAEEILIPHLVKNTFGITLDELGISLISVRGTGFELLSSLFHADRIKKKCAILTDDDINLYGDNKPDYLSQEEYNKAVKSAESGIARKVILDEIVGDNSFIRAYYSKFTFEIDLVLSGAVRYFDQIADESFEKKAFYSPYQEAFSSSDRQKIGCYALKLANKHKKGWFAMMLADKLDADFPIPEALCHSLGFTGDFNKFTLAKMVRYRVEVIKNRDGNDLLNNILGRDDLAFVIDNLDAALAVFQEHCPNDPLTLLLEVHYG

SEQ ID NO: 70947 - protein, 558 aa, Citrobacter freundii
MDDQKRGLIKIKSNLLVSACPGAGKTKLLIGMLEDNLYHNEGFRWHIVLTHTNAAADEISSRIDNLNIETDRVWCGTIHSFLLEWVVKKYAGAIPRLVDGFSLLSEYKQRKIIQSIEVDKKLGTRLRYNCDEEGNAFVVPYCHAADSKDKELLVIQEYNRIKEDNKFIDFDDIIKLGVDFLNNNPNICEHLSKLIGNIYLDESQDTSLIQLKALSYITRYNRVSVFIVGDNDQAIYQDLGVSVKNKDILKSELQLSELRHETLSGCYRSSKSLVDYYKKYSASRNDVISMRVGDGKLPIIRDMSKDELPKRIFNLINQYHLKYNGVDGIAIIGPDKYYLMGLINDLYDLSECFVYDFQSTNPLYCVRNTVFYELIKLVLLDVSVVNYQRRHSLARKIVDSIPELSHLSPLQLKRDLKEFQCVKNNFILWLKELYVFLEMKYQKSIKIETDYNICNAAASVAQLKAGMGAIKKMINKDKNVVSVSTIHGSKGEEYDYVITIGYHDKVVPHQSSYDKGNDYAQDIANRLMYVAFSRAKDYMNIFIDDRKAVSPFFIRELD

SEQ ID NO: 70948 - protein, 696 aa, Fusobacterium nucleatum
MIRGEKMVLKEIVVENFRLLKNFKLELKEDLSLIIGKNNCGKTSVLVILDKMLNSSEIAWEDVNLVKQKELYNEIKGFNGSVQDGNKFLEAIKLQLYIEYSDIDSYENIQNFIMDLDPENNIILLEFISLINIKNILELKDIIKGRKIKDFSTFSRYMSKNFTKYFKIKKYSRCYDKKTKKIISDMIEEVDNKNIQKVLKIVGIRADRAVSNNEKNHALSSLTSRYYETYRKNIEDKSNSIFQELEVELEKADKALYKIYNGEKTNNGQDSEGIFKSIIDVVKTYGGSDNKINISIESSISEKNLLTDNTSLYYKHGDGDSSSLPETYNGLGYLNLIGILFEIETKLQELYEQPADINILYIEEPEAHTHPQLQYIFIRNIKNHINSHRNKLNKEKNKYLQIIITSHSSHIVSECNFDDIIYLKRIDNNILAKNFNSLKNEYGGDKKREFKFVKQYLTLNRSELFFADKVICIEGDTERILMPAMMYKVDKMQSSKNESTIPLLSQNISIIEVGAYSHVFIPLFKFLGIKVLIITDIDSAIKNNNGKYEKSHPDNATHTSNASIREFFKEDGLDDGNNQFKELIEKKGKDKIKDRIRIAYQVSEIEGGYQASSFEDAFISLNKDFILKNKDNFYDYGALKKFNKNKIGKDFYKFSLNKIEKKSAFASALLYFDEEEDMEWKVPRYIKEGLLWIQEF

SEQ ID NO: 70949 - protein, 633 aa, Fusobacterium nucleatum
MDTRILEDEVNTALQCIEKGENFILEGGAGSGKTYSLISLIETLIIKLPEIKIVCITYTNNAVAEIKSRIDNENLWVSTIHEFIWYIIKKYQKEIKNELVLLINDETIKSFKKPKDLENNLITIDYFNNIDVEYDEYYSMNPNENKVKISHDHILILAEKMFDRYKKLSDILKDVANCIFVDEYQDTSPYITKILLEHLKKSKKKNVIGFFGDSMQSIYDEGVGDLNKYKLKKIVKKQNRRNPRIVIEIANKFRDDKITQVPSKDKNAPNMDENGVIIEGNIKFIYGKEQEDINFLKNKALFKSWNFLNGEQTRELRLTHKYNAEMAGFKKLYDLYNDDLIIKLIDNIQKNIDNNENKESILDELVLKLRPTYNRKDLFEEIIGNEIYKSIYQNIKNLVWKDALEKCKISKESLMSYKFNGINGRYETNSHRDKILKKLDVLNELIELYESKKFNEFLKKTNFSIQNKNDKSKLKELMNFLIFEDEKTIEEVLDFSKKQGLIKEDMDFDNYISVKGFYLWERIKKISFKEYRNSILYLKEFSPISTQHSIKGSEFDNVLVILESNWNKYDFKTLFGKGSENENVIKRTRKLFYVCMTRTKKNIVIYMPTEDLEIINSAKEYFGEENVLSIDSI

SEQ ID NO: 70950 - protein, 587 aa, Staphylococcus simulans
MNIEWIKIKGFRNFSEEKINFSNKSLIIGANDIGKTNLIFALRLLFDRSLSDRDLDLFDSDYNVYTKSENIEITVKITHIQEDCLLATFKGDINDETVYIQYKNSKNGEYSILTGPTEELLELKSSRFYIKRLNMEYVNTNRNLDSFMKREKNKILENAKSQLTEKQAKQDEDRITEIKSDLTIMNSKIDHLNYIHESLDKVNAELESLAIHNVGQKLIFKNANSDIDKMLGNIELTYNTDEGALTLGGDGRNNQIFLATWISKQKNINSLEKVTFYAIEEPEAHLHPQQQRKLSNYLLDKFDEQIFITTHSPHIASEFRPNKIVKLYAKNKTTKVAKGGCSEELQVQFDDFGYRLDAITSDVFFVNAVFLVEGPSEKLFYTALAKKLNIDLDKLNVSIITVNGVGFKPYIKICLALDIPFVLRTDNDIFNKTKKEKDIEFSYHAGISRVIGIYKELLLKGNNHGLLHFWEDNKDKNEWIKFNERPQSSIDFADEIKKRIEDYNIYLSHIDLEHDLVHSNLFKSLKNFYNTQNEKQTVYKMQKEKAENMLEFLKNNFDELKCLENDEISNPLKKIECLAKEVVNGHE

SEQ ID NO: 70951 - protein, 539 aa, Staphylococcus simulans
MSKKISATNEQLKIIKEQGNLVVTAKPGSGKTHTIIEKIIDVSTNLMSFQGVIAISFTRKASQELESRYKKKKTENKNHFFGTIDKFYISEIIIPFAKILCGKGKPLEIKNSFDDYPKYKQLKKLKENKVDEEIFELLKKSLQDGLIFLEISGETALYILKKVPQSLLYLKARYTHIFIDEYQDCGHIQHKVFIELVNQGIKGIAVGDLDQAIYAFSERYSKYLLSLIGMENFTHLEITRNHRCHDSISDYSLELMGVRRKNIMKEKRVFKVNVLGTDENIIESIEKNFEKLKKKYNINKNSGFAILCRSNKTAKRASDFLKINNKLFVETALDNINGNWATLYNDLLSSYYLYKKNSETVLGFVSRYINEELNYKNFQKGLIIVDKIFNLDEKDLISNIEDFHNIARLIYPDKPDEQIYRKLKEVISSEIALCSFKPASEDEVNIMTLHKSKGLEFKCVFLLDLYEWVLPPRGNWVSKEDYIQSLNLHYVGITRAIEACYIMIGSHRYRSKQQDFIKAKESQFLYRNNTPNLRVDLNW

SEQ ID NO: 70952 - protein, 654 aa, Enterococcus faecium
IIISATFEGISEEEFDNEICASISLNSESQTILEELISNADKGVGSISLFIRPNKAIRKQLFDISTELDSHQFNEFRNSIRLSDYEFYYTSKSNLNFCINENYDKLVGRLNDNIASNPEEDDEALLGSRIDMSDIFKHISVVYVDALRDVLREMKNNRNPVKRIMETIESKISSDNVESLKTIIQQLNETITSVPEIRKIGENINRQLNSIIGSVYSPNLLLSSTMSDDMGSLAKFLSMKPEQNIDLDLLGLGHLNMIYLALKIVEFEACRSRELLNIMLIEEPEAHIHHHIQKTLFEGLNLQKNYTQILMTTHSVHLAEVSEISRMNVLKSFNGKSIVMNPANNLNSFAKEKLKKNNLNLINAVERYLDVKRNGLLFSKGVILVEGDAEEILIPQIVKKLFGINLDELGIGLINVGSTSFEYIASLFDDDRIQRKCAIVTDLDEQAIPSEHRLYKSTAQEKGQARKEKLSSLFNENNWVNCFYANTTFEIEFLDVNKENILTYVSPIIDDAFKDKKTITAYKEEIQSEQYLERNLAMLKLANHVGKGWFAIELGEKIDFLIKIPKYILNAIAFACQEIVDLSIYKKILLHTIDLYEETTELSALSASLKTSDTADLNIAIISLLEYFGKDEDVVYLINQIENYTKILYAEVSK

SEQ ID NO: 70953 - protein, 597 aa, Enterococcus faecium; identical to SEQ ID NO: 62501

SEQ ID NO: 70954 - protein, 729 aa, Enterococcus faecium; identical to SEQ ID NO: 62500

SEQ ID NO: 70955 - protein, 597 aa, Enterococcus faecium; identical to SEQ ID NO: 62501

SEQ ID NO: 70956 - protein, 729 aa, Enterococcus faecium; identical to SEQ ID NO: 62500

SEQ ID NO: 70957 - protein, 410 aa, Enterococcus faecium
MTNIFEKIVNDLNLEQKDVVESEDNLYVNACPGSGKTRVLTRKIAYQAIKHDGSLKRIIAITYTNRAAEEIKERLSLLSIDDDINIWVGTIHQFCLEFIIYPFKMNLSRVSKGFTIIDDYTQRAYVSQINNMLNLNLKTYELNKIDLSLSHDFKINEVQYTQVSEMYHTMLEKNKEIDFDMILLVAYKILTVNSNVARNIASNIRAIYVDEFQDTRELQYNVIAKLLQNNPQIQSMFVGDIDQAIYGSLDGIAKSVEELEMLTSHTFQSKTLHGCYRSNQRLVDFYSNFQSCPYEIESRGNNKNDRGFISYDCKVTKEDLPNIIKNIIKEKIESGIHEKDICVLAPQHYPLFSLGEYLKKELPYCNFDAINISPIKVNNHSLFFKLAILYFTESGEKVRRRKLIANDILI

SEQ ID NO: 70958 - protein, 346 aa, endosymbiont of Bathymodiolus septemdierum str. Myojin knoll
MDNLSHIKIKGFKSIKELDLEMKPINVLIGANGSGKSNFISVFEFLKYAVDDNIEKTELYVKQHGGSDAFLLFGSNITKKINIDINIQKHKYSLGFEVDYNKDVLTSTSIASNLENSYDNFIYFEKDIKSINTYHFHNTGKAVSFKKYQEKNDYAFLRSDAKNIAPFLYHIREKFNQEYRQIVQSIQTVAPYFHDFVLNLVGEKNDERILLRWQHKNDLDNDFSANQLSDGTARFICMATLFLQPKELRPKTIILDEPEIGLHPTAIAVLSEIIQTVANDGAQVIISTQSVELANYFEPDDFIIVDYENGESKFKRLNAQDLGDWIETYQVGEAWSEGLLGGEPKW

SEQ ID NO: 70959 - protein, 1036 aa, endosymbiont of Bathymodiolus septemdierum str. Myojin knoll
MNDQKQRNQALDISQSFIVQAPAGSGKTELLTQRYLKLLAHCVEPESVIAMTFTNKAVDEMTHRVLSALKSTVQSRPSEPHKQTTYDLAAAAMRHSDEQGWQLLQNPKRLKISTIDGLYSLITNRYPLPGQLVPRQIMAQQWERNKAYQIAAQQTLMLIDDEEYGKDIQNLLLHLDNNVSKFESLVVQMLSKRDQWLGRLYRDNVLDLQILQDSARTIVKQYFEYLQPLAKVYLDDEFFGLLSAREGKLYTLPTTNFSDLEAWQTIADLCLTKKGTWRTAVNKLKENLSEQKALGEALQGLRSLPNIDFSQAQADILQTIAQVLKLSVAQLNIYFEAQQAHDFIEVALNANQALDSQIGVSDIALFMDYKVQHLLIDEFQDTSASQFNTVEKLIEQWQTDDEKTLFLVGDPMQSIYRFRESQVGLFLQVRDKGIANIRPTSLVLSTNFRSSKSIVEGNNGFFSKIFPECDDVHKGAISYSPSLANSDTKDDNAIAFYPFAHDQYLCEAKTIGTIVAASLAKNTQNTIAILVRGRAHLLHIAQQLMDEKIAFESVDITELKDHLLTRDLLSLSKALLHLGDKLAWLSVLRAPWCGLILDDLLVLSEDDNQIIYRQLNDEAILVKMSADGRERAQHLYQCLQEVISNQGRFNFVELLTHTMNQLGLKNETLAKTELAIKDKFLQIIYECEQQQLLSADTIEQMIEKLYAPSEKAQVKLMTVHASKGLEFDTVIIPGLGRSSGRDDSLIIRLREFSNKDLLLAPMKSASATQESGVYRYLKSIETEQNYYESMRLLYVAMTRAKSHLHLLGAVNKSGNIGKNTLLELLGQFFTHRFDDIDKTPDTVESAEILQLARVSELKTPVNRMQEKGEMVEYQQNFERLFKRALGTLVHQYYEHQLFEPSAENIRNQLISIGTPPSEIEKWQAVITKLLNNTKNDAQFEWLFKDRASARNEAEFSINGSTIAIDRLFIDEGTLWVIDFKTAKPAEDEPLEAFIKRQQQEHTKQLQFYKTAMSEIYDYPVRCALYCPSVKQLIDIS

SEQ ID NO: 70960 - protein, 643 aa, Pseudomonas sp. Os17
MKLQSLRLSNFQSFGLTPTELTFENITYLIGPNGSGKTAALQALCRLFAFDPSMRRIQRSDFHVSHTELEVPAERVLWIEADFIFPELATDDDSTTVAPHFGHMRLDEPNGIPRVRYRLRATMGIDGDIDESLVYVLDVDADGAPLNTAQVARSERNHIHVHYLPARRDPADHIAYSANALLGRIVRSVQWDKERVAIRELTTQISESLSANPCIDAFSTSLASAWGALHKGSFFTDPRITFIASEIESLLRHLSVSFTPGHEDNFVDFARLSDGQKSMLYLSLVLSSQAIGRAVMSGENKSFDLDRLRPPVFTLIAVEEPENSLSPHYLGRIVNALDAMAAHPDAQALIATHAPSMLRRVEPEHIRYLRLTQDRQTRIAQIVLPAEADIAHKYVREAVQAFPEVYFSRLVVLGEGDSEEIVLPRLLRAKGIPVDESAITIAPLGGRHVNHFWRLLAGLRIPYVTLLDLDVARYAAGWGRIKYVNDQLEQHEPEKALTTTVTTPKWNEDTLLVRRDHFFWLDGVNRNLFEVLQERGVFFAYPMDLDFAMLLSYPDAYGVVKTAPTIDIVKAVLGKSHHNASQYTPDELLLFDTYHQSFKLGSKPASHLEALATLTDQQLLDAMPKSLSDLSDALIAMLQELPE

SEQ ID NO: 70961 - protein, 554 aa, Pseudomonas sp. Os17
MIEALAWRPADNLTLEPNALRAAKEQQDCLALTAGPGAGKTEMLAQRADFLLRTGTCRYPKRILAISFKVDASKNLKERVQRRCGSELSSRFDSYTFHAFAKRIIDKFRPVLSGEDALDPGYQIGDRRISRKQIEFRDLVPFAIQILTQSAVARNAIRQSYSDVFLDEFQDCTDQQYDLIKTAFLDTSIRLTAVGDTKQKIMGWAGALDGIFLKFAQDFDAVPLNMYRNFRSKPRLLRMQNDIIRVLDPQSVMADDQVEGNQGEVLAFRYSDSHAEAEHLANLVAEWVNNDGVPLSEIAILVSKQLDLYAGELMTALEARGIPYRNEQQMQDITVEPAARLVVDFLSSVYGNREPKAWMRLMSQLIPYADEDIQANARQDLGRFITSQRKSIAISELLSERYDGWWDTAVAFLRHVGTEALASLSPDYESHERLLQVLRDTKARIEELLKLEPDLPKALLRFSDDQAVRILTIHKSKGLEFDSVIILAVDNEIFFGDQDANRCAFFVGVSRAKRRLALTFADTRSRPQGHTGRWSLQRTMQEEYFSYAVPHLNA

SEQ ID NO: 70962 - protein, 640 aa, Pseudomonas aeruginosa
MRLSSLFVSNFQSFGPVAEDISFEDVTYLLGPNGAGKTAALQALCRMFSFDPSLRRIRRSDFHVPAAEAEQPEQRHLWLEADFTFEETLDDDDNDTVPPFFGQMAMRKAGEPPRVRFRLEATMYEDGEIEEQFLFVTKTDENGDPVSKQAVPKRHRDTIHLHYLPARRDPSDHVAYGATALLGRLLRAANWNDDRETVKELTEQITDCLVENESVKTLSDSLTTAWQRLHKGDFFASPRLTFENSEIEALLRHLTVSFSPGHGENQVDFARLSDGQKSMLYLSLVLSALTIGREVRSGENKAFDPHKLKPPAFTILAVEEPENSLSPHYLGRIVNSLKSSVDVDAQALIATQAPSMLRRVEPENIRYLRLNGDRCTQVTTIQLPPKLTDAYKFVREAVQAFPEVYFARLVVLGEGDSEEIVLPRILQAKGAPVDEFAVAIAPLGGRHVNHFWRLLSAIGTPYITLLDLDVGRHQGGWGRVKYVRDQLDQFAPQDSLPAGWPYHEWNDPQTPVRTHNWFEGGTVSLFNELEKRNVFFSDPLDLDFAMLCAFPDAYEAEAVPATLKSHTKVLGDSHFNPDQYDEEEQRWFEAYHKLFKLSSKPAAHLGALGRLTDQELLDGLPDSLDRLADKVIERLDESPE

SEQ ID NO: 70963 - protein, 556 aa, Pseudomonas aeruginosa
MIKPERWVPSPGIRLERNAWEAVRERERSVVLTAGPGAGKTEVLAQRADFLLRTNACRYPKRILAVSFKTDASRNLKKRVQLRCGWDRASRFDSVTFHGFAKRIIDRFHPVLVDEALSQDYEIGPEYIWGQQITFKHLLPFALRIVKESAIARNTIRQSYTHVFLDEFQDCTADQYELIKLLFHDTPAILTAVGDTKQTIMGWAGALEGIFKTYADDFDARPLRLFLNFRSQPALLRMQNDIIREIEAEAVMPDDLAKGEGGEILAGNFRNAAEEAEALANLIQRWITQDGIPPSEIAVLMPRQVEEYGESLMLRLTERGIAHRNDHDLQDLLKEPAVGLVIDYLTCLYGQGEAEAWSRLMDHFTPFEDDDSQNSAQRIFEETYRDHLKKVKQERKTASPYGSWWDLTNEFLKKLGLSSVSALSADYRSKARLLEVVRDVRDRIRAQLAIEPDLLKVLARLSDDSAVRFLTMHKSKGLEFHSVVVLGVEKQTFWGHLDQERCVFFVGVSRAKHSLALTTADYRPRPKNVKRWDEHRAPHGEFVSHVVRHLTSQHFK

SEQ ID NO: 70964 - protein, 592 aa, Bacillus pumilus
MYISKVKISNFRNFKETEVELGKQMVIVGENKVGKSNFMHALRLVLDPTLSESSRLLQLSDFWDGLTRPLNDEEIRIDIELTEFEQDDKLKSVLSDFLVKDSPLTVGLTYRFFPVDENGNKIYIFKVYGTETENIFSYEQRKWLPLEVLSGLRDTESDLSNWRKSPLRPLIERAIETTDKQELENVAEEITRSTDSLKELDEIGSLTERINTQLENIVGDIHSIETSLGFSPADASKLYRAIKMFIDDGNRGINEASLGSSNLLYLVLKLLSLEQYVDENERAHTFLAIEEPEAHLHPHLQRLLYKYLLNHDKIIVEGSQEQHKIHSVSNILTTHSPHIVSVAPLKSIVLLKETHGEDKSTKIVSTAKISLDDKDVKDLERYINVTRGEILFSKGVILVEGDAEEFLLPSLSELHGIDLDKHGITVCSVSGTNFLPYIKLLGSEGLDIPFAILTDYDPRDKLPLIHNRLIKLLNFIDKEYDYSDLGTEDLIIYGKEFGIFTNSHTLEVDLFDTMPDEITETLTELTTNSNAISRAQGWKLASSIKGDEKSYLSDIENIGKGRFAQRLSTNLTSLSVVPEYVKGALDYVIAKV

SEQ ID NO: 70965 - protein, 608 aa, Bacillus pumilus
MSSLKFDKLLYREASKDLSNNEAQLKVYNSTGNCVVLAGPGSGKSKILTLKLARILNEDIEAPQGVACLTYNKECARELKEKLYNLGIIESSTIFIDTVHSFCLNHVIRPYKHLVNANLPKEIKVATSREVRETMLRTFNLTIGQNERYTSSWSTAFNVYRRTFIDRKSSEWKTNDSDIAEWILNYESSLRHQGLIDYDDMVLHGLWMIEENQWIQGLLQAKFPVIAVDEYQDLGASLDRIIRVLCIENDTRLLAVGDPDQSIYGFTGAQPSLLNDLAQQSGVLKIRLKKNYRSKGNIVKASIASLLEERDFVSNRDEEGSIKFYGIRDGIDAQCDYICKEIIPKILTLDPSSTLGDIGVLYIDKNDGDRIAEKVAKEGLQYIRVDGNAPYNKNQLTVWIENCAMWCSGGWLKGSPQFSEIERTFSSFFLNSNMSEAKLESKKLNLFNFLFRSRDVELKLSDWLDEFNKSIVSELLDCFTEEPDMLKEYDKLIESAKDGQLKDFKVSSLSRQVGSESHLNLYTLHSSKGLEFKYVIMFGLEHGRIPWLNAHEDKINESRRLFYVGLTRAKDEIHLLCSGWYYDYYDRYQNYGPSKFVLELKAFVDNNL

SEQ ID NO: 70966 - protein, 706 aa, Rothia mucilaginosa
MRIDSAKIRGYRLLEEADISFNNEGGATVIVGPNNCGKTSFVEIFYKFIESGNQNDFTVDDFSIAQRIKLQESATDIQEYFKEIEREGDLEENLKKKFIESLPEISLEVKFSYQDEDNIIPLYRLITNLDEEDNTARLACRYFVADSSKLFDEYKEYVLNRSGENDGLGCDILKFISRRKNTFKIEYAAIEEGAEYYKKTVPDCGVYKKVERSAVENAIKCHFIYAQNRFDDTTRDSMHGLSKVFYKYFRSLISKEQIDLNVLEGRVNKISEMHDVQYKSSFDAVIGSLKEIGYGESLPTPKVISDIEFENFMDNNVKVVYGDSSGDFSEGHNGLGYSKLIYIILQVSLFIENIKNMEPRPGVNVIFVEEPEAHLHPQMQEVFIRYIGEYIEKQLEKIEDNTGVSAHLVVTTHSSHIIAENGFTGIRYFSLINDSIDKKTIIKDLGVFSKNIDKYTLKFLRKYMELRPCDIFFADKSILIEGVTERILMPEMIKKVSDKAQENGGSRLDKEYISIIEVGGAHAMRFKELINFIGIPALIITDIDSSCMVSGKSQKCEPTQKNAFTLNPTLRSLYSDIKEKRENDESAQLYTDTLLSLKSEDKVAEGGNIRVSYQIPENGREPSGRSFEEAFIIANASTIHNQKATIKSGLTNKLREQKTDHDILMNSYMIATSISGKADFALDILMLDGWDVPKYIREGLEWLNKA

SEQ ID NO: 70967 - protein, 560 aa, Rothia mucilaginosa
MAEQSVDQKIKECVDNNKNFVLDAGAGSGKTSTLTETLKKLLKWRGEEYRCTGQKIVCITYTNVAANEIMSRINDDSRVHVSTIHSFLWSIIGNYQKELRESLIEMNGTLESGKRVENLATELEYKDISYVDYRDFRKGKIGHDDVIELSYLMFKTHSKLSRIVADLYPVIFIDEYQDTSEKVIDIILNTIGDRYKDRVLIGLFGDWMQSIYESGVGKVNPEDKGLERIVKEENYRSSNRVVQVLNKIRGDICGDIYQAPHLGLDGQAKFYYRKQGNSESALRDLKMMLEIDSSWGSEMKILALTNRIVAMHSGWETLRSVYNGYAKEDARFKVDNLLSNKDPYSDLYEYIESILLAYEDNDNVELYRIFKNRINEEGYINKFGLFKRDLSKCLSDLWNYCSNSSIEEVCSYILGKDMFPKNPDISRLLREARSEIVCASGSKNGPVYYLKDCKYSEVRAMRKYKNEMTPFSTQHGTKGAEYKNIIVILDNGKWHKYNFESALTNNGNNKTRETYNRSLNILYVSLSRARNNLAVLMVDPNSSILRAARDIFGEDNVIEF

SEQ ID NO: 70968 - protein, 771 aa, Klebsiella oxytoca; identical to SEQ ID NO: 65438

SEQ ID NO: 70969 - protein, 625 aa, Klebsiella oxytoca; identical to SEQ ID NO: 65439

SEQ ID NO: 70970 - protein, 719 aa, Klebsiella oxytoca
MCNKTMLRVQSITMYINKLAIRNYKNFRSSSFCFVKDSVNTIIGENASGKTNLFNAMRLILDDSLPMNSRVLLDEDFYRGLNDPFGHWIIITMYFDDLSESEEEQVIANYTINNGNEEALKEGNYTFIYRPRFHIRQKLYELTVDNKDLDSRLEAFTELKSTCIISKETYEAVAFVRTKVDFNNDEVYKQLVGDFENYIFSNPNEDDATVIGVKKPPYFALGSEVACTYVKALRNVVADLKYYKTNPLYKLLTLKSKQIDDRKDISENVKNINEQISAIPEIARLSNKISTSLLNTVGSTYSPKILVSSQLPEDFTELIQSLGLVVEDSLDYDGSGRIDDLSLGGANLIYLALKLYEYEEIRDAEEHITHFLLIEEPEAHIHNHIQKTLFDNFNFQNTQVFVSTHSTQISSVSKISSMNILARQRGYTDIYQPSNGLQPKEISSIERYLDAIRSDVLFAKSVILVEGDAELIIIPELIKVTLGISLDELGISLIKLDGTVFKHISNLFHSNRLKRYCAILTDKDLAYVKEPDELFDADFVESLKNAEIDGLRRERELAEYVEGNEFVSVFYAENTFETELVRYDENSDLFNSVIRTTYKRSGDIERVVAGIKSDDLRVRFRTARFFANKIGKGWLATEMVEYLHNENRVPDYILKAIHFALKDRELNAVLNKMLAYNMSLMGTCWDGVCNKINSESDFDKKMQEYSKHFDDSFSRFWEL

SEQ ID NO: 70971 - protein, 418 aa, Klebsiella oxytoca
MYDNRLIDFDLILNLTCKLLLKNDVLCERLSLIMRYILVDEYQDTSHIQYEILRLIVSKRNSLVTFIGDKEQAIYTGLGAVVKNRKELIDYFNLEVLEEMRLTGCFRSSQSIIDFYSKYKDDAYYINSLSELKTFPSVILKENSVDITQLSVYVSGIIRTHLEQGISPGEIAVLCPSWFDVIKLSNEVITLNSDLDIDGVMVSPIPKNNENLWLKLVKLALLKKNPSNYLVRQKLLRDLFKELNDLESYTKFLSPKKIIKEINKIEFAMDYNCEIDIWINNLISMFCNSIGLDINNQSYVYKEMICLIDATKKRMAKYSMNYRANDLHSFFNFKSGIKITTCHSTKGDEYDVIICTGLLNGKIPNWNDIIDCSSAHQNYVARRLLYVIGSRAKKHLYLISESGHKTQKGYPYQITPQL

SEQ ID NO: 70972 - protein, 719 aa, Klebsiella oxytoca; identical to SEQ ID NO: 70970

SEQ ID NO: 70973 - protein, 161 aa, Klebsiella oxytoca
MPYRNLTSEQLDAVKFDGNLLLTACPGSGKTKTLVAKLCFILENKELFDIGKKKIVALTYTNVAADTILERIISYGINSDSLWIGTIHSFCLNWIIKPNIDRIPRLCKGFNVIDEYEKEFILNDLRERHNLSPYDKIDTLLDFNLTPVYSRNTAEYSVVKA

SEQ ID NO: 70974 - protein, 527 aa, Listeria monocytogenes; identical to SEQ ID NO: 64370

SEQ ID NO: 70975 - protein, 725 aa, Listeria monocytogenes
MLVNEYTNRFGTISNTNNFASDVVRMEDEDANIFHHLVSLNGGNEFNKEQVNAIRFDMRTHLRIIAGAGSGKTQTICAKAAYLVLKEKIQERNIVMCTFSKKASQEMKERVNEFLGGNSRIEVLTFHGWFQKEYNVLIKKYPYLEKYGIAGEVPGKGSGKDSHDRILMNLIKQYHLYNFDKYEEKPINERLSYWRNMGYNDEEIVAFIARYFDDKEILKDQLLSEVFSEMLKELERIKRREKVINFDDMLINLKCVLENDSNALSLIQTRYQYIFIDEFQDINPLQKQIIELICPPDYEKSVINSTKLIIVGDDDQSIYFFRGAEPRYIKEFDRQYRQTSIELMTNYRSIAPVVHIGNTLISNNQHDRIKKSMIPHKLNEGDCYAKVFQNEQLEANWIAMRILSLSSEEKPFQDQIGKPNYTETIVLYPNKNQLKSMIIALQEKGIPFVTKSDDDLLGIFGINFFKRSFNLLMDIIDAETIEIKKHLYKQLIKNICLYYYIPFAKSTDFVSDETNYTSEKLTDFICKEKKVSKKEMALIKSIFRDINEFIKTEELNIKVFVNWLVETPKVKKQLIDEEKDWLLKEVSNVKTLKELILKYKAARTLKEEMADKLREYDNNNYNAVYLLTIHSSKGLGYKNVFVKGIYKNSLPDYRSVDKESIELQPLIEQASPPTTMEEQRRLMYVALTRAKENLYVTYPREINDKPTLVSPFIKESNIMFSEEKI

SEQ ID NO: 70976 - protein, 527 aa, Listeria monocytogenes; identical to SEQ ID NO: 64370

SEQ ID NO: 70977 - protein, 725 aa, Listeria monocytogenes; identical to SEQ ID NO: 70975

SEQ ID NO: 70978 - protein, 668 aa, Bradyrhizobium diazoefficiens
MLSINPSTTPPCWSGREADHRGVGSPNTSYANHRVGVSYWLHRDHKLLLQGAEVTIAKPKSSGVKIVCVRISNFRALRNIEMDIGDLTVMVGPNNAGKTSILDGIQAAIGATRKLLGKDDVFLAETETDVPKERKAVIDILLRPTDDDGKIVESFPAGSYWTALWGAGVSQDGADFFDQVAIRTTLAWNAVHGDYRTSRAFLKEWKAFSEWLTADEQGTATSSQIEPIAMHYIDAKRDLEEDLRSKGSFFRRLTDDLGLSDADISTLEAGLTALNHSMITKSEVLKHLKDTLTRLQDVIAAEKATVDIAPIPRRLRDLSKGIDVTLSTTGAQTFPLNRHGMGTRSLASLLVFRAFASWRNEKAIAAGDKLHSILALEEPEAHLHPQAQRALFGQVMAIPGQRVVSTHSPYFAGQASLEDLRLLVKSGSSTSISKLDLESLSGDERRKLEREVIASRGDILFARALILFEGETEEQSLPVLCQKRFGMSAHELGFNFVGVGGGNYFPFVWLATNFRMAWYIFSDGEPRPVANLKSQLARAGHSDITKCPQVSLIPGGNDYEKQLIDEGYLDAIEMAVAKTFGSDKLDDYIASLHGKPGKKVDGKETTRDYSGAEGRKSAVLDFMRENKTRLAAPIAQQICELPKERQTPKCLEGLFDRLASDFSLGSPM

SEQ ID NO: 70979 - protein, 623 aa, Bradyrhizobium diazoefficiens
MNSSEIRLSPQQQAIVNYGEGSLLVVAGPGSGKTRVLTERVRRLITSTKGHFRILALTFTNKAANEMAGRLKDLSDLDQKAFIGTVHGFCLQMLTDRGKPVGVNASPQIFELMQDRKQVLLDAVMADPVLTNVLARAGDARARNRRLDEWLRQIAFVKTHPITIPEIEDETEARIFDAYNAGLRASGAYDFDDLLLLGYQLLTDYPKIGDFYRRLYAYICIDEAQDLNEAQYALLQALCGDSFDNVMMVGDPKQSIYGFNTSSPEFMDRFWRDFDATKIELAENFRSSQVVVAIAAKLEPSYNVEGQLPIRGEASLIVGSDEEAEARLVADQLSALLAIGHPDVEGIITPAKCAILGRTRFTLIAIENELKKRSVPFYKRLSSLHENESEVVDDFQLALRVMANPRDKLHLSALAKKWGQGEPKLARDSSVEDALTALRAMSATHAAHQAVAQAVALVSGDKARTQFMAAIEVLRCYADGLSGEDRRTIYDDTEVLCREWDQYLRSGSAGSRHIGGFLSNMALGTTQQPNTDGVALLTVHSSKGLEFEVVFLVGMADGVFPDYRAQREKEKAEERRNAFVAVTRSKRLLYFSYPGTRRMPWGDVWSSKPSPYIAEISSILRPS

SEQ ID NO: 70980 - protein, 601 aa, Bradyrhizobium diazoefficiens
MHLSRICIQNFRTFSDFEVKLGGNVVVVGENRIGKSNLLYALRLIFDATLPDSARQLRMADFWDGLGQPGTDTNIKISVEIKDFERDMDVLALLTAFRLSDDPSTVRLTYEFRPKAGLTGEPKADEDYEFACYGGENGNRTFGHNLRRRLPLDLLPALRDAESDLANWRRSPLRPLVEAAFAEIEKDDLDEIATAIEAATGKLAEFEEIDELESSISDFLSEMAGPKQNVNPKLGFVPADAVRLYRSIQLLIDDGKRGINDASLGSANLVFLTLKAIELKALIADNKRDHTFLAIEEPEAHLHPHLQRSVYRHFFETMFGDEGTQTELSVFLTTHSPHVASVAPLRSLLLLKSSKDDGTKGYSTAAIPFSDDEVADLARYLDVTRAELLFARGVVLVEGDAERFLVPAFAANLSISLDKLGISVCSVSGTNFAPYAKLLTGLKIPFAVITDWDPGDDDDADALGWNRTYNLVSIIEEVRTGKKPKALLSELEDIDDVNEFCKRCEAFGIFSNIDTLEVDLFSGDFIKPIIKTLREGNFGNKRTSWIDAWEKDAKSLDRDDYLALIDAIGKGRFAQRLVANLGALKPPRYIKAAIEYVVKNV

SEQ ID NO: 70981 - protein, 595 aa, Bradyrhizobium diazoefficiens
MSNQALYLRAADDLRRNAAQWEAYESEGHCVVLAGPGSGKTKTLTTKLARILYEDVQTPRGVACITFNNECARELETRLAQLGIEANERLFVGTVHSFSLTEIVLPYAKSAKLGLPDDFKVATQRDQALALERAHKRVIGGPGNPQETKFAMGRHRRSILNRESEQWRAVDPQMSRLVVAYEDELRKMGTVDFDDMPLLAVRALREHAWLQRAILAKFPVLVVDEYQDLGRALHRMVMGLCFSTGIRLFAVGDVDQSVYGFTGAHPELLQQVADRADVQTVRLEFNYRCGSNIVAASEFALGEVRGYRTPPGAHEGKIFFHALASSYEDQANHLFSVVLPDLQRRLGKLTPGDIAILYPAAWIGDAVAQLASRHGLGVLRADANALYPRSSRIMRWLEDCALWCCSGWRSGEPDFTKLVRDGVRIFSEDIISDDLRLQFQRQLISALWSRRMRTIPVHDWLGGVRDDAFSEFLSGKVVRDEAETLRQFIERCGADGDAHGMTLEQFAGDGEQNERINLSTLHSAKGREFRVVILFGMDSGRLPRNGASSNEIREARRTFYVGFTRPKEELHVVYTAARPSSFVVEVQKRMGVIAG

SEQ ID NO: 70982 - protein, 613 aa, Legionella pneumophila
MRACRIDIKNFRGISKATILFPKHGVLIGDNNTGKTTTLEALDLVLGPDRLNKYPPIDEHDFFRGKYRTEPTDVTDKTVNSDKSSNTQEEIKDKSTEIPHIEIEVTITDLTEEQQAKFGDYIEFWDSTTNTLYVKPDPAGIDQVHISEALRVTFHGQYNEEEDDFEGKTFFTRSLTENDTPQPFTKKDKQVCGFLYLRSIRTGSRALSLERGSLLDIILRLKEIRPQMWEDTLQVLSQTEVASNPDLGISPVLESINKSLKKYVPSEWGIEPHLRVSSLTREHLRKIITAFITTDDGNHSAPFYRQGSGTINMLMLAMLSQIAERKQNVIFAMEEPETAIPPYAQKRIVHEVRKLASQTLFTSHSPYVLEEFDIEETIILGRNSDGLLIQKKISLPSNVKLKRYRQEFRTRFCEGLLARRVLIAEGPTEASAFPAVCRRLAELNPDTYASLEELGICTLDADGESNISGMAQLYRDLGKKTFALCDKQSDESKTLIESQVEVILMHQEKGFENLILNNTTETALQRFARLIDWPQHLLQKYPNPEQQASTAVPEYLRKHKGEGVCADFLAQCYETEIPKWLRDACIQLKATCTSSLIAEEAQASSRVDENATD

SEQ ID NO: 70983 - protein, 603 aa, Legionella pneumophila
MQLTEKQLQVMELNGHLLVTGGPGSGKTTISILKASQIAKNHLRPNQQILFLSFARASVSRVTEAIEYEQKIPSTQKKRINVETYHSFFWRIIKTHGYLIGLPRQLEILLPSNESIALSEIRAKFPKRPHTDEQNTAKKSTEQTERIRLAIKEGKVCFDLFATYASDILYGSSRVRHLIATMYPVIIFDEFQDTNDQQWRVVQALGEFCQLIALADPEQRIYDWIGANPARLEHFRKTFNPVEVDLSADNHRSPNVEIALFGNDLLNSNFRQNPYKGVSINYFDSFPAPAMTKLVTEVYAARQRLIEQKVDNWSLAILVPTKKLTRLVSDFLHQPPARMKAVAHVAVIEMDAAILAVEIVGLLLQPSGRKNHFEQFITLICNYFQGKNGDSPTQIALKEAANIRKSYEELLVSQNNGNALRKNSILVNMLTVYNQICALELTGIPEEDWRSIGRTMENGACKRLKEIADEVKNIRLLERGTQLRQQLSQDWRDSQYGNALSIIRQAFVQEHLSMTAKPETGVVVMNMHKAKGKQFDEVIIFEGWPQRVRREIVANPDRIVRFNSKEEINDQARQNLRVSVTRGRQKVTILTPSDDPCILLPKL

SEQ ID NO: 70984 - protein, 613 aa, Legionella pneumophila; identical to SEQ ID NO: 70982

SEQ ID NO: 70985 - protein, 603 aa, Legionella pneumophila; identical to SEQ ID NO: 70983

SEQ ID NO: 70986 - protein, 706 aa, Sphingobium sp. AM
MLIEKIQVKGFRLLEDVELLLEPTATVIVGRNNSGKTSLTEIFDRLAGEHGPKFRLEDFSAGTRGKFLEAKAKRESGGNPEEVLALLPAIAVTLTFKYDPDNGELGPLAPFVIDLDPGCSTAIARIEYAASSASLATLFDVQEAEDGSDGIAHFYRQLRDTLPRAYRISVTAIDPTDPANFRMLDGTGALSALVQCGFVRAQRTLDSSKPSDTAVIGRLLGTLFQTASSMTAAESDQALAAALKTSVSQIEQTIQNDFDTMVKDLLPALSAFGFPGLNDAELRPETSLNVETLLSDHTKIFYTGQHGVHLPEGYNGLGTRNLIYMLLQLETFHKAYRARSLRPGTHLVFIEEPEAHLHPQMQEVLIAQLNAAVAALSAKYVGEPVWQVQFVISTHSPHVANAASFEAVRYFLSSSQDAAGARRTKVKDFRKGSAAIPQEDREFLHQYMTLTQCDLYFADKAILVEGTTERILMPRIVRLVDEGLAPERKLGRQYITTIEVGGAYAHIFYPLLDFLELKSLIITDIDAVRIDKTKDKPRAVKCPCAEGEHSSNAAIRNWFAVPKGQQISIEALCAKTPEDKLSRYRSIAYQVPEDGSSWCGRSYEDALILANPERFGLPEEGDRGLLAWEMAQDLSKSETALRFAIQEADWAVPKYIKQGLTWLSEPPPPPEAPPPLAGVGAGPPPIAAGSDDSPAAPSNAAQQCDL

SEQ ID NO: 70987 - protein, 571 aa, Sphingobium sp. AM
MTNPAVEAAKEAQKRVDACLDEGRNFRLEAGAGAGKTYSLVEALKKLINERGRDLQWAGQKVACITYTEVAREEIAQEIEQHPAILVETIHAFCWGFMSRFQKDLRALVAALEDKQDKIAEAGGVADQIVEYQLGFFGIDEKRITLHHDDVPRFMAHLLGKPKFRALFAATYPVIFVDEYQDTDPHFMAALAEHFLATGTGPRIGFFGDHWQTIYRSDYGLAAYPSLEPIDKGSNFRSVPAVVNVLNALRPELKQAVKDPDAVGEARFFHANSYTGERTSSSSSKNDTPPEISREFMAKLMERLEQDGWDLSSEKTKILMLTHNAIAAERGYPTIAKAYRYNDSFAKKEDPLIAFLVDTVEPMCRAFTEKRFGDMFRILGSRPELSSHEDKVVWATDMAALADARANGSIGDVVDLLKGTGRPRLPDRIVRREQELAAAEDGAELPRSLQEHGLVREAPYQELVRLAEFIEGQTPFATQHSVKGAEFDNVIVVLGGGWNHYNWPQLLELLTTGAITAKNEKGYYRARNLFYVSVSRPKKRLAVLATQTMSATALQTATRLFGSGSIVSITL

SEQ ID NO: 70988 - protein, 689 aa, Streptococcus pneumoniae; identical to SEQ ID NO: 62612

SEQ ID NO: 70989 - protein, 605 aa, Streptococcus pneumoniae; identical to SEQ ID NO: 62783

SEQ ID NO: 70990 - protein, 588 aa, Bacillus sp. SDLI1
MLISNACIKGYRNLKNVDLKLNRLVIFIGENNSGKSNLLKAITLPFLNNEIGNVGKNLGWHDINNDLKNTYFNFIKINLEKIKDSEIDIKDFVSIIPFVSVMVTFEPEGADEYYVRKWNNYLDDGKLLYQIEYRYFVENPKQLLEHITKILADKCEDDVDNMKLNLLPIEMFKYSIVVPTTNEQVAFNDLTSFKYNSLAAERDDFSYKNTKLGSQALVNLLHNKLGDEQKVKVEESYGKFFDDLKEISNLEGIFNWQEISEIENAKEFFDQISLLPNMPSINSLLNNVRLGIGEEYLYSQGLGYRNLIYLLVMMNSLEVNSDIALNILTVEEPEAHLCISNERLLASFINSTIKSSKQMQLFISTHSSEYLNKLELNNVTIVKEGKAFSLTGVAGKEDLEYLAKKPNLDFLKFLFSRRCILVEGPSEEMLIKSYLSFQKNVLNDIEVISLHKGFKNMLDIWLKVNDGTSNRIGIIRDFDDQPKAQLSHEEYNDNHSIFVTTTTEYTLEPEFVKTNKNFEKLKKYFSEEYGWKDDEIKSPDALSDKWRTAKTDIMLNFCQDFGMGHLKDISLPKHIEKVLKFLQSGVKE

SEQ ID NO: 70991 - protein, 446 aa, Bacillus sp. SDLI1
MKIVVAGAGAGKTTTMAEEVLTRYGELKDGKIIYVITYTNAARDHIRNKITEQHGSIPTQIKVKTAHAFLLQEIIFPFHHLLYGQLYSGVSAINLPDNHTYKTKKLKELREKNIIHVEEVTKIARYVVNGKSTDRKVVKDRRLKVISIIKKYLDSIFIDEAQDMDADLSRIIKTFYINEFYLYIVGDPKQDLRGRSELRQLISSYPHFVKYKKENYRCPRSLVKLSNKYVPKEESQEYQKEEEGSIHYLFEKDINISNFFDNETFEYIYIYQKNERFITSDKDRDTHKNLLEYELKCLFKKIDCAENHVEKRAFVLLRWVQKNIIVKNNWGIVNGISDLLSLELSSQDKARMIAALDLNREILFKEGIIVDSIDKVKGLEGDRCLFILTTELAEYFFQNKTKQNKMANYLYVALTRAKKELFILITMEVEERYGRQWIENKLKALL

SEQ ID NO: 70992 - protein, 611 aa, Pseudomonas aeruginosa
MRVSRLGIENFRGIKKAELHFSGHTLLIGGNNVGKSTICEALDLVLGPDRLNRTPPVEEFDFRNAGYLNEDGETPVPLRIEVVLVDLTDDIKKLCAANLEFWHKADKRVLGEGEIGNADDPNVELCLRLITAAQYDIEEDQFFAKTIYGRSDDDDDADPRSIPTKVKRAIGFLYLRTIRTGSRALSLERGTLLDNILRMKEARKGMWESIRKRLATLDPPIDADATELGPILDEIEARLAEYIAPGSEGRSTRLFVSQLTREHLRKTIAFFLTMGRGEEAVPFQQTGSGTLNTLLLALLTFIAELKKDNVIFAMEEPEIALPPHTQRRIANYLLEQTSQCFVTSHSPYVIERFEPDGILKLNRDQHGTLSGTAIKLPAGMKAKNYRQNFRRAIAEAMLGQGVIVGEGITEQDALLVVAQKMEDSDPALFPLDVAGLSVINADGDGNLEKLGAFFKEIGTPAFAFFDRKKRTDAEIATLQGSYVVAKEIQQKGAEVLMAEETPLDRQWQYLEALRTEDADGRFGIPAARPADDELRKLTTSTLKGLKGEGGAAKLLQLCAVAELPKTITDFLADIYQRYPKPKRKEAPAAQVDAGAEAAGDNAAAADDPEEL

SEQ ID NO: 70993 - protein, 577 aa, Pseudomonas aeruginosa
MALVICAQRQSILDENGAILVTGGPGSGKTTIALAKARLVIERGLSLGQSVLFLSFSRAAVARVAEASKTQLPAALQGKLSIQTFHSFFWRILQAYGYLLGAPKSLRLLMPHDEAAMRHEFENNGGDWNVERQRLFRETGRVAFDLFAPKAHELLSRSARLRELFSSCYPLIVVDEAQDTAEDQRQCVRLLSAGTQMMCLADLDQQIYDFRPGVSSDRVTHIMAALQPLRVDLAGENHRSPNSEIVAFANDVLLNTPRGAAYQGVSRINYRANREYRDRAIRQAIGIAIQRAKEAAQGDIESLAVLATWGRGVNVVSRALTGNGANLIPHRVMIDEASVLLSSRMVAFMLEPRRPAAEELLDLADGLDLAATVFRARGGNTNLATAQRLAASAVQSRGGTSPRANGVASKLLDALRTLRIHEFSGDPKRDWLDARSILRNAGANPLQVIAEDAEQLVAFQRGRRISAALTELWQTQGAYRNARGALDTAIAEDQLLSGGNDLRGIHVMTIHKSKGKEFDAAIIFDDPNSSPLLFTQEAAPHPRCRKLARVGITRAKHHVLMLCDMFTPTALLQGHQL

SEQ ID NO: 70994 - protein, 611 aa, Pseudomonas aeruginosa; identical to SEQ ID NO: 70992

SEQ ID NO: 70995 - protein, 577 aa, Pseudomonas aeruginosa; identical to SEQ ID NO: 70925

SEQ ID NO: 70996 - protein, 611 aa, Pseudomonas aeruginosa; identical to SEQ ID NO: 70992

SEQ ID NO: 70997 - protein, 577 aa, Pseudomonas aeruginosa; identical to SEQ ID NO: 70993

SEQ ID NO: 70998 - protein, 611 aa, Pseudomonas aeruginosa
MRVSRLGIENFRGIKKAELHFSGHTLLIGGNNVGKSTICEALDLVLGPDRLNRTPPVEEFDFRNAGYLNEDGETPVPLRIEVVLVDLTDDIKKLCAANLEFWHKADKRVLGEGEIGNADDPNVELCLRLITAAQYDIEEDQFFAKTIYGRSDDDDDADPRSIPTKVKRAIGFLYLRTIRTGSRALSLERGTLLDNILRMKEARKGMWESIRKRLATLDPPIDADATELGPILDEIEARLAEYIAPGSEGRSTRLFVSQLTREHLRKTIAFFLTMGRGEEAVPFQQTGSGTLNTLLLALLTFIAELKKDNVIFAMEEPEIALPPHTQRRIANYLLEQTSQCFVTSHSPYVIERFEPDGILKLNRDQHGTLSGTAIKLPAGMKAKNYRQNFRRAIAEAMLGQGVIVGEGITEQDALLVVAQKMEDSDPALFPLDVAGLSVINADGDGNLEKLGVFFKEIGTPAFAFFDRKKRTDAEIATLQGSYVVAKEIQQKGAEVLMAEETPLDRQWQYLEALRTEDADGRFGIPAARPADDELRKLTTSTLKGLKGEGGAAKLLQLCAVAELPKTITDFLADIYQRYPKPKRKEAPAAQVDAGAEAAGDNAAAADDPEEL

SEQ ID NO: 70999 - protein, 577 aa, Pseudomonas aeruginosa; identical to SEQ ID NO: 70925

SEQ ID NO: 71000 - protein, 611 aa, Pseudomonas aeruginosa; identical to SEQ ID NO: 70992

SEQ ID NO: 71001 - protein, 577 aa, Pseudomonas aeruginosa; identical to SEQ ID NO: 70993

SEQ ID NO: 71002 - protein, 778 aa, Pseudomonas aeruginosa; identical to SEQ ID NO: 64580

SEQ ID NO: 71003 - protein, 625 aa, Pseudomonas aeruginosa; identical to SEQ ID NO: 64581

SEQ ID NO: 71004 - protein, 778 aa, Pseudomonas aeruginosa; identical to SEQ ID NO: 64580

SEQ ID NO: 71005 - protein, 625 aa, Pseudomonas aeruginosa; identical to SEQ ID NO: 64581

SEQ ID NO: 71006 - protein, 611 aa, Pseudomonas aeruginosa; identical to SEQ ID NO: 70992

SEQ ID NO: 71007 - protein, 577 aa, Pseudomonas aeruginosa; identical to SEQ ID NO: 70925

SEQ ID NO: 71008 - protein, 778 aa, Pseudomonas aeruginosa; identical to SEQ ID NO: 64580

SEQ ID NO: 71009 - protein, 625 aa, Pseudomonas aeruginosa; identical to SEQ ID NO: 64581

SEQ ID NO: 71010 - protein, 778 aa, Pseudomonas aeruginosa; identical to SEQ ID NO: 64580

SEQ ID NO: 71011 - protein, 625 aa, Pseudomonas aeruginosa; identical to SEQ ID NO: 64581

SEQ ID NO: 71012 - protein, 778 aa, Pseudomonas aeruginosa; identical to SEQ ID NO: 64580

SEQ ID NO: 71013 - protein, 625 aa, Pseudomonas aeruginosa; identical to SEQ ID NO: 64581

SEQ ID NO: 71014 - protein, 663 aa, Vibrio fluvialis
MKIKNVRIKNYRLLKDVSFSIDEKTTIIVGRNNTGKTSFAEAFRSFLNHAGPKVRYEDFNQSCLTGFEDALNALQGGAEDDVVRPMLPTIELELLINYQDNADEYGVLGDFIIDFDDQLFETIILISYQLKDGKISDFFSGLDSANRKQYFSDLRARIEHYYEATVYAVEPTNQSNSARLEFASFKKLLLSGLINAQRGLDDETHNERDVLGKSLGNIFKSASSVGAPEAFKAQSAEINTVVEELQEIVDTDFQQRVQALLPTLNIFGYPGLNDPNLSAATELNVKSLLESHTRVYYQRDDHFTLPETYNGLGMRNLIFILFRIYEYFREFQSHQTPPKGHVIFIEEPEAHLHPQMQEVFIRQLEQIVEQFQRELNGQQVWPVQFIVSTHSSHIANEADFSKVRYFLSKNGNETKVKDLGVAFQSAEAAGDKEFLHKYLTLTKCDLYFADRAILVEGATERILLPQMIKKVDAALGTNLRQKYLSVVEIGGAYAHHFYKFIDFLELKTLFITDLDAVDSKQHHAAVMVSQGDRSSNVGISKWFGEEGYSDLATIRAKDSDSKILGCRRLAFQVDEDVSGLCGRSFEDAFILVNSQLFQLNNLTGSALENAVYDKAKDIGKKSKADFAIEYCISNTDWLVPKYIQEGCAWLDEDPTVAVEGVQS

SEQ ID NO: 71015 - protein, 583 aa, Vibrio fluvialis
MTALNPAAQASVETLESLRGCIDQGQCFRLEAGAGAGKTYSLIESLKYLISLRANELAISGKQVACITYTNVAKDEIKARTDNNPVIFADTIHAFIWSILQNYQEQLRQLIPTLGEKWQERIAESAGISHQTVKYDIGYASIKEHEISLHHDDVVALMARMLAFPKFQKLLKSKFPIIFIDEYQDTDSALAESIVQNLIDNDSGVVVGLFGDHWQKIYGSSACGLIQSPAGKIIEIGKRANFRSDKNIVECLNRMRPELPQAESDPSSVGGIKVYHSNDWQGARQTGAHWKDDLSEEETRRFIQQTKSLMVEHGWDMSLSKTKILFLTNNLIATEQKFKTLADCFKYSEDYLKKNDKYIEFFVDTVELTALAFQQRKYGELLQIKKKNRSYLTSQADKTAWIENLEKLMRLRDTSTIGDVLDLLIITSMPRVPAKVADSEVRYQTLSARDQNSLEPDELSFVDKIRRLRAVSYSEVINLAEYINDKTPFSTKHGVKGAQFDNVLVVCGRGWNHYNWDQMLEWIDDGVPKGRYETFERNRNLFYVSCSRAKHNLTLLFTQHLSDKSLTALGKIFGNENIKGSPF

SEQ ID NO: 71016 - protein, 576 aa, Vibrio mimicus
MFVEAVLAFPELEEQDASPLDAVPEFFNQMAASGEGEPLKARIRLQATWTDDGTPEGAIEEDIRWIRALDDNFEWDDCSRVQAVERSSIQFIYLPANRDATTQVTALLKGRLWQAAKWSMAFRDASYVNAGQIQSSFEEEEPSKFLLERLSKRWQQVHEADTDSKPRLRLIENRFEELVRKAEFTFTPDEEGQERRLSELSDGQRSLFHIALTAATLETEREAFSLPADDSSFEQDKLRRIHLTILAIEEPENSLSPFFLSRIIKQAREIGALPSAQVLLSSHSPSILSRIEPEEVRYFRMDRSARCSSIRELTLPEDDVEASVYVRLAVKAYPELYFARFVILGEGDSERVVIPKIAEEMGVSLDPSFVPVVPLGGRFVAHFWRLLNDLEIPHATLLDLDLGRRHGGANAMRSCLQNLAAIGSNFGSTNGANAAQLTDQQLYNEGLQGQWLQAFRREGVFFSYPIDLDFAMLLAFPTAYQVANPGGNGPQSSAAAIQAKKVSTLKTGGNPALYTTHYDDAFKWYPYLFLSRSKPETHLAAFSRIAGGGVTASAPVELRALIEYVTDKLNLSGENE

SEQ ID NO: 71017 - protein, 621 aa, Vibrio mimicus
MTRVSRDDWVPQGVGGLEGRAWEALRETDSSILVTAGAGAGKTEFLAQKATYLLQTGICPAPKRILAISFKKDAAQNLAERVAKRCPRDQARRFDSMTFDAFTKGLLDRFRPALPEPFNAPGTYQIVNPFRRDYDDFIERYGYHGVSAQQLERRLLLTDLPIDLSNGSEVHRALADYWHEQFFGGDEISLSFPMINRLVKLLLQENSYIRRALQATYPIVFLDEYQDTTYAQYDMLLTAFDGSDAVFTAVGDDKQRIMGWAGAMNDAFDQFENDFAARRITLLSNWRSHVDLVRIQHEIARRIDDNVEEVQAQGTREIEGEVSAIWQFRSADDENNYLAEWVSREVQSERVAPHDVAILIRMRADQVEGEIAPSFAARGLRIRNAARSVGEIQIQDLLGEELTGIFVPLLRLGATERSPENWEQTQQNYLFLEAADPDNDLTQERLLVKLEAFVRKLRTELAHRQPSPDSAEEIAEMLLEFVGTPRLRQSFPAYQRARDFERVWSGFVTLLKECAEHSSSWTEALDEFEGIGQVALMTVHKSKGLEFHTMIFYGLDNQTWWSLTPQRGEELNTFFVAFTRAKQRAFFSQCVERGHAIGWIQQLLAPAGVETIDGTTILGTT

SEQ ID NO: 71018 - protein, 646 aa, Paramesorhizobium deserti
MKLVRLRISNFRSFEADSTELELDDLTFLLGPNGAGKTAVLQALARLFSLDPAQRKVRKSDFHVPHDEKPDKLPAERELWIEADFEFPELLGKGEKEAPAVPGNFAHMQLMGIEGPAQVRFRLHAKIDQDDDIEETFTFVMKVDGDGKPLEQSRVAKHDRNAIQVHYLPARRDPADHISYSANALLGRALRSADWAGERDKISDLTEEISATLAGNSAIEGMTDTLSTQWGKLHKGDYFVDPAISFDRSEVENLLRHMSVGFTPGHGEQLVDFSRLSDGQQSLLYLSIVLGMHQIGVEVLSGKLGDAFDIDKLRPAVFTLIAVEEPENSLSPHYLGRVVRTLEQFAGGQDAQAVLATHSPSLMRRVQPESVRYMRLDEKRTTVVRCIQLPEDEEAHKFVREAVQAFPELYFSRFVVLGEGDSEEVVLPRLLAAGGILADDASISVVPLGGRHVNHFWRLLHGLGIPHVTLLDLDLARYQGGWGRIKYAAKQLRAYRDVEKIGFDGAQVKSIPDWNSEQGLMLADDGWFELLEEHSVFFSSPLDLDFLMMTAYPGAYGVEDDELEAPDEGALKAVLGKKRDTVKGQYKDDQLKFFDAYNTRFKLGSKPAWHIQAMANLTDKDLADDLPDVLKRLLERIREDLKALPE

SEQ ID NO: 71019 - protein, 553 aa, Paramesorhizobium deserti
MMRVDRWTPSDNLKLEPNALVAATEIDRNLALTAGPGAGKTETLAQRADFLLRTGSCRYPKRILAISFKVDASQNLKARVRKRCGHELAARFDSHTFHAFAKRIIDRFRLALTGKDALDPDYSIGPARVQRQSITFQDMVPLAVTIIESSDIARNAIRQTYSHVFLDEFQDCNKEQYALITACFLDSGAKLVAVGDTKQRIMGWAGALEGIFETYAADFEAEPLNLYQNFRSAPRLRRMQNAMVRVMDPPAALDDAELPGEDGEIEILHFKDATAEASYLADAISGWIEKDAIEPSEIAVLVSKQQNLYCQELRVALRELKVPFREEDQAQDFASEPAVRLLTDFLLVVSGGAQPEAFRRLLEAVIYSESLDDEQEYRARSRWDRYVGDVRQQIATGQINPGDYDALTKLAQELIDMIGRDAVVAFSPDYAQGNRLDQLIEGTVARISDLLDDGSDLSAALTAFSADRAVRIMSIHKSKGLEFHTVIVMGIEKETFWGKIEEERAAYFVGISRAKQRLVLTACDRRDKPEGASRWTSERTDQTEFLGYAEAYA

SEQ ID NO: 71020 - protein, 169 aa, Citrobacter amalonaticus
MPGTKTGLFTNSPRGKACPVHRGTYSSNACLKAWFSGEAPFTLAGLLAKKDSDKILKGNRIAYQCAEVENGPCGRTFEDAFILTNPKLFGLVGKDANSLEIEARSKAEGSKKSEFALKYSISNTDWTSPKYIVDGVRWLASEGMTSPDPALALAKEVSACVVEGEASNV

SEQ ID NO: 71021 - protein, 577 aa, Citrobacter amalonaticus
MFKAQSPAEIASQRALEAMYACLNTGKSFRLEAGAGAGKTYSLIKALQFLIAHNNDAFQKQSQQIACITYTNVAKDEIAARIDRSPLVFCETNHAFCWSLISCFQKLLRTQIEAMPAWKEKIEEIGGTLGQRVIEYNLGHRSIRDHNVSIHHDDVLPLTISLMAHEKFRRIIANRFPIILVDEYQDTNNEWIEAIKTHLLGKPGAPLFGFFGDHWQKIYGGGCGKLEHPCLTEIGKEANFRSVKVIVDSLNRMRPALQQFVKDPDAEGEVRIFHTNSWQGERRKGGHWGGDLPASVGLTTLEHVKTMLAREGWDLSPCRTKILMLTHKLLANQQGYSNLAAIFKYNESFTKKENQHIAFFVDKLEPACDAFAAHKYGMMFEALGGFSPLLRSHADKASWHNAMTQLLAIRDTGTVGDIIEHLRTRKKPRLPDNVEKRERELRDFDKTAGVEMPRVLEELEKLHQIAYSEVKALRHYLDGHSPFETKHGVKGAEFENVLVVVGRGWNQYNFAEMLELAGTQVISAAKEDAYERNRNLFYVACSRPKKRLAILFTQSLSPDALATLESWFGKETIMPVP

SEQ ID NO: 71022 - protein, 583 aa, Enterobacter aerogenes; identical to SEQ ID NO: 63878

SEQ ID NO: 71023 - protein, 591 aa, Enterobacter aerogenes; identical to SEQ ID NO: 63879

SEQ ID NO: 71024 - protein, 663 aa, Vibrio parahaemolyticus; identical to SEQ ID NO: 63134

SEQ ID NO: 71025 - protein, 583 aa, Vibrio parahaemolyticus; identical to SEQ ID NO: 63135

SEQ ID NO: 71026 - protein, 709 aa, Streptococcus mitis
MRIDKITIEGYRRFNKSTINLNHGNFAILAGANNSGKTSLIQLLDIVFNNKSRKSVGFNDFSISLKSLLDKKVKELDLSSDFNDEKFIEFINYINEHIKIKLQIVLSYDVEESIGLFANYLMDLEDDMRNFYFEYNYKLNTEVIKEEFIKQDIKSATILQEIIEQNTESIYFYADKDFNNKKIIEYKDFKKLFHFEYISADRELDDENLKNKKITTSIISSSDSTNRDSVWDSKFDELKNKIANDLAESEIDCSFQKETQKILSDLKGSLDNVSKNEIEALEAKFHFNEKNLLNLIKDSLLINYSHSTDEFLFSLTEESQGLGISNLIYMSLQIDRFSRTIQPTTVNLFVIEEPEAHMHIQMQKVLVSYIETIFSSKKNLQGIITTHSTEIVKNVDVNDIKVIRSENNFMNRIVDLHQFINDNGEKEFYETFFKLNFADLIFSDAVIFYEGDAERMYFESLINRKDSKYSNLARQYLSYCQCGGAYAHKYFPLLNELEIMACVFTDIDYDKEREELDGICRDKSSNTTLNSILSADNKDVADIYQQQSQDREKNIEIFTQTYRDGYARTLEDALLYKIISPTGEMKSVFEKFNKSEWDKFNESFELTLPNITSGKECSMKREEIYNRLDISKENRKIDYLRDNHPEEYAEYEKFKETCEPKRSIRDIVSIIDKTNFMYSIIFKDKVNEVLPNYIEEGLSWLNNKITSTK

SEQ ID NO: 71027 - protein, 658 aa, Streptococcus mitis
MAQQQNNFYKINAPAGSGKTYFISKTINDILNNEPFVKILCITYTNRASQVMQERIVSPNVEISTIHSFLNKFLKPFFRNEKVIDYYLEIYKEEIETTLKEETKLNRYKERFQVEGEVSEETIKSNLYEIYYNERQYSSVLNGGLSHDDLLNFSFKLIDRFPKIGFKLREMYDYIFIDEVQDTNADILRFFYNSAKDSSTNVYFLGDKMQEIYNKYDGSFETEFREFDGNLSKTFTTNYRSSEEIVDLLNNLYQSSSRVKQVAYKGKKGQFPQLVFTDNIEKYLFDNREAYEEFYKLRTINKKRFQNINNSGKSAEEIYKIYQKIYPNNGRVSVMDVLVNSNYDENPDVLMSFLSLLFQVLSEYHNKNYGEMIRLLKNSKNNLSFGKSVPVFDSNILKIEFHQDKVKMKEKMDLFVKLLESKDLLGIVIQELVANKVISDDFYKFIFLYDKNGDFLYTDLFCSSIELFKLIDEYNRTPMVSTQHGVKGEGHKKILFVAENSSTPGIKIYEFLNLFSSFYTQNIVFNFDIFQQFYYDFNNDILSLEEKLGKKIRKIDVGDRERYFSDFQEIFNKYLDNDYFKFICLKENKLNFQKKTAIKKIQENIFNNNLVRSVLTAYKLFYVGCSRAEEELVVLIDANQIDNMEEFKNCFNQIGFQI

SEQ ID NO: 71028 - protein, 702 aa, Clostridium propionicum DSM 1682
MYIQELNLTNFRGFKKSTKIQFTKDINVIVGANNSGKTTIIKALELLFSEGSSKRLSIDDFNHNTSIEELKTSPPKIVISAKLVESENEEEYSEDLITVATWLTKIKKPYEATITYEFSLPDKEEDDYKSIIGKLTNKDIEDYWREIETTFLRKYTSKIFIGNHKHRTSVDSDSIKKFDYQYLDAIRDVERDLFTGRNTLLREVIDFYMDYDIKIDEKLSKKDKQEQIRLKKKDFSKKADVLIADLHTRMSGGKKEMLKYAEKTGADFDNITPSFDGKILDTELYSALRLVVENKTGVKLPATRNGLGYNNLIYISLLLAKMQKNASGEYMGNNAKVFPVLAIEEPEAHLHPNMQYKLLKFLNENSMHEVRQIFITTHSPSITAAVDLDSIIVLYKSEDETKIAYPGKVFSQSEEDQASKKYVERFLDVTKADMFFAKSIVFVEGIAEQLLLPEFAKYSNLDLTDSHVSVINVNGRYFNHFLKLFDTNKSQYAIPKKIVCLTDKDPVMKKIKDKTTEEDDENSSWKSCFPFLLESDKLNYEYKKTSNPLTELYQQREKTDLIRVYTQKEGSTFEYEMILENIKCDQLLTESVANKEEIKNMMEKYHDDINKSQTEDLVKNMRNGKFKDIINNFLQITKLEPSRIAKHIIAARYLNSIKKGEVAQELSYIISSNIKNSSDTKEKVFDFVVPTYISEAIKWICQ

SEQ ID NO: 71029 - protein, 571 aa, Clostridium propionicum DSM 1682
MDLSVAKKLKDSDERINISNHFKIVAGPGAGKTRFLINHINHIIEKSDKISDIRKIACITYTNVGVETIISRLGKSIDYVDVTTIHSFLYLNIVNPYLWVLEDDYKFDFINIDGHDDIVPTFSIMNEWKRRTRQYALNDNNKLAKELSKLHWYLDDGELILRFKEIWEGKVGSYNIKKDSYLEYKKICWEKGLLSHDDVLFLSIKIIEKSPRILEIIRGKFPYVLVDEFQDTNPIQTKVLKLIAEKETIVGVIGDECQSIYKFQGADVTQFTEFDLPELKTYYIEDNHRSTQEIIGILNYMRNDKNFHQESPENKHGHKPTILIGGFIDSYNEAIKLCNKDELYTLSFKNELCNMIQYGIDNYFSENIFDEFIFSDGDRGKMIFYIIHSLECCKQDKFKDAIKYMKKAYRKIKDFDDKATLENLKRLYNLYSRIQQINIKELYNNYIFGFYGVKAKVTSGKANNYYKNLTYNKVACVITIADDDGKFRTIHKAKGDEFKNVLLLLEPKEQYNEETELSFLLNPDMGNESHRVYYVALSRTMENLYISIPQLSDENRRKLNNFEIREVRTKS

SEQ ID NO: 71030 - protein, 637 aa, Clostridium propionicum DSM 1682
MYLSSLQIKNFRCFNDDGHIINFNPGLTVLVGENDSGKSAIMDAIRIVLGTTDFGWIRIETNDFFNEDISREISISCKFTSLTPDEQAYFLECLTYEKKGAVNTPCLYLHWKCKYLLSFKPPRPVSSFSTGKDGNGPAPSSEARELLRITYLRALRDAYSDMQAGRHSRLSQIVQNIPGLNQGKSEFQDGMDIHELSLVGITNLSNNLLAAHPSLKSINDDMTEILGKQMLLKKDIIKTRFEVAGSNSNDLQKTLALLEKLDLAVDKNASAMQGKVGLGTSNIMSMACELLLHKEAETEKKSSFLLIEEPEAHVHAQRQLKLIQSLENEAESKQQQIIITTHSPLLASVVKIDNIVMVKEGQVLPLAKGHTMLDDDDYRYLEKYLDATKANLFFARSVIIVEGPGEALLLPTIAKLLGCSFTDFGTSLVDVRSTGLRRYARIFQRSNIDDTWGIKVACVTDRDVMPNCAPGICIDEKYTLDPSTWPKKEDRNWRAEADFTLEEATSHLKNIKQKADGQQVVTYIADHWTLEYDLAFAGLSHSKMQEALIRALVKVSYAKQNWDKKTDDIKTAIKALPTLEDRSSYFYKYFAKKTASKADFAQQFAFELEDAFTGNVSELKSMLPSYLVDAIEYVAGE

SEQ ID NO: 71031 - protein, 642 aa, Clostridium propionicum DSM 1682
MGIERLEQIKITDDDITWVESIMGFRFNNDRVNIIKNLESIDVQAFPGSGKTTTLIAKLAILARKWPYNNSGICVLSHTNVAREEIEERLGNTDIGRKLLAYPHFIGTLHSFFDTFVALPWIRSKGFCMNMIDSDVVRKSRWYMLPRGTRVYLEKNYRDAQICSYNGNIGRIDWDKQGETRQKILEAIQKSQSDGNFTFDEMLLYAKQAFDECDSLPVGLQQRFPIIFIDEAQDTNSFQWELIHKAFPEASGMTIRQGFGDSNQAIYNYVNEIVERPAFPRPSPLLLSESKRFDNRIAHLANTVAISAEQMKGTENDFSGKQSSHTLYLFSKDKVGQVIEEFAQLLLDTFSDEELLKNKKRGCHVIGMVHVKKDETTEKQFPKGIYDYWPNYEARRTSKSINPNSLIEYFRMGRFEFEKNNELCAQIEWIAKGIRRLINKAKGQNLIAATNNPFLSIIKQFPEEKQLEIRKDFYVLSSADISKEEEWQSVVSILKDILKGLDLTINEKVKEFIAWTNENYFSCNAQEAIPQVMPNHYVFEDKISERCVDLEFGSIHSVKGRTHLATLVLETYSKAHNMKAILKYLCNKPPKSVGSNHSRLKCQYVAMTRAKALLCLAMPIEFVDDKAQKSLQDTGWTIKVVD

SEQ ID NO: 71032 - protein, 594 aa, Enterobacter cloacae
MYLSNLRIANFRNFETVDIPLDGNIVLLGENRVGKSNLLFAIRLVIDPTLPDSARQLKLSDFWDGCDLSTSPQIEIHLEFADFDSDASLSALLTDFRIAENPALARLSYVFRKKEDIAGEPKSSEDCEFIVFGGGQEQRTIPSRVRRRIAIDMLDALRDAEAQLASWRNSPLRPLLEDAFGSLSRADLDRVASALESATGTMEAFTPIKNLEESLRGGILNLAGTAHDLNARLRFAPTDPLRLMRSISMFIDDGKRGITEASLGSANVALISLKLAEFAWRRAKNERNFSLLCIEEPEAHLHPQLQRAVFDKLFNNADKAQSLIVTSHSPTLASIAPLRSVVRLCRDDSGRTHAFSLAELPVTTDELDDIERYLTATRAELLFAKGVIFVEGDAEEVLIPGFAEAMGLNLDELGITVCSVAGVNFEPYVKLAGSLGIRMAVITDWDPLDGSKQPLGKARAISIWDAFCAVRPESYKLSAEWKAWFVDKGFEECSDVWKKVGIFLSPQTFEVSVANTPILKDALLNILDAQGFGSLRSSRIASWRAGQDPDPGQLLAMISDIGKGRMAAKLKKKAIGLAPPEYIAAAIQYVVSNV

SEQ ID NO: 71033 - protein, 593 aa, Enterobacter cloacae
MSDRHALSMALSELSSNKEQYGAATEQGHCVVIAGPGSGKTKTLTTAMARALMDDITDPRGVACITFNNECAAELEERLACFSVACSERNFIGTVHSFALNQILIPYSRCIPGLLPNDFRVATRDECRAAVEAAYLAKFGAIGDPHTRWKFAEEKRRRDVNRLLPSWRSNNPELADFIELYEAHLRRLGLIDFDDMPLIAFRMIREHDWIRNGIRSRYPVLFVDEYQDLGHALHELVLLLCFDAGIRLFAVGDADQSIYGFNGANPRLLDSLVSRADVKTFRLRFNYRSGAKIIRASMGALGEERNYRGPDGTAEGEIGFHGVEGDYEKQARYIAQDLIPSLTERGFKPERIGVLYRAAWLGDKVADALKAEGIAFMRTDTNALIKRNSRLARFIEACSQWVTGGWKEASPAFNLLLGQALSLVYGRRASRTEEQLLTVQLITFLRSGIDQAETAHQWLLRFDKELISGWQIITENPQVEWNVVKELLKRTDPALKQDMALIVFAGKEESTRRITLSTLHSAKGREFDVAIMFGVNKYDFPGKRDLVSDNALREARRLFYVGVTRPRKELHMVYRKGEHSPWIAELYHRSQQT

SEQ ID NO: 71034 - protein, 641 aa, Alteromonas macleodii; identical to SEQ ID NO: 63770

SEQ ID NO: 71035 - protein, 558 aa, Alteromonas macleodii; identical to SEQ ID NO: 63771

SEQ ID NO: 71036 - protein, 565 aa, Alteromonas macleodii
MYIKKVTINNYRSFRSFEAKLNQLTLVIGENDTGKTNFFTALSLALSGNQIDFKHKRLSVSDINKDAVIDFLTSIINEDTEENLLNKIPKVSVTVDFADPKDAYETALLAKWIMAHGDKETYKIRYDFKPKQDKDFLEVVKKSFAGKGLDEINWFTLPVELYDYQIVSVNNEKPIAYSDLRHVSVHSINAERDDFSESSSMKSNSIFTKLLMNTLSDDDKGQINSAYSEFFNAIENTDTFDKVIGTNEDFENYDSIIKQLECTPNLPNLKNILSNITLKYGDEFLYQKGLGQRNLIYILVLFAYYKSCGETFNLCCIEEPEAHLSVNNLRLIRDFIEKSANNSGSLVQTIISTHNPSIINKLKISNVLAFTGAKAVSLSDTPTKLVDYLRKRPNFDILKLLFANKVILVEGPTEEMLINTYLSKQTTLNDIDVIPIGQRGYATFLDIWLTLNKDNKKKKIGVIRDYDNSDAAKARHDEYDTAHDNVTVRTTTNYTLEIDLVEAEDNLALLNGLFKMNGNLEEVSEHMINGKTARMLDVCDAMIDEHNPLDIKLPSHIAEIVETLS

SEQ ID NO: 71037 - protein, 457 aa, Alteromonas macleodii
MIEVQIAGAGAGKTYGLAVSLIEHIKACASHKKTFALTYTNSATAKIEQEIIKRHGFIPSNLCIQTVHSFLLNEIIYPFSSFTLGDVYNDTSIMILPPPKYKNSLFARLRKTNVIHTDNVYNIAKQIVDKTVSKHNNKAKKARVQRLLAILESCFDKIFIDEVQDLDDDALRFFEIIGSNDIDVYMIGDPKQAIKYPLALETFITKIAPKEYANILPINNQTRRLPKEILAVSNSFCYEDQQQESLSEVVGELMYIESVDERYDDLLTNYIDTKQLVCIDKKNGRYTTSSKHKHAFPREIEEMIRESNHKKDKTLIVKAAFSDFMDAVVNGGNKRAIQELIVRYSLTLNKQHFAQLHELCNSCAKDDVQFKVQSIDSIKGLDADTCLIILSSNTLKYLTQNGIGKANRFNKEWKRVYVALTRARKRLVLALDHELLAKEDIVAVRDSIGELGFIYHD

SEQ ID NO: 71038 - protein, 641 aa, Alteromonas mediterranea; identical to SEQ ID NO: 63770

SEQ ID NO: 71039 - protein, 558 aa, Alteromonas mediterranea; identical to SEQ ID NO: 63771

SEQ ID NO: 71040 - protein, 641 aa, Alteromonas mediterranea; identical to SEQ ID NO: 63770

SEQ ID NO: 71041 - protein, 558 aa, Alteromonas mediterranea; identical to SEQ ID NO: 63771

SEQ ID NO: 71042 - protein, 605 aa, Sphingobium sp. TKS
MYLSRIRIQNFRNFQDLDVALGGNVVIVGENRVGKSNLLFGLRLIFDPSLPDSSRQLGLSDFWDGLAAVDANTTITISVEIKDFEDDPDVLAVLTDFRLDDDPDTIRLTYLLRAQPGLGHPPVSDDDFSFVCFGGESEAKRFGHDLRRRITMDLLPALRDAEGDLATWRRSPLRPLVEDAFVSIDMAELKEIGDKIAEASKAAIEFDEVKALETKIGELFVAMAGPKQNVQPSLGFSATDATRINRQIRLLIDEGRRGVADASLGSANLIFLTLKLLDLQRLIENNKRDHSLLAIEEPEAHLHPHLQRLVYKHLFETIVDGDADQDEDGDGAGPLSVILTTHSPHIASVAPLESLLLLRSQDGEGTKGYSTASADFSESETDDLSRYLDVTRAEMVFARGVLLVEGDAERFLIPAFASDMNISLDEYGVSVCSVAGTNFQPYVKLLCALGLPFAVITDCDWVDEKPRAYNRALKLIDTIDRARGGADTNALIKGIKDLETWEDSFVECKAFGIFVNSGTLETELFEGNYAKEMIETLREHNFGQKRMALLDAWEADPKSYNSDEMLKMIEQLGKGRYAQRLATRVPGKLVPDYIADAINHVIDLV

SEQ ID NO: 71043 - protein, 594 aa, Sphingobium sp. TKS
MSDRALYLRAAEDLRPNDKQWQAYTSAEHCVLLAGPGSGKTKTLTVKLARMLSEDVEDPRGIACITYNNECARELETRLDALGIAPGGRVFIGTVHSFSLTQILLPYSKVAGLGLPDDFSVASRRQTRAALEIAHAKVIKGAENPQTWEFRLGGHRRRFLNRDVEAWKTLDPQLTRLVEAYEAELRKMGVIDFDDMPLLALRALAEHAWLRRALAAKYPILAVDEYQDLGRALHAMVMGLCFSAGIRLFAVGDVDQSIYGFTGANPELLRKLSERKDVETVRLGLNYRCGSQIVTASEYALGEKRGYKVPDGAHEGTIYFHPCTGGYAGQARYLIEQLIPEIRARRPNLNLGEIAVLYPAAFIGNEVASVAADNGYAVIRTDGNALYPRGSRLMRWLEQCAMWCCGGWRSGQPRISRVIAEGARLFHEVLGSDDDRLELQRSLIAALWCRRDDTIGLRDWLIALRDEIIRPNVGQARSLADELETLNTFIGRLGPMGDVDDFPLGEFAGIGSGLDRINLSTLHSAKGREFDAVILFGMEEGRLPRNNASETEVREARRLFYVGFTRARHEIHLMYAQANPSRFVSEVKNRLEEA

SEQ ID NO: 71044 - protein, 688 aa, Sphingobium sp. TKS; identical to SEQ ID NO: 63456

SEQ ID NO: 71045 - protein, 590 aa, Sphingobium sp. TKS; identical to SEQ ID NO: 63569

SEQ ID NO: 71046 - protein, 696 aa, Chryseobacterium kwangjuense
MYISKISIEGFRNFPQNEILFNDGVNVIIGHNNSGKTSLIKAISLVINSETPRRLELDDFSKSTTLENLQRLPPSVSISLTFKKSTDEPPNSEDLVTVSNWLTVLSADYEAKLTYKFFLPIEKHDEYIDSLQECDTKDKAWQVIKQDYLRFYTYKIYGGDPSLLQTADSESLQKFDFQFLNAIRDVERDMFTGRNTMLKEILDFFLDYDIKSADEAVKTSEVKLAEIKAAKQAFSVQATALITELQIRMRAGKDQILNYARQTGATFNNATPDFDGGISEVELFSALKLIIGYTGLDIKIPATHNGLGYNNLIYMSLLLAKMQVNSDGKYLGSNAKVFPVLAIEEPEAHLHPSMQYKFLKFLKENRLERKVRQIFVTTHSTQITSAVSLDDIICLHNGGNTITAGYPGKCFAADAAGQESKAYVQRFLDATRSDMLFAQKVIFVEGLAEQILLPTLTKYIGTDIEDHHIAIVPVGGRHFDNFLRIFDSTQPFTIPKKIVCLKDRDPERKLKAARSYTKCYTFESGQDNVLYDYVNHIEGKVVAHATHPNIRFFGQNHKNGKTFEYELMLSNLQNDVLITNSISNRDELSELIALYNTGSLMGDLLNRIHHSPAATNFRNAIEALADPAWTEQEKNQSILAQRYLSSVGKGENALELATFLEENILLPDVPANPGDSIKKAFNVPDYIQQAIHWICQ

SEQ ID NO: 71047 - protein, 583 aa, Chryseobacterium kwangjuense
MTTITSETIIDTEEHFRIFAGPGAGKTHWLVNHMRHVLHTSKKLGTTKKIACITYTNIAVETIVKRLQFGADRIEVSTIHGFLYSNVIKPFIGNIADEFGFNVVKMDGHEEHRPSRSKIVQWLNQSPGAQRLRNPYTINQLTSLPYYIPGLVNWLATIDYKLYGDDINIFADNRQAYYYPANGDRRNFGSATCLNILTPELFLYKKLFWGRGILHHEDILFFSYILLRRYPFIVEVLKTKYPYFFVDEFQDTSPIQSRILNMIGENGTITGIIGDQAQSIYSFQGADPAHFTDYQLQGLKDYRIIDNRRSTNEIVGVLNHVRPDMDQRPLRDVPGDRCTLLIGNYRLASEYTRNICGENLTILSWDNLTARELRTQMTADRPETNLIEEMSSFDNSDRRNALISSLRAVEFAREKRFKEAMKEMQFNYRHVVNKNDRKAMALQGLSRLLSNFEEFKDRSFFEFYSHVRTNISTNFPAATRGKAKEFYDNYTYQQISVCLRIDDEKSPSKTIHKSKGDEFDNVLVVLKKEEHCDFLINQTLHKEEHRIFYVAVSRARERLFISVPTLEEDKLRQIEHLFEVNNL

SEQ ID NO: 71048 - protein, 688 aa, Bacillus sp. JH7
MYISRLTLKNFRTFKNETTVQFHEGTNVIVGHNNAGKTTIIKALELLFDANKSKRLSIDDFNKNTTCDQLKESAPKITISATLVESEKEEIYSDDLVTVSTWLTKLEKPYEAKLTYEFFLPEKELEDYYKDIRKIEGTNINDYWNEIKNNYLRKYVHKIYVGNIENKTLIDTDSINKFAFQFLTAIRDVERDLFTGSNTLLKEVIDFFIDYEIKTDISITDEEKKIKIREKKELFSKGAQSLIQSLQDRMREGKKHMLQYVENTGAAFDKMQPSFEGGILDTELYSALKLIVENETGIKLPAVNNGLGYNNLIYISLLLAKMQKDASGEYLGTNAKVYSILAIEEPEAHLHPNMQYKFLKFLKQNRETEVRQIFITSHSPSITAAVDLDDIIVLYKNEEETKVAYPGKVFNESLDDIKSKKYVKRFIDVTKADIFFARNLIFVEGLAEQLVIPEFATALGYDLTDTHTSVINIGGRYFEHFLKLFDTSKNPNAIEKRIACITDLDPVRKEKGRKGAKWVTCSVLALNNDIEKYDYNSCSNLFVNKSKSNSSNHIKTFTQKENESCTFEYDLILHNITCEKLITDSTSNQEEIRDLMLAYKEDKSINDMLEYIKNKEYKAKKEIELQNTPILDDDKKKHIIADRYLMSISKGELAQELAHEISIMEPSDNMIVCPNYIKEAIKWICQPQ

SEQ ID NO: 71049 - protein, 571 aa, Bacillus sp. JH7
MDLSTAIKLKSSNDKIQIDNHFKLCAGPGAGKTSFLINHINNILSHSTRLSKSRRVACITYTNTGVETILSRLNNMTNEIEVSTIHSFLYNHIVKPYLWLLDDIIFPLDKLDGHDDIKPGYTLLKTYKEKSNQNWITDNQKLSKALNKLTWYINEQDVIELKFLKSYHGKLSEKTSVKRDSYMLYKKLCWEQGLLSHDDVLYFSYLLIKRNKKIREIIRAKFPYFLIDEFQDTSPLQVAIIKLLAKKEMVVGVIGDPCQSIFSFQGANVSTFSQFYLENMSLYVLENNHRSTEQIISVLNYVRKDEHFVQHSPDNKLGNNPTILVGDALTCYYQFKQNCNDEEWCVLAYRNETTNGIEFGIEDLLLDDINDLLYKDGKRGKMIYFLIHGIEYGRQLKLKEALKFIKKAYKDEKGFMEKDAIKVLKNLLNEYEVFNSMSIKEFYNTYIFNQYGVKKQIKSGNISDFYQNLKYINMAALVNVADDASLFKTIHKSKGDEFDNILLIIPESKYPTFLTFLLSPDMNKEEHRVYYVALSRAKKNLYVNLPKLTEEEMKLIKNFDKKVLSKELVFN

SEQ ID NO: 71050 - protein, 527 aa, Listeria monocytogenes; identical to SEQ ID NO: 64370

SEQ ID NO: 71051 - protein, 793 aa, Listeria monocytogenes; identical to SEQ ID NO: 66691

SEQ ID NO: 71052 - protein, 638 aa, Listeria monocytogenes; identical to SEQ ID NO: 64506

SEQ ID NO: 71053 - protein, 635 aa, Listeria monocytogenes; identical to SEQ ID NO: 64507

SEQ ID NO: 71054 - protein, 638 aa, Listeria monocytogenes; identical to SEQ ID NO: 64506

SEQ ID NO: 71055 - protein, 635 aa, Listeria monocytogenes; identical to SEQ ID NO: 64507

SEQ ID NO: 71056 - protein, 638 aa, Listeria monocytogenes; identical to SEQ ID NO: 64506

SEQ ID NO: 71057 - protein, 635 aa, Listeria monocytogenes; identical to SEQ ID NO: 64507

SEQ ID NO: 71058 - protein, 690 aa, Listeria monocytogenes; identical to SEQ ID NO: 62956

SEQ ID NO: 71059 - protein, 577 aa, Listeria monocytogenes; identical to SEQ ID NO: 62969

SEQ ID NO: 71060 - protein, 690 aa, Listeria monocytogenes; identical to SEQ ID NO: 62956

SEQ ID NO: 71061 - protein, 577 aa, Listeria monocytogenes; identical to SEQ ID NO: 62969

SEQ ID NO: 71062 - protein, 638 aa, Listeria monocytogenes; identical to SEQ ID NO: 64506

SEQ ID NO: 71063 - protein, 635 aa, Listeria monocytogenes; identical to SEQ ID NO: 64507

SEQ ID NO: 71064 - protein, 527 aa, Listeria monocytogenes; identical to SEQ ID NO: 64370

SEQ ID NO: 71065 - protein, 793 aa, Listeria monocytogenes; identical to SEQ ID NO: 66691

SEQ ID NO: 71066 - protein, 677 aa, Bacillus subtilis subsp. natto; identical to SEQ ID NO: 63176

SEQ ID NO: 71067 - protein, 627 aa, Bacillus subtilis subsp. natto
MVIFLNNYVKKDNWIPKDSVILESAAEDVIKYEKNAYVLAGPGAGKTELLAQKACYLLETNISTYPARILAISFKKDAAKNLKERVEKRSGKEFANRFVSLTYDSFAKQLMDRFHLAIPDFYRPTLEYEIVNFNRRDVTKLREEAEEPIGKIGWNYYFDYDLFAKTYANDKLPLITEKIDSIESWYKYQLWKSYINDKESSMLTFPMISRIVEYLFRSNPKILRAIRATYSHVFLDEFQDTTLIQYDLVRTIFMDSNVSVTAVGDLKQKIMGWAGAMEGVFNQFKEDFKAKDFELVLNHRSAPNLVRIQTSIINDMMGGSTVISPSDKWKNEEVGICEVWNFTNASEEAKTLALEIKTWIDQEKLQRRDIGILVRQRADMYCDMLINELSNLGIHSRIEDQWQDLLAENFMKYVIDVFSLATTDRDPNAWSSLISNVLNLRGENETKSYQIETEINSFIVEFKKTLKDETLKVTEKVVEQWLFKILTLVGLELIKGSYPEYRKGDYLERKVKQTAEFLFYSFEKHKVWNKAVDDFLGIFSIPIMSIHKSKGLEFETVILLGLEDGAFWNFENSPDDETFTFFVALSRAKTRMIFTFCKNRFYGQDKSKINVIYQMLENADVKQFEWT

SEQ ID NO: 71068 - protein, 641 aa, Salmonella enterica; identical to SEQ ID NO: 62984
  subsp. enterica serovar Typhimurium str. DT104

SEQ ID NO: 71069 - protein, 553 aa, Salmonella enterica; identical to SEQ ID NO: 62985
  subsp. enterica serovar Typhimurium str. DT104

SEQ ID NO: 71070 - protein, 641 aa, Salmonella enterica; identical to SEQ ID NO: 62984
  subsp. enterica serovar Typhimurium str. DT104

SEQ ID NO: 71071 - protein, 553 aa, Salmonella enterica; identical to SEQ ID NO: 62985
  subsp. enterica serovar Typhimurium str. DT104

SEQ ID NO: 71072 - protein, 641 aa, Salmonella enterica; identical to SEQ ID NO: 62984
  subsp. enterica serovar Typhimurium str. DT104

SEQ ID NO: 71073 - protein, 553 aa, Salmonella enterica; identical to SEQ ID NO: 62985
  subsp. enterica serovar Typhimurium str. DT104

SEQ ID NO: 71074 - protein, 641 aa, Salmonella enterica; identical to SEQ ID NO: 62984
  subsp. enterica serovar Typhimurium str. DT104

SEQ ID NO: 71075 - protein, 553 aa, Salmonella enterica; identical to SEQ ID NO: 62985
  subsp. enterica serovar Typhimurium str. DT104

SEQ ID NO: 71076 - protein, 641 aa, Salmonella enterica; identical to SEQ ID NO: 62984
  subsp. enterica serovar Typhimurium str. DT104

SEQ ID NO: 71077 - protein, 553 aa, Salmonella enterica; identical to SEQ ID NO: 62985
  subsp. enterica serovar Typhimurium str. DT104

SEQ ID NO: 71078 - protein, 641 aa, Salmonella enterica; identical to SEQ ID NO: 62984
  subsp. enterica serovar Typhimurium str. DT104

SEQ ID NO: 71079 - protein, 553 aa, Salmonella enterica; identical to SEQ ID NO: 62985
  subsp. enterica serovar Typhimurium str. DT104

SEQ ID NO: 71080 - protein, 641 aa, Salmonella enterica; identical to SEQ ID NO: 62984
  subsp. enterica serovar Typhimurium str. DT104

SEQ ID NO: 71081 - protein, 553 aa, Salmonella enterica; identical to SEQ ID NO: 62985
  subsp. enterica serovar Typhimurium str. DT104

SEQ ID NO: 71082 - protein, 641 aa, Salmonella enterica; identical to SEQ ID NO: 62984
  subsp. enterica serovar Typhimurium str. DT104

SEQ ID NO: 71083 - protein, 553 aa, Salmonella enterica; identical to SEQ ID NO: 62985
  subsp. enterica serovar Typhimurium str. DT104

SEQ ID NO: 71084 - protein, 641 aa, Salmonella enterica; identical to SEQ ID NO: 62984
  subsp. enterica serovar Typhimurium str. DT104

SEQ ID NO: 71085 - protein, 553 aa, Salmonella enterica; identical to SEQ ID NO: 62985
  subsp. enterica serovar Typhimurium str. DT104

SEQ ID NO: 71086 - protein, 692 aa, Bacillus cereus
MYISNINITNYKNFRTNSIDFNNGINVILGHNNAGKSNLLRALALIFNSNSKKHLSIDDFNKNIPIEELKEYPPSIKITATLKQDDCEDLMSDDLVTVSNWLTRLEEPYEAKLQYEFYLPTKFHEKYQSVINEAENIFEVWQVIQDEFLRLYTYKIWGGESTNQITADSESLQKFDFQFLDAIRDVERDMFSGKNTLLKNVLDFFMDYNIKSDKTLEKEQKEAEIKIKKKKFGESAGDLISLLNERMTEGKKHILSYAQDIGASYDKSTPNFDGSITDIELYSALKLIVEYKTGIKMPIINNGLGYNNLIFMSLLLAKMQVDASEDYLGSNAKVYPMLVIEEPEAHLHPTMQRQLLNFLKKNLKNKKVRQIFVTTHSTHIAGAVNLDELICIYKNQSETLIGYPGKTFGDNKKSKKYVQRFLDATKSNMLFAEKIIFVEGLAEQLLMYIFAEYLNVSLEDNHIAVINADGKYFDHFLHLFNISNPNAIRRKIACITDRDPEWKNLNPSDKSKKISFKKCYPFEMYIEETGYEYKRNEEKNGYPDNIRFFMQDENYGKTLEYDLVRFNPKFKGLVTESTTNRTEIFKLMDQYSEGKSLDTMLGSLNTSEENERIRKALADERLKWKDEDKKKALIASRYLNSVGKGENALELAYELEENLLKKNIAGEEESTKFKEFIVPDYIKEAIEWMCEE

SEQ ID NO: 71087 - protein, 580 aa, Bacillus cereus
MILISSEDTIDIEQHFKVTAGPGAGKTHWLINHIKNTLKNSKRLEKTRKIACITYTNIAVETILNRLGTQSVSQVEVSTIHSFLYSHVVKPYLTHIAELFDIEIQKIKGHDTIEPKHNKVQFWLENHSMNDKLRHPYTINQLIKLPENKEALFDWLSSVKYSFNSELKLNLRGKDSKAKQLRKIVKILETDLFSYKKIYWKDGKIDHDDVLYFSYELITRYPFILSVLRAKFPYFFIDEFQDTNPIQAKIVSLLAEEETIVGVIGDPAQSIYSFQGASIEEYLKFKIENQSEYTITENRRSSNQIIDLLNEIRTDIDQTTIRNVDHDRPILFVGNSMEAYNEIQEKYGNGMFIQTLARDNPTANAMKFAVDNSKLNTKLLDELALKDNTKRFNIIKNSMEALEFAKHSDYKNAIKIMSANFIRYSEKEQFKKSVLVLQKLIQRQGTLLEEPLMEFYQLIREDIEMPGFRKGASQDFYNTYSYKEVALCITYKEDISQHRTIHKSKGDEFQNVLLIVDTIEFLTNPNLAEDEEQRIYYVGISRAMDRLFIVTPELSKVNRAIIESKFNFQIIDLEKEPQLI

SEQ ID NO: 71088 - protein, 668 aa, Bacillus cereus
MNIPNAPYISRVHIENFRNFQYVDVNLTHKQVIIGENNAGKTNFLRAIQLILDPKLSDEDRFLNESDFFEGLESPMENGKEIKISIDIKGFDHNKVLLATLSDATLKDEPATLRLTYHYFATKRTDGTYEYQYRIFQGTREDVPFNHYHRRYLNLKIIPAIRDVETEMKNTRKSPINQLLKNYDIRKEELKDIADRLKETSDEVLSIDELVHLTNNINSRFSTIIGQQVDSSVSLETIDLDPNRILNTLKIMVGQGQRPISDTSLGLNNILYISLILLSLEDKTIPAILKEDTYSKLLEEENSEILKQCYEKNDNGNYILKDELTLENQNSLYTFMDTNFGDNKGFTILAIEEPESHLHPALQRLIYKDVMKKNTSVLMTTHSPHITSVAPINSIVHLRSMSNGTNVRTTASLGLSERECKDLERYVDVKKGEIYFGKGVILVEGVAEEYLISSFAEALDMPLDKKGIICCNINSTNFKPYVKFLDALGIPYVVITDGDYYYFRKNEKGTLERVFGSMYEDTHKSLGYGYDGLDRIKKILVELKKVDENSISNDFQKQDELFSKYGFFIGVHTLEIDMMDTSYENKVSKIFTQVFNDLTSGGSAQKKNFKDALDTGNYVNCLKKIESKHSRIGKGRFSQALSSECTKDNIPPYIAGAIQSIYSKVNKL

SEQ ID NO: 71089 - protein, 603 aa, Bacillus cereus
MIDLYSLKLEQIKKDPDQYAAFKSNMSTVVKAGPGSGKTTVLSLKIMHLLKEKIKPPRGLACITYSNEAAKEFTSRLKSFGYQKRQNVVLDTVHSFCISEVIIPFAHLYDTDISLPLSIISKNEKDKLFTAILSERGIRKKDLKIEAMDKERNQLIGGQSSVETESNNSAREVATEYEERLHARKQVDFIEIIKCATKLITEQEYVRKCLEAKFPWILVDEYQDLGKPLHEMILTLFHKTNIKIFAVGDPDQSIYGFQGAIPDYLLELYDNRNIMSIDLKTNYRSNQDIIDAATIALNIDDREYKAGTRLEEKAEFHFITCENEMDAQYEHVVSNIIPDCLAKNIPLEEICVLVSNGSQVKALSNVMNDANIPHYLAKHEFLKSKLIVWIKDCASWVLDNSSISFTDISDFWINILSNKNGELSEENKLYEKKQFLSLLTQSIDYQHNLHLWFSYLFNKLNLEHIIADSQMYVTENEHIVSFQYQITDGELKDYDLIKFSQVGKPENQVTISTRHSSKGLEFEVVIMLGMEEGIFPFYSTVHIPKELNEQRRIFFVCITRAKRVCYLLRSKRITIKPGWTPTKGPSMFWKELYEAHKSKTVLH

SEQ ID NO: 71090 - protein, 696 aa, Bacillus cereus; identical to SEQ ID NO: 66552

SEQ ID NO: 71091 - protein, 631 aa, Bacillus cereus; identical to SEQ ID NO: 62979

SEQ ID NO: 71092 - protein, 592 aa, Bacillus cereus
MYISKVKISNFRNFKETEVELGKQMVIVGENKVGKSNFMHALRLVLDPTLSESSRLLQLSDFWDGLTRPLNDEEIRIDIELTEFEQDDKLKSVLSDFLVKASPLTVGLTYRFFPVDENGNKIYNFKVYGTETENIFSYEQRKWLPLEVLSGLRDTESDLSNWRKSPLRPLIERAIETTDKQELENVAEEITRSTDSLKELDEIGSLTERINTQLENIVGDRHSIETSLGFSPADASKLYRAIKMFIDDGNRGINEASLGSSNLLYLVLKLLSLEQYVDENERAHTFLAIEEPEAHLHPHLQRLLYKYLLNHDKIIVEGSQEQHKIHSVSNILTTHSPHIVSVAPLKSIVLLKETHGEDKSTKIVSTAKVSLDDKDVKDLERYINVTRGEILFSKGVILVEGDAEEFLLPSLSELHGIDLDKHGITVCSVSGTNFLPYIKLLGSGGLDIPFAILTDYDPGDKLPQIHNRLIKLLNFIDEEYEYGEVGTEDLITYGKEFGIFTNSHTLEVDLFDTMPDEITETLTELTTNSKAISRAQDWKLASSIKGDEKRYLSDIESIGKGRFAQRLSTNLTNLSVVPEYVKGALDYVIAKV

SEQ ID NO: 71093 - protein, 608 aa, Bacillus cereus
MSSLKFDKLLYREASKDLSNNEAQLKVYDSTGNCVVLAGPGSGKSKILTLKLARILNEDIEAPQGVACLTYNKECARELKEKLYNLGIIESSTIFIDTVHSFCLNHVIRPYKHLVNANLPKEIKVATSREVRETMLRTFNLTIGQNERYTSSWSTAFNVYRRTFIDRKSSEWKTNDSDIAEWILNYENSLRHQGLIDYDDMVLHGLWMIEENQWIQGLLQAKFPVIAVDEYQDLGASLDRIIRVLCIENDTRLLAVGDPDQSIYGFTGAQPSLLNDLARQSGVLKIRLKKNYRSKGNIVKASIASLLEERDFVSNRDDEGSIKFYGIRDGIDAQCDYICKEIIPKILTLDPSSTLGDIGVLYIDKNDGDRIAEKVAKEGLQYIRVDGNAPYNKNQLTVWIENCAMWCSGGWLKGSPQFSEIERTFSSFFLNSNMSEAKLESKKLNLFNFLFRSRDVELKLSDWLDEFNKSTVSELLDFFTEEPDIVKEYDKLIESAKDGQLKDFKVSSLSRQVGSESHLNLYTLHSSKGLEFKYVIMFGLEHGRIPWLNASEDKINESRRLFYVGLTRAKDEIHLLCSGWYCDYYDRYQNYGPSKFVLELKKFVDNNL

SEQ ID NO: 71094 - protein, 302 aa, Salmonella enterica
MTSNEDAQALVATHAPSMLRRVDPEHIRYLRLTETRQSRIKKIQLPAKTDEAHKFVREAVQAFPEIYFSRLIVLGEGDSEEIVLPRLFQAKGAPVDESAVTIAPLGGRHVNHFWRLLSELQIPFLTLLDLDVGRYQAGWGRIKYVNNQLGLYQPEKVLPTTFSLSDWNDDKVPVRTHHFFENGTKSVFLELETRGVFFSFPMDLDFSMLLAFPNAYGVQQEVSDESTIKAVLGKSHHGSYQYSGDELNLFSTYHKLFKLGSKPAAHIDALAQLSNEELLANMPGSFGRLADAVIAKLAELPE

SEQ ID NO: 71095 - protein, 553 aa, Salmonella enterica; identical to SEQ ID NO: 62985

SEQ ID NO: 71096 - protein, 302 aa, Salmonella enterica; identical to SEQ ID NO: 71094

SEQ ID NO: 71097 - protein, 553 aa, Salmonella enterica; identical to SEQ ID NO: 62985

SEQ ID NO: 71098 - protein, 302 aa, Salmonella enterica; identical to SEQ ID NO: 71094

SEQ ID NO: 71099 - protein, 553 aa, Salmonella enterica; identical to SEQ ID NO: 62985

SEQ ID NO: 71100 - protein, 302 aa, Salmonella enterica; identical to SEQ ID NO: 71094

SEQ ID NO: 71101 - protein, 553 aa, Salmonella enterica; identical to SEQ ID NO: 62985

SEQ ID NO: 71102 - protein, 302 aa, Salmonella enterica; identical to SEQ ID NO: 71094

SEQ ID NO: 71103 - protein, 553 aa, Salmonella enterica; identical to SEQ ID NO: 62985

SEQ ID NO: 71104 - protein, 302 aa, Salmonella enterica; identical to SEQ ID NO: 71094

SEQ ID NO: 71105 - protein, 553 aa, Salmonella enterica; identical to SEQ ID NO: 62985

SEQ ID NO: 71106 - protein, 302 aa, Salmonella enterica; identical to SEQ ID NO: 71094

SEQ ID NO: 71107 - protein, 553 aa, Salmonella enterica; identical to SEQ ID NO: 62985

SEQ ID NO: 71108 - protein, 302 aa, Salmonella enterica; identical to SEQ ID NO: 71094

SEQ ID NO: 71109 - protein, 553 aa, Salmonella enterica; identical to SEQ ID NO: 62985

SEQ ID NO: 71110 - protein, 302 aa, Salmonella enterica; identical to SEQ ID NO: 71094

SEQ ID NO: 71111 - protein, 553 aa, Salmonella enterica; identical to SEQ ID NO: 62985

SEQ ID NO: 71112 - protein, 302 aa, Salmonella enterica; identical to SEQ ID NO: 71094

SEQ ID NO: 71113 - protein, 553 aa, Salmonella enterica; identical to SEQ ID NO: 62985

SEQ ID NO: 71114 - protein, 302 aa, Salmonella enterica; identical to SEQ ID NO: 71094

SEQ ID NO: 71115 - protein, 553 aa, Salmonella enterica; identical to SEQ ID NO: 62985

SEQ ID NO: 71116 - protein, 302 aa, Salmonella enterica; identical to SEQ ID NO: 71094

SEQ ID NO: 71117 - protein, 553 aa, Salmonella enterica; identical to SEQ ID NO: 62985

SEQ ID NO: 71118 - protein, 302 aa, Salmonella enterica; identical to SEQ ID NO: 71094

SEQ ID NO: 71119 - protein, 553 aa, Salmonella enterica; identical to SEQ ID NO: 62985

SEQ ID NO: 71120 - protein, 589 aa, Paenibacillus amylolyticus
MLIEWIKIKGLRNFGDELINFSNQTLIIGANDVGKSNLIFALRILFDRGLSDKDLDLLDSDYNVYTKANSIEITVKISNVTEDCLISTFKGDIQNGTVYVQYRNSKNGEFSTYAGHSVDALELKSPRFYIKRLNMECVNSNRNLSSFIKREKNQILENAKSQLSAELAEEDKISIDKLKVVLNDVSSGVDELNYIKKSLASVNQELKDLAIHNENQDLSFKNANSDVKTMLENLELTYASEGETLTLGGDGRNNQIFLATWVTKQKSKITLERVTFFAIEEPEAHLHPHQQRKLSSYLLDNFKEQVFITTHSPHIAADFRPDKIVKLKTNNKKTSAANGGCSEDISLKFDDFGYRLDAITSDIFFVNAVFLVEGPSEKLFYTAVSKKKDIDLDRLNASIISVNGVGFKPYIKICQALDIPFVFRTDNDIFSKKKTIGTKPQEFSFQAGVSRIMGIFKEVLDKDENAVLLEYWGKNESYNEWPKDSKIPQKAVDILNHITQEVEKKNIYLSHKDLENDLVESNLYSNLKSFYNTRAKSSTVKIMQKAKAENMFEFLKNNYDALDCLEKDDIVKPLKKIKELAEKVVKENG

SEQ ID NO: 71121 - protein, 556 aa, Paenibacillus amylolyticus
MGNSFPPTDEQNIIIEETGNLVVTAKPGSGKTFTVVEKISVISKTLLNYQGVIAISFTNKASDELELRCRKKGVKKNNNFFGTIDKFYISEIIIPFAKLLIGKNVTWEVKNSVDDFPKYARLKDLNKKFNDEELLELLQKSLSEGYVFLEICAETAQYILNVVPECISYLLARYTHIFIDEYQDCGKFQHHIFLKLVDAGMVGIAVGDLNQAIYAFSQRYSKFLFSLISNEDFRYLEITKNHRCHKSISDYSLALMGIPNINLSDDPRVFKTYIPGTDHNIFESIDFNLPLLKERYNLENNNDFAILCRGNETAKRAAEFLRTPNKLFVETALDRSNSHWGIIFNDMLSSYFMFGGGLTTKLDFVQSYFNEDLDMRKFERALNVIHAIFILGEEELISNIDLFICFAEMVHPDDRDLEVCNELKLILGDTQKLNSFKPATENEVNIMTLHKSKGLEFKVVFHLDLYRWILPFEGARTSEEEYIQALNLHYVGVTRAVEACYIMQATLRYRPAQGDLWSAEESPFLHLHNTSSLRQDIYCSIPQVPFHTAISKILVK

SEQ ID NO: 71122 - protein, 769 aa, Pseudomonas monteilii
MPEAVVTTPVAGSITLRFLELCQFRRLGKVQLDVDKKTTILVGANNSGKTSVLAALRHFLSDGSRFGAFDISLSQWPKLRALGKAWELLKENPSTGIGSEEQWIEQLGVIHSAMPTLDLWFDAEAGMFHYVAPFLSKFSWKGGAVGVRLRLEPAASVDELKQLAWAYHTARLPVKDMGADSLAWPIDLLDFWLREPQRLGQVRAYKLDADKNPLDRLETYATQTLPADASPIERKNLQKLIHVDFVAAQRGLGGEEADSRSASGPHRIGMFSNQLLKFARQHLNIATTGHGHRADLIKAVAEAQQELDKKIHEAIAPSVEEVRELGYPGLHDPQEIRFRTRIQTADLLDHGTAVQYSMQKDSLEELLPEYSIGLGYQNLQSLSYQLVSFKAARLKPEKGAPVPVHLVLVEEPEAHLHVQVQRIFPDKAHKLISPNEKEASGLKSQLIISTHSSHLAHAESFDRLRYVRRIAKSAENPMPTTEVVNLGKIFGDDQKTRQFAERYFRVQHTDLLFANAAIFVEGVAERMLVPLFIERDFEVLNSRYLSFLDIGGSHAHRLKPLVEKLRIPTVIITDVDPVEERAGKPTKDGEPTTTLVAVANTGQAGLQCGNPTLRGWHPKLQQLEDFKNPVEVQLVWSEVSECLVRFAWQLPVAEAGDHWPSTFEDSLILKNIPWFKGLMDEKVDGYGNKIKPPKGALGSVARRVADHENISDLVASLHKLMHGSFNKGDFAASIFEMIAAAEPIACPKYIADALEWLQKQLDPNPELLP

SEQ ID NO: 71123 - protein, 649 aa, Pseudomonas monteilii
MTAVPTLGDNDRDAGVVDEICGYLTEEPPRSYFLFAGAGSGKTRTLVEVLRRLTGVIEHDKGNKLARRLRMYGRSIRVVTYTKNAVSVINGRLGDNDLVCVSTIHSFCWELISGFNDDIREALVAVKEAQLAKETAEAQAKPRGITPAKQRDLDEIKDDIEAFRATEVFIYHPDRNTYGPGALAHNYVLDATAWLLRNKLTLQTILKDRHPIILIDESQDTMKGMLDALMGLAEQEGSDLTLGLLGDHRQRIYSHGHADLSSLVPQNWATPELQMNHRSQRRIVTLINKVWEAELDGRTQPINGVEQHPRTEKAGGVVRIFVGDTSRSPEDKVIGERWCSDRMHGATGDAAWYQGQYQLLALEHKLVATRGSFLDVYEAMVLLDPDAAAPSGSGDNKGPSAVQVLLNELAQLEACVDIDGAVNELKVTEVFRRYGRLDNLPEECAARASRVEEMLNAITAFAAACGNPKSTIAEVLAPVLSAHLFEIDHRLSEAYADKSPLLPAPGRGEEESKQARMRRGWCALFAAPWSQLRLYRTYLAGNSVLATHQVVKGSEFMHVMVVMDDALAGGSLISYDKIFGGVELTKRDKENAELGKETTIDRTLRLLYVTCSRAQESLALVLWSSDPAAALDRIKESNWFAIDEVETIP

SEQ ID NO: 71124 - protein, 583 aa, Enterobacter aerogenes; identical to SEQ ID NO: 63878

SEQ ID NO: 71125 - protein, 591 aa, Enterobacter aerogenes; identical to SEQ ID NO: 63879

SEQ ID NO: 71126 - protein, 607 aa, Escherichia coli
MNIQIDTVRISGFRGICNIEVTLPRVTVLLGQNNAGKTSIVKALQLALGDYSRYLADEDFHIGEDEKRQETITVDLRFIAVDSDARAREFSENWQQAFGDKIQSEPDGKQFVAIRTTAKPDRVKGGYIVERFHLDEWPELSGWQDVRVGSKNRLGKRLESVPFISIDAQRDIHNELKEKSSFVGRVLSSVEYDEKDVAELERLVAEVNKEAIEKSEPLKRLKTHLDNMNQSFEGSGQTELTPFPKKIRDLSKRFSVNFGETDKSSFSMEYHGMGTRSWASMLTVKAFTELLAKNHEEEAEPFFPVMAAEEPEAHLHPNAQRTLYRQLVDVPGQVIISTHSPYIAGLAELHEIRSLSKRKNSVQVYQLRDEFEDDDLRRLKREVVHSRGELLFSKAIVLSEGETEEQALPELFGAYAGKHPFSLGINFVGVNGSGAKYRPFLILAKDLNIPVFIFSDGEPKTIKDLKKNYEKVFGVTDIEKANNITILDGTDFEGYLLSQGLRDLIEKTINEVEGEDTIDKWIEKKDGMLLKRVKTDKPSCQTCHQHIFEDVLRDYKDDAGRIRAILEILDSSKPLYAKAITDNLIKLSADKFPEKIIELFKKIESGV

SEQ ID NO: 71127 - protein, 631 aa, Escherichia coli
MNLSNAQRQIIEAPINSAVQVLASAGSGKTRVLTERVRYILDKTKKEGIIALTFTNKAAEEMSARLADFEQVEDRVWIATIHSVAQRILEKYGHTVGLPTELHIYDRDKDRMEVFIQSLREDGINIDEYLNITDSRELKSREKNLQSFMDIFSKIKRELLTDLEVAELYPNNNIWKIYQDYQSALLNSGGIDYDDILVYAHKILLTHDWVAKIYRSQYKHICVDEAQDLNKAQYEFIRVLCGDAIKSIIMVGDPNQMIYGFNGSSKDYLCTNFVDDFTPQCFELKENYRSTKAVIRAANKLRPGSQAEIDYALEGGVWISEFDTEEDEAAAIVATVKKLLDLRVNDEIEGEISLKNMVVIGRNRFVFSKLESSLKDNSIPYSLRKGERQLEPSTRFGKILDYAIRVKLNSKDWVDGKKLCQILNIAEPKNWTTCVLQEIAAQVSSSVDEYSDVFAKLLFAVDGLDIENPKIPKLVKDFNCLLTSLVERHSSISDGKIEDVKLSIEELDEFNRTWTRFKRKGIGDSLVAFRNALALGQLSQDTLENGLTLSTVHTMKGLEKDIVFLIGMCEGVFPDYRANTVKELDEERNNAFVAVTRAKRWLYISYPKQRMMPWGDKKFQRKSRFVMEMES

SEQ ID NO: 71128 - protein, 607 aa, Escherichia coli; identical to SEQ ID NO: 62590

SEQ ID NO: 71129 - protein, 630 aa, Escherichia coli
MNLSNAQRQIVEAPMDIAIQVLASAGSGKTRVLTERVRYILNNTKRDAVIALTFTNKAAEEMSSRLSDFDPDEDRVWIATIHSVAQRILEKYGHTIGLPSDLYIYDRDKDRMEVFMQSLREDGIDIDEYLSIADSKELKNRERNLQSYMDIFSKIKRELLTEFEVSELYPDNNIWKIYQDYQASLLNSGGIDYDDILVYAHRILLTHDWIAKIYRSKYKHVCVDEAQDLNKAQYEFIKVLCGDVIKSILMVGDPNQMIYGFNGSSKDYFCEEFINDFFPNQFELKENYRSAKAIIRAANKLRPGSQAEIDYALEGGVRISEFASEEDEADTVVATIKHLLELKVHDEIEGDISLNNMVVIGRNRFVFGKLEKCLKENLIPYSLRKGERALEPSTRFGKALDYAIRVKLNSKDWVDGKKLCQVLCISEPAGWTPDVLREMAVQMSSSDDDYSIVFEKLLTTIDSLNIENPKIPKLIKEFNALLTSLVENHNGISDDKIEDVKLSIEELKEFSGMWTRFKRKGLGDSLVAFRNALALGQLAESSMDEGLTLSTVHTMKGLEKDIVFLIGMCEGVFPDYRARTPKELEEERNNAFVAVTRAKRWLYVSYPRQRMMPWGDLRFQQKSRFVSEIE

SEQ ID NO: 71130 - protein, 607 aa, Escherichia coli; identical to SEQ ID NO: 62590

SEQ ID NO: 71131 - protein, 630 aa, Escherichia coli; identical to SEQ ID NO: 62591

SEQ ID NO: 71132 - protein, 640 aa, Prevotella bivia
MYLSKIYIKNFRGIKELLVELDKNLNVIIGANGQLKTSLMDAIRLFYSWGEPNRDIEITKEDFYVEITQNTNGTKMVNPSTRIDIYYLFEGLSSQQEGAFYQYLDRKDDGTMVARVHLSFEIKEQGRIYSSYITGKEENGLRADWDTFHYFHPYYLGALRDSTRDLMSTRNNLLGRVIKRKIDRAGSEEDVKGIVNTANDQLLQRQEVKATQTGINDNLNQINRSDLQDVELHIEQNRIEYIVNIIKPFLPFSKDDKDGFVLTQNSLGYNNLIYIASVLSDIKDCHTDDNVSIYALLIEEPEAHLHPQLQVNLYNFLKNADTSENSQTFITTHSPTLTSKIPLENLILLKNNAAYHVGKCFEDRHSENIVRDVAANNRLLKNNEVKSYRNMIARYFDVTRSQLLFSNGCLFIEGISECQLVETFSKLIGKSLIDHQIEIVDTDGTAFYQFLMLFNSSDDKKRLPIHAAFVTDEDQFTESKDKEFNLDALIADNYAQLNVLRDSINNGHKTGRVNNMTAMANGQAGIKICSGKKTLEYQICKANVTGNKDAIKGNWLYELIKRENTDGIGRVEAYIDSIGERDLNDVEQQNVALLMWKCLPGKARFAQTLNSFLIDKIEAGGDVKFTVPTYIQEAISHLVL

SEQ ID NO: 71133 - protein, 608 aa, Prevotella bivia
MEYDLTPQRQAYLDARGYTILTACPGSGKTTSIVKKLRAVSQYCAEHYGKHTGFACLSFTNKACAELKQKYREMHDERLTFPNEVLTIDSFIMQYVVLPFWYLCDACKKKPIVVNEEEILNPIYFNNVFRNGKWNSYPIQPLSKFGKKQYDKVLYKKSPALVSREKNGYRWNHNTINKAKEVEYCETVFTYRLSKGFITSGDALWMVCDILKNHQEIAGALVARFPYIIVDEAQDNSELHFDFFKLLKRAGLQNLEFVGDVCQSIYGFNSARPELLQDMMAEEDWNVLPLSECRRSNQRIIDLYSKLKSSDVPAISSHGVEDKGIPIVVYKYDDENVRDVIRNFYQECDTNELPSRIILARGVRKCKKLAGVKDVDFKYWKTDLPYLLIDAVFASEANDMDYAFRKIRLVLSRLMTEDSPDAKRQFIHEIEHNIDWNARIFGFLKQIPSFSLSFEEWSEQTCVLLHDFWELDEQPRFVPYQRQKGYKMKEMGNVPVERFHQSRDESSDYHKNIDTIHAVKGATLDAVLLFLSSNSTGQGISLNDFPRRAIRNMTESQRMIYVACSRATQFLAFAVPKSIADETIRRTLAGVSIDIRYINLQGELGFTD

SEQ ID NO: 71134 - protein, 566 aa, Escherichia coli
MRIETVYIKGFRNYCDAVINFNETNLIIGANDVGKTNLLYAIRLLLDKSLSELDLEPKSNDFHVNSAGEQVENIEITIKFTDVSEDAVISKLGGYVSDEGETYIKYLASSLTMDYKILLSHEHNNFDEVPNRFYLKCLSLRYINSQRDLEKYIKIEKKHLLRLAQEVRSEKDTENDGAVFTELNKLLTEVNEKVKGISYVASATEELNEELRKLSYTHDRLTVQLDTGAIGIDQFIEKLELSANTNGKKLMLGGDGFNNQILLALWKAKSVREHDVDSEVVIYCIEEPEAHLFPHQQRKLAAYLIDKLPGQAIVTSHSPQIAVNFKPDSIIKLYYDDGETLAASNGCSDCISSAWDGMGYRMSIIPAEAFFANVVFLVEGPSEVIFYTELAKALSIDLDYYNISILSVDGIQFEVYRKILTALNINWIVRTDNDASKVPHKNEWQYAGVNRALALCGENKEPNSSIPIDSKALHAKWGTISPIINPNGVYISFFDLEGDLANDFSKHVLDYASKDNLDDAADYLRGKKAIRMRELIKEKKAFLTELKSKDIARPLIHALKIARGEL

SEQ ID NO: 71135 - protein, 540 aa, Escherichia coli; identical to SEQ ID NO: 66405

SEQ ID NO: 71136 - protein, 641 aa, Salmonella enterica subsp. enterica serovar Typhimurium; identical to SEQ ID NO: 62984

SEQ ID NO: 71137 - protein, 553 aa, Salmonella enterica subsp. enterica serovar Typhimurium; identical to SEQ ID NO: 62985

SEQ ID NO: 71138 - protein, 699 aa, Acinetobacter pittii; identical to SEQ ID NO: 64082

SEQ ID NO: 71139 - protein, 71 aa, Acinetobacter pittii
MSEILDNPAIIAAQLAEAKINAAIKAGRSFRLEAGAGAGKTFSLVHALKSIIKERGSDPRQYRGQQIPLNS

SEQ ID NO: 71140 - protein, 698 aa, Halanaerobium sp. T82-1
MKIKSLAAENFRLLSKKNKNEIFLDDDFTLMVGRNNTGKTSFIELVDKFLADNISFEFADFSISSYKNFEEAYEIFKEYIELSAEENEENAEEVNKLRNDLENELPSISLEITIEYKDDDDTSHLQPFLTQLKSDCTELILQYEYYCKDPVDFLKKYEKQKDKIDLIKFIEKNFSNNYSNRIWTVDPTDKDNRFLIDNKNNRKSKLKKLLSASFIFARRDLDDKANDKSKNLSNLFDDYFKLIEDKDQELLTDLENKLLGVSEDWDEEYDDIFGDYYDSLEQFGYPGLNERKIKLKSIFSPKKIMKNNTEVYYDNDDGKNLPEAYNGLGFSNLIYIILKLLYFHREFQEKSTKLQMIFIEEPEAHLHPQMQKTFIRNILDFIDDKIKKDDDPLEWNIQIIITTHSSYIISEGNYNNIRYLKNTDHSIETKDLMRFAEESNESLKFLEQYLKLNKCELFFADKVILIEGTVERMLLPLMIKKVSNTEDEKSLINEYISVVEVGGAYAYKFKKLLKFIEVKTLIITDLDSVDPEKNYASAAPLIDHDYKTSNKTLQEWIPKEISVDELLQLPEENKINKCGKQDVRVAYQYPVELDFCDDTLCGRSFEEQFIIENLELIYDNRAKFQEFLTPIEGKLKKRITDNFPENKSDLDIDNNRVFEIAEVIKSKPNFAYDIMTNFKLGDWQIPTYIKEGLEWLQE

SEQ ID NO: 71141 - protein, 550 aa, Halanaerobium sp. T82-1
MAPRVDRDTKKDDSLDKIIKCIDDNNSFILDAGAGSGKTWSLIETLKYIIKNNGDNYNRLAKNIGCITYTNVAVEEIKNRIGENEILDVNTIHQFLWNVIKQYQVELKNVIIDNYEGLESLDDFSVKYKNFREIEKGIISHDDVIKISSKLFENHQKLQRIFIDKYPLVLVDEYQDTHPEVVETFLDLIDNEVSKNNFIVGYFGDSKQSIYEKRAEKINNDDKLTKITKESNFRSAGEIIDLLNHIRTDIEQFPAGKNKKIVGTTYFIYDDTSQDKDLCYEKVKEKLEDDWGDLKVFFLTHRRIAINVGFEKLFEHYNNYYSNRKYREKLYNKECPLISFLADRVEQSISYYENNNIFALMDAIDFDFSKNQDKSRLKSIMDELIKIRESGRVKDIWELVFDDKLFVKGDKIKEFQNDFEVNSDKKEFYNNIMELKYKEIINFYNHNENDSVFSTQHGTKGEEYENVLLVTMARDWYNYNFAEYLTGDLEQLKTSIRQRTQNLFYVSCSRAVKNLAVLYLRENKDVGLTRVKDWFGEENVITVDEFLESE

SEQ ID NO: 71142 - protein, 634 aa, Marinobacter sp. T13-3
MKLQCIRLFSFQSFGPEPTELTLNDITYLIGPNGSGKTAALQALCRLFAFDPSLRRIRRSDFHVPYDEEEVPEERQLWIEADFIFPELEDDDDVATIAPHFGHMRLDSADGPPRVRYRLDATMGVNGDIEETLVHVLDLDADGSPLTTAQVTRAERNHVQVHYLPARRDPADHIAYSANALLGRMLRAVNWENEREEIKGFTDKISESLAGNPSIATLSGSLQTTWSTLHKGSFFADPQITFVASEIEALLRHLSVSFSPGHDEELVDFSRLSDGQKSMLYLSLVLSAQSIGRAVLAGDDDTFDPDKLRPPVFTIVALEEPENSLSPHYLGRIVNALATMTSNEDAQALIATHAPSMLRRVNPRHIRYLRLTSERTTKTTRIRLPKRTDEAHKFVREAVQAYPEIYFSRLVILGEGDSEEIVLPRILRAKGIPVDESAVTVAPLGGRHVNHFWRLLSALEIPYLTLLDLDVARHQGGWGRIKYVNDQLGEYAPAKKLPADHGIPAWNDAKEKVRSYLNYLEKLENRDVFFSYPLDLDFAMLLSFPDEYGVESNPPSETTVKAVLGNSHFDAAQYDDDERAFFKTYHKRFKLGSKPAAHIDALAQLSDEELRDDMPESLARLANAVIAKLEELPE

SEQ ID NO: 71143 - protein, 556 aa, Marinobacter sp. T13-3
MIAAGDWRPADGLTLEPNALRAVRETERCLALTAGPGAGKTEMLAQRADFLLRTGTCRYPKRILAISFKVDACKNLKERVQRRCGSDLAARFDSYTFHAFAKRIIDRFRPVLTGRDALDVDYQIGDRRVTRRQIEFSDLVPLAIQILSTSAAARNAVRQTYSDVFLDEFQDCTDQQYALVKLAFQNTAIRLTAVGDTKQKIMGWAGALDGIFQTFAADFVAEPLNMYRNFRSKPRLLRMQNEIIKVMDSTSVMPDEQLAGEEGQIFAWKFPNSQEEAEHLADSIDTWINHEQLPPSEIAILVVRQPDLYGDHLIQALEQRRIPFRNEQQLQDISVEPAARLIVDYLSILYGQREPKAWIRLMAQLIPFADDDVQSSVRRDFQNFIAGQRKSAVQSVLLGEPFADWWDFVRAFLSKVGIETLSALSHDYESKARLVQVVNDTKTRVDELLKSEPNLPKALERFSDDQAVRILTIHKSKGLEFDTVVILAVEDQSFWGNEDAERCAFFVGISRAKQRLLLTVSDRRDTPPSNPRRWKENRTPHSEFLGYAMPFLNPDR

SEQ ID NO: 71144 - protein, 509 aa, Listeria monocytogenes
MKLKTVKIKNFRGYRHETSTDFGNLTTFVGKNDIGKSTLLEALDIFFNDAKACVKIDKEDVNIYSSADDDNEIIISASFTSLPNTVVIDTTNTTTLESEYLLNDNGYLEVVKKYKNTGKPKTYIRAFHPTNANCSDLLLRTNACLKDIVESNNIECEDKTKNAILRKAIWEYYNASLELQLIEIDVTRGDTKSIWDKLQTYLPIYTLFQSDRKNSDGDNEVQDPLKEAVKEILSDEKIQDTFRCITEEVTQKLSEVSNRTLEKLREMSQDTANTLEPLIPEFSSLKWGDVFKNVSITGDQNIPINKRGSGVKRLILLNFFRAEAERRLEVLNASNVIYAIEEPETSQHSDNQKKLIDAFIDLSNVPNTQIVLTTHSANIVKKLDISHLRLITISGTSKVIECVSKGQLPYTSLNEVNYLAFNEISEEYHNELYGYIEEQGILKVFKQNKPTQPYNRVRGGSKVTEQKILTEYIRHQIHHPENQLNKRYTESELASSIELMRDFIDNKQN

SEQ ID NO: 71145 - protein, 725 aa, Listeria monocytogenes
MLVNEYTNRFGTISNTNNFASDVVRMEDEDANIFHHLVSLNGGNEFNKEQVNAIRFDMRTHLRIIAGAGSGKTQTICAKAAYLVLKEKIQERNIVMCTFSKKASQEMKERVNEFLGGNSRIEVLTFHGWFQKEYNVLIKKYPYLEKYGIAGEVPGKGSGKDSHDRILMNLIKQYHLYNFDKYEEKPINERLSYWRNMGYNDEEIVAFIARYFDDKEILKDQLLSEVFSEMLKELERIKRREKVINFDDMLINLKCVLENDSNALSLIQTRYQYIFIDEFQDINPLQKQIIELICPPDYEKSVINSTKLIIVGDDDQSIYFFRGAEPRYIKEFDRQYRQTSIELMTNYRSIAPVVHIGNTLISNNQHDRIKKSMIPHKLNEGDCYAKIFQNEQLEANWIAMRILSLSSEEKPFQDQIGKPNYTETIVLYPNKNQLKSMIIALQEKGIPFVTKSDDDLLGIFGINFFKRSFNLLMDIIDAETIEIKKHLYKQLIKNICLYYYIPFAKSIDFVSDETNYTSEKLTDFICKEKKVSKKEMALIKSIFRDINEFIKTEELNIKVFVNWLVETPKVKKQLIDEEKDWLLKEVSNVKTLKELILKYKAARTLKEEMADKLREYDNNNYNAVYLLTIHSSKGLGYKNVFVKGIYKNSLPDYRSVDKESIELQPLIEQASPPTTMEEQRRLMYVALTRAKENLYVTYPREVNEKPTLVSPFIKESNIMFRVGKI

SEQ ID NO: 71146 - protein, 509 aa, Listeria monocytogenes; identical to SEQ ID NO: 71144

SEQ ID NO: 71147 - protein, 725 aa, Listeria monocytogenes; identical to SEQ ID NO: 71145

SEQ ID NO: 71148 - protein, 732 aa, Bacteroides uniformis
MKIQSVHIRNYRKLKNCHIDFDEKKTVLVGANNSGKTSAISAIVWFLKNTDRFTLKEFTATNWAAINEIGEKWLEHDSVDEALLDSHQWDNIVPSMDVWINVEDGEQYRVNHLIPSLSSWDGKKVGVRGQYEPKDVKKLYTVYKDAKIKAKTLEGTEEWEKAGSPDLYPKNLCDFLGKGLNLREYFDVKYYIIDPSLDPDNEDEVQSTPDNEIGNNPLDGLIKVDTILASRDFSDPEGQTDSDIDTLSKQFQQYYKSSGQEDEELTCEGLKLLGGIVTANKTYDEKLKKTFEVPVGELKNINYPGFQNPEIRIRSKIQIEESIKHDSAVQFAIQGMEELVLPEKYNGLGYRNLISIYLKLIDFREKWLKELSEEKNIEPIHIVFVEEPEAHLHAQAQQVFVKKAFEALCNNKLIEENPWLSTQLVLSTHSNHVVNELDLNCMRYFKRVIDVGKKIPVSKVVNLSSTFGTDDETKQFVTRYIRLTHCDIFFSDAVIFVEGPAEKILVPSFLAKAGLDSYYISVIEVNGRHAHSFRKLIEKIGIATLIVTDIDATDTKIEDGKEKHPSVITAKGNDYKTGNPSIKSWLSGKEQIDDLLALDGREKLVNNVRIAFQTPVNVKWDKNKDDLTEVCPYTFEDALIFTNLELFRQEGLKKMGTITTIANLLKHSNSANELQNKIFKKLESKSGFQKADFAISLLYKDDFVDLVAPVYIQEGLEWMKSYLDSNGNRNGE

SEQ ID NO: 71149 - protein, 616 aa, Bacteroides uniformis
METEMENNIDFQVDETLEKCILSTPRKSFFLFAGAGSGKTYSLVLLLKKIHNSIGKDLLLQGKNVAVITFTNAATDEIINRLDYSPIFHISTIHSFVWDVIKYYQADIKRLYCFYIEEDLKALEKKLEETEKKTTKTYLSNVEKFEYQKERLAKAQIIEKFVYNPNGSNPEYNALKHAEVIKISAQMILENKMLQRIIAQRYPILLIDESQDTKKELIDTFFEIQRNFADIFTLGLLGDQKQRIYADGKENIEDSIPIGWEKPVKRMNYRCAKRIIQLANNIGKDIDIHAEQRPREDANDGLIRLFVIQQREGLNKDEIEQNVMRIMSEQTQDAKWTTIGTEVKVLTLEHMMAARRLGFSRFFAPLYKVSKYQMTFLQGSVSEIEFFTKEVLPIAESIKEDGRVALEILKKYSPLLSGQNTEKPYELYLKCREEAIKVANLVNENGTIRVVVDEIIKSQLLTVPDVVRQAYMLSPSDIEDTVEEELRAWVEVMDLPINMVRSYDDYVNHRSQFDTHQGVKGLEFDRVMVIIDDSEIKGFLFSYDKLFGVKDLSNVDLKNKENGKETSIERTQRLFYVTCTRAKNSLAVVMYTNNPERVKTETIRKGWFEENEIIVM

SEQ ID NO: 71150 - protein, 585 aa, Streptococcus oralis
MEFKKLVIENFRNFSSIEIDLSNKNVIFGMNDSGKTNLLFAIRYLLDRTIRNKGFIKSDYHKHDTSRPIKIQLELDLSDRKMEGDEELLKTSHSRLLISTVAGARNNSSLDTFFISLEAVYNEKELFGNPVLSWGSTLDNLVEVPQYGTRSDIDKIFQIVYVNPAIELDSFFKRNRRLLFSDDSKTGEDVKLEEEIENNIEKLNENISNLHLITRVQSQLTEAYKSYRKENLEIKIQSEISISGYLDNLTPYINWNDDTNNYPTSGDGRKKLLSYAINHLISEKQYSNKVIIYLIEEPENSLHRSVQISLSKQLFVQNIYEYFFLTTHSAEVLYEMDNTQLIKITNQQDATGQSVYYTVPDEFSNLKKKLNKSLAQSIFYDRILLVEGPSEYYLFSAIFEYISPDFESDGKYLLQVDGINFKPYSELYRALGIDIWIKTDNDLKASRGDKHVFSPIGLNRCIDLLDQSVTPRLDNYRIDFSSKDERKQNIKSKKEELYSTNQSLVSQLNAEGIFISEVDLENDLAQVLSDSERSGMSEFDFVNWLQSSKQYNMLEYIDNYLTTEIALKIVESGNFKVLAEFLDYE

SEQ ID NO: 71151 - protein, 512 aa, Streptococcus oralis
MNDIVTHDEDVKKELLEHQGNILVLANAGSGKTTFLTKKLKSDSERLNNYQKLAAITFTRNATEEIKQKLVDISDNVVVSTIDSFLDKEIILPFLNQKYEIQTSVQFSFRIEHNFSHYSTGIKQILQDGIFGTYDFPTSKHGKNFKCEVALDILKTIDSASEYIKYKFNTLYIDEFQDCDQSMNDLFLYLKNELGIPLFIVGDDKQSIYQWRGASPKYINNLWETKNDFRKERFIGNFRSLPRIVDFSLALTPEVTVDNIREEGSILYLEPNQDYLKEDVIKYLIDNGDINLQEKNYFLIGINKDIEETATHLNDILPNKVDYVRKNPFIDCTNSNFLQSMAQYYFLEDFSEYDVLNNLFPEYNDEFRKELLKKLKRLRQRPTQSLVEEIASYLDVSLTIYEDKLESQILLEVLSNFDNKKLFDTGLMSNNLLMTTHGSKGLAADTVVIFVEYLIDRKQGLKFEDHYVAITRAKSKVIIIDNQTIYIDEINRLLSNNNEKFSFEDFIERRHI

SEQ ID NO: 71152 - protein, 585 aa, Streptococcus oralis
MEFKKLVIENFRNFSSIEIDLSNKNVIFGMNDSGKTNLLFAIRYLLDRTIRNKGFIKSDYHKHDTSRPIKIQLELDLSDRKMEGDEELLKTSHSRLLISTVAGARNNSSLDTFFISLEAVYNEKELFGNPVLSWGSTLDNLVEVPQYGTRSDIDKIFQIVYVNPAIELDSFFKRNRRLLFSDDSKTDEDVKLEEEIENNIEKLNENISNLHLITRVQSQLTEAYKSYRKENLEIKIQSEISISGYLDNLTPYINWNDDTNNYPTSGDGRKKLLSYAINHLISEKQYSNKVIIYLIEEPENSLHRSVQISLSKQLFVQNIYEYFFLTTHSAEVLYEMDNTQLIKITNQQGATGQSVYYTVPDEFSNLKKKLNKSLAQSIFYDRILLVEGPSEYYLFSAIFEYVSPDFESDGKYLLQVDGINFKPYSELYRALGIYTWIKTDNDLKASRGDKHMFSPIGLNRCIDLLDQSVTPRLDNYRIDFSSKDERKQNIKSKKEELYSNNRSLVSQLNEEGIFISEVDLENDLAQVLSDSERSEMSEFDFVNWLQSSKQYNMLEYIDNYLTNEIAHKIVKSDYFKVLSEFLDYE

SEQ ID NO: 71153 - protein, 508 aa, Streptococcus oralis
MSDIATHDKNVKKELLEYQGNILILANVDSGKTTFLTEKLKSDSKKLDNYQKLAAITFTRNATEEIKQKLVDIPDNVVVSTIDSFLDKEIILPFINQKYEIQTSVQFSFRIEHKFSHYSIGIRQILQDGIFGTYDFPTSQQGKNFKCEVALDILKTIDSASEYIKYKFNTLYIDEFQDCDQSMNDLFLYLKNELGIYLFIVGDDKQSIYQWRGASPKYINNLWKNKNDFRKERFIGNFRSLPRIVDFSLALTPKVIIDNIREEGSILYLEPNQDYLKEDVIKYLIDNGDINLQEENYFLIGNNKDIEETVTNLNDIFLNKFDCVRKNPFIECTNSIFLECIAKYYFLDDFSEYDVLNNLFPEYNDEFRKELLKKLNRLRQQPTQSLIEEIASYLDVLITNYEDKLESQILLEILSNLDNKKLFDTNLMSNNLIMTTHGSKGLAADTVVIFVEYLIDRYKQELKFEDHYVAITRAKSKVIIIDNQTIYTNEINRFLRSNNGKFSFEDFI

SEQ ID NO: 71154 - protein, 709 aa, Streptococcus oralis
MRIDKITIEGYRRFNKSAINLNHGNFAILAGANNSGKTSLIQLLDIIFNNKTRKSVGFKDFSITLKSLLDNRVKELDFSSDFNDEKFIEFIDYINEQIKIKVQFELSYDLEESIGLFANYLMDLDDDKWNFYFEYNYKLNAEAIKEEFVKQDTKSATILQEIIEQNTESIYFYADKDFNNKKIIEYKDFKKLFHFEYISADRELDDENLKNKKITTSIISSSDSTNRDSVWDSKFNELKNKIANDLAESEIDSSFQNETQNILSDLKDSLDNVSKNEIEALEAKFHFNEKNLLNLIKDSLLINYSHSTDDFLFNLTEESQGLGISNLIYMSLQIDRFSRTIQPNTVNLFVIEEPEAHMHIQMQKVLVSYIETIFSSKKNLQGIITTHSTEIVKNVDVNDIKVIRSEKNFMNRIVDLHQFINNNGEKEFYETFFKLNFADLIFSDAVIFYEGDAERMYFESLINRKNSKYSNLARQYLSYCQCGGAYAHKYFPLLNELRMMACVFTDIDYDKEREELEGIDSDKSSNTTLNSILPADNKDVAGIYQQQSQDREKNIEIFTQTDKDGYARTLEDALLYKMISPTEEIESVFEKFNKSEWDKFNESFELRLPKITSGKECSMKREEIYNRLDISKENRKIDYLRDNHPEEYAEYEEFKENCEPKRSIRDLVSIIDKTNLMYSIIFKDKVIEVLPNYIEEGLTWLNNKITSTI

SEQ ID NO: 71155 - protein, 269 aa, Streptococcus oralis
MKIYYNERQSSFVLDGGLSHDDLLYFSFKLIERFPKIGFKLREMYNYIFIDEVQDTSTEVLRFFYNSARGSSTKVYFLGDKMQEIYNKYDGSFESEFGEFDSSLSQTFTTNYRSSKEIVDLLNHLYLSVSRVPQNSYIGKKGQLPQLVSTDNIETYLSNNSEVYKKFYKLRTVNSKRFDNINNSGKSAEEIYKKYQKIYPNNGRISVMDVLVNSNYDENPDELMSFLSLLFQVLSEYHNKNYGEMIRLLKNSKKTYLLVNLFQFLIVAF

SEQ ID NO: 71156 - protein, 299 aa, Streptococcus infantis
MNRIVDLHQFIVNNGDKKFYETFFKLNFADLIFSDAVIFYEGDAERMYFESLINRKHSKYINLTRQYISYCQCGGDHAHKYFPLLNELRMTACVFTDIDYDKDRVNLFKIDKDKSSNTTLNSIFPDRNCNVGSIYHQQKQDRKKNIEIFTQTDIDGYARTLEEAILYKLLCNLVYHITTYSNVDQRKFKSKMITAFVNKKRVKRNIKSRKYNQANKNRNKGVFIKYGRDFWKDIKIESKLDFSIPTKKGLAISIRDVVNSMDKTDFMYSIIMNGKEAEILPNYIEEGLLWLNNKITSTK

SEQ ID NO: 71157 - protein, 658 aa, Streptococcus infantis
MAQQQNNFYKINAPAGSGKTYFISKTINDILNNEPFVKILCITYTNRASQVMQERIVSPNVEISTIHSFLNKFLKPFFRNEKVIDYYLEIYKEEIETTLKEETKLNRYKERFQVEGEVSEETIKSNLYEIYYNERQYSSVLNGGLSHDDLLNFSFKLIDRFPKIGFKLREMYDYIFIDEVQDTNAVILRFFYNSAKDSSTNVYFLGDKMQEIYNKYDGSFETEFREFDGNLSKTFTTNYRSSEEIVDLLNNLYQSSSRVKQVAYKGKKGQFPQLVFTDNIEKYLFDNREAYEEFYKLRTINKKRFQNINNSGKSAEEIYTIYQKIYPNNGRVSVMDVLTNSNYDENPDVLMSFLSLLFQVLNEYKNKNYGEVIRILKNSKRNLSFGKFISVFNNHLLKIELHEDKLKLKEKMNFFIELLESDSSLETVLQELVNEKIISSDFYKFISSYERNGSFLYTDLFSSSIELFKLIDEYNRNPMVSTQHGVKGEGHKKILLVAEDSSNPGIKIYEFLNLFTRFYTQNISFNFDRFQQFYYDFNRDILSLEEKLGKKIKEIKAADRERYFSDFQEIFNKYLDNDYFKFICLKENKLNFQKKTAIKKIQENIFNNNLVRSVLTAYKLFYVGCSRAEEELVVLINANQIDNMEEFKNYFKQIGFQI

SEQ ID NO: 71158 - protein, 681 aa, Clostridium perfringens
MRLKKIKIYNFRSFGEEKIIEFDEMTTFIGNNSSGKTSALVALQKMFGNTIAERSLTRADFHLNKDEKIEGVEQKELYIEAVFEFPELKEDTNISNSIPIIFRQLTIDDEGELPYLRIRLEATWNKNNTVEGSIDSSIYYIKQSENEKIEGKNKTLAKNKDLQRINLIYIPAIRHPESQLRNASNSILYRVLSSINWTNTVKESIAQKSSEFEDEFDKETGVRLLKTAITKEWTNYHNDTRYNKAELKFNNPNIETILKKVNIEFAPTVTGRPYNVDELGDGLKSLFYISLVNSLLTLEEKIVEENDMDIEHKSFRIIPPICTILALEEPENHIAPQLLGKIMNNVKNISSKNNCQAIVSSHSTSIVSRVNPENIRHFRINKLNLNTDVKSLELPPDEGKTEEIYKYIKNGIMAYPELYFANLVILGEGDSEEILLPKMIEIGDENIDSKSIAIVPLGGRHVNHFWKLLNQLNIPFITLLDLDRERYLGGWGRIKYVCEQLIELGKLEKKQLEESEDITFLKDFEEMHNWDVNNIDEMKRWIKFLEEYDVYFSSPLDIDFLMIKEFEEEYLSILEENEGPRIKGLGKIKDLTKEDKEKDEYLKRIEEDKKSTLKEKCTNGDTFSKKEIELMIWYKYFFLTRGKPTTHRVALIKIEDEKLQANMPKVFRDIRLKVNEKLKNN

SEQ ID NO: 71159 - protein, 632 aa, Clostridium perfringens
MFNIIDRNKWEPVDGIILEENALEVVKSNRNMLVVAGPGAGKSELLAQRACYLLQTNECKEPNRILALSFKKDAASNISERVVKRCGEELGERFDSMTFDAFSRALVDQFLNAIPKEYRPKRNYELITTDKEMVEILKNNKKINLIDDKKYFHIVKKLTEYELPFEKSQNEIKELWDYILGNNEEEICYLTFKMIGRLAEYLIRKNPIIKKVLNMTYSHLFLDEYQDTTSMQYKLLKSCFYNTDIVITAVGDDKQRIMVWAGALKDAFNRYKCDFDAIETMLVMNHRSAPRLLTLQKSIYKEFFYKDSIQDCTIKNNPKWDDEAGEAYVHIFPNDKIEAIEISAQINKLIESGYNKREICILVKQTPDKYCKDIIENLEKNHNIIARNEMIFQEILKEDLINILNDIIAILINKKSPEEWSRFIDLIMEFNECSLTDIYEIRLLEDSILKNILKFKEVLLKVSSEEELYKFINDILEFIGIEKLKGKYDNYKNESTFRYYINTYCDLLWREYIKCKKWNKAIENLKGENSIPIMTIHKSKGLEYDVVFFIGLEDGAFWSFENQKDEDFCTFFVALSRAKKRVDFTFSKIRKYTRNYQENRVKIKEFYEILEKSGVVDSKLYDDSKNYELLLI

SEQ ID NO: 71160 - protein, 706 aa, Sphingobium sp. 22B; identical to SEQ ID NO: 70986

SEQ ID NO: 71161 - protein, 571 aa, Sphingobium sp. 22B; identical to SEQ ID NO: 70987

SEQ ID NO: 71162 - protein, 561 aa, Bacteroides fragilis
MYISKVSLVNYRNFENSFFLFNKGINTIIGENASGKTNLFRAIRLILDDNLLSSAYKLNENDFNRNLINWKGRWIIISLEFSEISNEEAIQALFVYGSGVIADDKVKKATYNLFFRPKPEIRKQLSELKEGDHDGLNFILDKITINDYETFFTGKSTVDFNDKNVQRELMGDFENVIFNYEIDESKFGGRIPHQLSISKEVAFTFIKALRDVVSDFQDNKKNPLLTLLKSKSEELNDKDSELISNKVKDLNRTIEDLNDIKEITNNISETIKEAVGTTYSPSSLSIKSNLPNEAEKLFHALKLFIGEPGEDYEGSIHELSLGGANLIFLTLKLLEYKYRKGKDRIANFLLIEEPEAHIHTHIQKALFDKIEYEDTQIIYSTHSTHISEVSNISNMNIINRFKNYSEVYQPFIGLNDEEIMHIERFLDAIRCNILFAKSVILVEGDAEEILIPVMVKNTLGVSLDELGISLINVRSTGFENLAQLFHNQRIKKRCAIITDLDESITGKDTEASKRGLSRKAKLDSIKNANEWICPFYAPHTFEVEFLGNGNKDIVLSTVKDV

SEQ ID NO: 71163 - protein, 592 aa, Bacteroides fragilis; identical to SEQ ID NO: 62695

SEQ ID NO: 71164 - protein, 561 aa, Bacteroides cellulosilyticus; identical to SEQ ID NO: 71162

SEQ ID NO: 71165 - protein, 592 aa, Bacteroides cellulosilyticus; identical to SEQ ID NO: 62695

SEQ ID NO: 71166 - protein, 637 aa, Gluconobacter oxydans
MQIKRVTIANFRSIKRAEIELGATTVLIGPNNAGKTAILEAIRIALTRRWGQRGTGFTEYDVHLCAARTDPKVGDPVVIEIEIQESVVAEWPEELHETLADIIQLNPMSGQASIIMRVSCAWDDGEQSYIPKWEFLNTDRNPLAGKGARATNFQEFFSFLPVFYLDALRDAGDEFAPRSQFWGRLLRTVQIPELLEQKSVRIFNLLNAKLLAADPLLGDLATSLSDISRVATTGTPGQANLRVLPLNTWDLLSKAEVIYQNDGTKPWLPLMRHGQGVQSLSVMFLFRSFVELLLGELYRAESTPVLALEEPETHLHPQAARTLFGHVAQLQGQKIISTHSPYFLQHVPFRDLRVVRAGPDGTIIKSLPREFRCRVPNLPTFAPVIAASGGLLEYDGGLSELVIKGSLAMPTYKKLLGACQGQAEMAAIHARLKAARDASLEFIPDEDLQKLETFARRIRGEIFFANKWLLVEGQSEYHLVHGMAKAMNFDLDEHGVAVIDFANNGNCGMFTALARALGFPWTMIVDGDLAGNQYIGSVQARNFTPAEVAQLTHQIAGQTLEHQLVADGLQPELKAILINQGMPGVAAMDDAALIATLSSDKCGYAAELAAQCATSLPLTQRMPLAIREAIETLRGLP

SEQ ID NO: 71167 - protein, 635 aa, Gluconobacter oxydans; identical to SEQ ID NO: 65087

SEQ ID NO: 71168 - protein, 680 aa, Gluconobacter oxydans
MKLASIRVEGFRLLENIEITIEQSATVIVGRNNSGKTSLTEIFEKFLGDPAGQFCLEDFSATIRPQFITAKALRDADAPAEEVLAALPKIALQLTFCYAPDAADFGPLSPFIIDLNPNCTTALARVEYAASLNSLTGLLEVPLPEAGVDANHALFRHLRNTIAGSYVIKLTAIDPTDASNWREFDKLAPLLALIQTGYVKAQRTLDVSKRGDTDVIGKILSKLFRTANALGASEQDQAIANQLKASVAQLEQSMQGDFDEKLEGLLPALNSFGFPSLNDTQLRPQTTINVEDVLKENTRILYTGADGVHLPEGYNGLGTRNLIYILLQLEALHKAYRGAVTRPGTHLVFIEEPEAHLHPQMQEVFIAQLNEAIATLSQQYPEELVWQVQFIVSTHSSHLANAAQFGAIRYFLNEQTAIEGVRRTQVKDFRKGAEKIRHEDQAFLQQYMTLTKCDLYFADKAILVEGATERILMPRIVKLVDAELEVQDKLARQYITTMEVGGAYAQIFYPLLSFLELKTLIITDLDAVKLVGEKYKKCPCCEGERTSNSAIKAWFKDNAISIETLQGKTEAQKTKGFVRIAYQTPEDGSEHCARSYEDAFVLANLELFGILDDADAATCAWDTAKGFGKSEQAIKYAIMEEDWNVPRYIKEGLRWLSEPSPPPEAATAMVPGDDAEAGVA

SEQ ID NO: 71169 - protein, 580 aa, Gluconobacter oxydans
MNKPKSPALIAAEAAQAKLDACLDAQANFRLEAGAGAGKTYSLVAALKKIIAEKGYALMHAGQQVACITYTEVARKEIANDIEERPAILVNTIHGFGWAFISRFQKALRQLVLDTADEKRQKLIDEAGGIHDQRVDYSFGFFGVDEARITLHHDDVPAYLAALLGNPKFQRIFASLYPVLFIDEYQDTDPLVMDALSDHFFEPRVGPITGLFGDHWQTIYRKDYELTAFPHVEGIDKGSNFRSVQVIVDVLNRLRPELMQEVDDPDVAGEARFFHCNSFAGERVDRPHARRELPDTVLADAIARTKQTLSDDGWNFEPATTKILMLTHNVIAAERGYRTLASIYDHKDALVKKEDAVIAFLVDMIGPVCDAYAAGKHGAMFALMGGIPTIRKAADKASWRQDMEQLAELCVNGSIGQVLDHLKETRRPRLPDRVAAHEEDIARLGPEVTEDEPNSLKRYRQLREVAFSEIVALSQFINGFTPFATQHSVKGAEFDDVLVILSGGWNHYNWPKFLELCEAENIAAKDKGGFYRARNLFYVAISRPKRRLAVLATQALSATAMATVEKLFLAENIVAVPLGE

SEQ ID NO: 71170 - protein, 711 aa, Gluconobacter japonicus
MHISKLQIVNYRNFKRANVVFNKGVNTIIGENGSGKTNLFRAIRLLLDDNLLRMAYKLDDQDFHRGLDDWRGHWIIISLEFDEVSKDEAIQALFLHSTGVIEADTVERATYNLIFRPKVAVRTKLGQLEAGDKEGLALIRKDITIADYESVFSGRSPADLCDPSIYRKIVGDFDTVEFPDELKPPEIGIEIRSMLSLAKEVSFTFVQALRDVVSDFQNQRTNPLLTLLKRKSGEIDPATSGPISKMVSELNDTIGDLDEVKTIRSEISETILHAAGETYSPRSLAIKSELPEEAEHLFQSLKLFVGEAEEGYQGAIHELSLGGANLIYLSLKLLEFKYRKQNESFASFLVIEEPEAHIHTHIQKTLFDRLNFAETQIIYSTHSTQISEISNIANINIIARDGGVCEVFQPAVGLNPNQIGNVQRYLDAIRSNLLFAKRVILVEGDAEEILIPILVKQVLGLSLDELGISLINIRSTGFENVAILFHDLRIRKHCAIITDHDLAFISTAPDDGDSKRVIKAKEKAIASQKAGEERKLRLEHFCQNNRWLSLHLAYNTFEVDFMKAGNGDTVKPVIKDVYVRPTEIAKAEADIASSDIAQFGTRMLKMADKVGKGWFAILLGKWVTPDTAIPGYILRALLPNPSSLSRAAWANVLDYRLEHIEQVGLNWEDDLEHMRQVVDGFVSKKLNFDDLRAAMCAHFPTDRFSEFLVNF

SEQ ID NO: 71171 - protein, 597 aa, Gluconobacter japonicus
MFIWGKNELNEAQEKAIEEPGSVFLVACPGSGKTRTLTYKIARLLSELQSEKKRVVAITYTNRAADEIHERIEQLGVDTSQLWIGTIHAFCLEWILKPYAVYHPALKNGFRVVNGHESEEILEELCTQMRNPTITFRDCGYFFTTSKVRINCHDDKKENVKAALRKYWYYLKANRKIDFEFILYYSFQLIRDNLPISTILGSIFSSILVDEFQDTRETQYSILAAILKAAKGQAIAFIVGDPNQAIYGSIGGYAISAEEFGRQCNLSFREMNLSDNYRSSSRIVDYFGNYNVLSAKCVAVGKVTRFPSVITYDTETHRDELEAELIRLIRYNVEETNIPPHEVCIVAPWWIHLAGMTRRLAVALPNYSFNGPGMVPFARDIDNFCYKLARIVLTQATPSLFVRRMRWAGEVIAALSEADVNVGDLDRKTLLRECNSIEIDETDGLTYLRMFFEEVLLKLGVDWRNNTNIRVHHDSFFESSQRRIARIVEEGSEAIAETAAFRRVFAEKSGITISTIHGVKGAEYDAVIAYGLLEGLVPFYSDRDKAAMARKLLYVVASRARKNLHLISERGRTKRWGDAYLPTEVLSACSFAYDATA

SEQ ID NO: 71172 - protein, 229 aa, Gluconobacter thailandicus
HGESPQALVEGTTERILMPRICRLVDEGLPDGQKLTRQYVSTVEVSGAYASKFYPLLDFLELKSLVITDLDALFLDEAKKPARWKKCPTAKGNRSGNAALRAWYKVKQGEALLLADLAAKQDPDKISGYCRIAYQIPEPGSAHCARSYEDALILANPRLFELTEEDRANDAWDKAQELHKTDTALDFAIREEAWVVPHYIREGLIWLSQPPPPPTEPPAIDAGAEQPAA

SEQ ID NO: 71173 - protein, 480 aa, Gluconobacter thailandicus
MNHVPQSPAEIAAAQAQQRVNGRLDAGGHFRLEAGAGAGKTYSLVKALKRLISTQGASLFQRGQRVACITFTEVARDEIARDIEMHPAILVETIHAFSWAFMMPFQSALRELVGSIDNRQEKIEAGGGIGTKSVTYDLGFFGVDEHRVTLSHDDIPNFMARLLERPKFRAMLNQAFPVIFIDEYQDTDPHFMAALTTHLFTPSAKPQIGLFGDHWQTIYRNEYMLADFPNVQEIGKQSNFRSAPAIVDVLNRLRPDLPQHVSDPEAYGEARFFHVNAYAGVRTNTGHSKADLPDAVKASVTEALKERLIAEGWDFAPEKTKVLMLTHNALAAQQGYPTIAAIFDRNEAFAKKEDPTIAFLADTLEPMIRAYAGGHFGEMFRMLGGKPSLSCHANKVEWRTDMDRLNELRANGTLGDVLDYLKETQRPRLPDKVALRENNIHQLGTEVLEGEEKYITRHRKLRAVPYSEVVELGLVGIHRE

SEQ ID NO: 71174 - protein, 711 aa, Gluconobacter japonicus; identical to SEQ ID NO: 71170

SEQ ID NO: 71175 - protein, 597 aa, Gluconobacter japonicus; identical to SEQ ID NO: 71171

SEQ ID NO: 71176 - protein, 711 aa, Acetobacter orleanensis
MHISKLQLVNYRNFARATVKFEKGVNTIIGENGSGKTNLFRAIRLLLDDNLLRMAHRLDDRDFHRGLGEWRGHWIIISLEFTDVSQDETIQSLFLHGVGTITGATIDKATYNLIFRPKAAIRQRLSQLAAGDETALSELRREISLADYETVFTGKSSADFTDPAVYQALVGDFDAVTFPDELTPAEIGNIVPGMFSIAREIGFTFIQALRDVVAEFQNNRTNPLLTLLKGKSGEIDPAKFAPISGLVTDLNTAIEGLDDVRAIRTDIRDTITDAAGETYSPKSLSIKSDLSDEADRLFQSLKLFVGEAEAGYEGGIHELSLGGANLIYLTLKLLEFKYQKVKQTFANFLVVEEPEAHIHTHIQKTLFDRLNYDDTQIIYSTHSTYISEVSNVENINILGRDGGVCEVYQPAAGLDPKQIGNIQRYLDAVRSNLLFAKSVLLVEGDAEEILIPILIKQVFGLSLDELGISLINIRSTGFENVAILFHDQRIRKNCAIITDLDQAFIDLTTNPADTPAQKKAKDKATGSQTSGAARAGRLNTLCTGNSWLSTHLAHYTFEVDFIRAGNAAAVVSILGEVYSDGATIALAKTELESGDIVQYGTRVLTMAKHVGKGWFAIILGKAITPDVHIPDYILDALFMVHRPVSDEILASIIDHRLKVQLKTVGVLPAQVAAMRVYLDLFRSGDIDFPFVRTEMLTAFPGDRINTILARL

SEQ ID NO: 71177 - protein, 596 aa, Acetobacter orleanensis
MFVWNADDLNADQVKAIEQPGSVFLTACPGSGKTRTLTYKIARELSLLTSDKERIVAITYTHRAADEIQERIEQLGVDTSQLWIGTIHSFCLEWILRPYAIYHPELKNGFRVINAHDTERAHEALCRTHGSKLSVFDCGHYFTPSGYVINCDDWKLGKVDALLQQYWQDLRTSRQVDFELILVYAYQLIRDVPSISILLGSIFATILVDEYQDTKEIQYAILGAILKASNGKAKAFIVGDPNQAIYGSLGGYAITPAEFSKLSGVTFKELDLSKNYRSSGRIVGYFENFNQLTSKITADGEFKDFASLISFDSSTDRNALEAEIVRLIRYNIETMGISPSEVCIVGPQWPPLASMTRQLVAALPDYSFSGPGMVPFARDIDNFWYKLSRIILTEASPQLYVRRSRWAGEVIAGLDLAGVNTSAITRKSLLRASNGITSTKTDGLEYLCECFDALFAALGIDRATSPMLVEHYDAFVEGSQLRIDKLTATGGTAIAEIAMFRKVFAEKTGITVSTIHGVKGAEYEAVIAFGLLEGMVPHFKEADKIAAANKLLYVICSRAKKNLHLISEVGRRRGQNNVYQPTDILLACSFGYDQIP

SEQ ID NO: 71178 - protein, 638 aa, Listeria monocytogenes; identical to SEQ ID NO: 64506

SEQ ID NO: 71179 - protein, 635 aa, Listeria monocytogenes; identical to SEQ ID NO: 64507

SEQ ID NO: 71180 - protein, 638 aa, Listeria monocytogenes; identical to SEQ ID NO: 64506

SEQ ID NO: 71181 - protein, 635 aa, Listeria monocytogenes; identical to SEQ ID NO: 64507

SEQ ID NO: 71182 - protein, 509 aa, Listeria monocytogenes; identical to SEQ ID NO: 71144

SEQ ID NO: 71183 - protein, 725 aa, Listeria monocytogenes; identical to SEQ ID NO: 71145

SEQ ID NO: 71184 - protein, 509 aa, Listeria monocytogenes; identical to SEQ ID NO: 71144

SEQ ID NO: 71185 - protein, 725 aa, Listeria monocytogenes; identical to SEQ ID NO: 71145

SEQ ID NO: 71186 - protein, 509 aa, Listeria monocytogenes; identical to SEQ ID NO: 71144

SEQ ID NO: 71187 - protein, 725 aa, Listeria monocytogenes; identical to SEQ ID NO: 71145

SEQ ID NO: 71188 - protein, 638 aa, Listeria monocytogenes
MYLSSLRLKNFRSFDSESHEIKFNKGLTVLVGENDSGKSAILDAIRIVLGTTDFSWYRVNDSDFHNEDCSLEIEIICKFSDLSPLETSAFLEYLTYEEGKNPSLYLHWKCRYMQSFKPPRPVSSMVTGKNGDGPALSPESREILRVTYLRALRDAYSDMQSGRNSRLSQVVQNIPDILKGESDLKEGVKLEELSLIGIFNLSNNLLADYPALKKIKEQMTDILKNQMLLDSDNLATRFRVTGSATADTRKLTSLLEKLDLTIDKDTTSLKGIPGLGTSNIMSMACELLLRRNSQEACQLLLIEEPEAHIHAQRQMKLVKSLQADSEANSQQIILTTHSPQLASAVKLENIILIKNGKAYPLSKSETSLGPDDYIFLERYLDSTKANLFFARNVIVVEGPGEALLLPTLSRLLNRDFVDFGVSLVDVRSTGLRRYSKIFQRKNKDDPKHSGDWLNVNVACVTDRDIMPNCAPRICLNNDYRDDNTNWPEKNDRKWRAESDFNDTEKDTYLNDIESKASGQNVKTFVSNKWALEYDLAYYGLESLDMKKALINALVKTTYAQVNWKSKTTEILMALDSRASKEEKASYFHSFFTIRKASKAEFSQQLASELEANFFRKEEELKALLPPYIVDSILYVTKY

SEQ ID NO: 71189 - protein, 635 aa, Listeria monocytogenes; identical to SEQ ID NO: 64507

SEQ ID NO: 71190 - protein, 741 aa, Flammeovirga sp. SJP92
MKIKKIKVKNYRLLQDFCIDLEDELSLVIGKNNTGKTSLLSVLDKFLNPSDRKQFSYNDFNIENKQQLYDLVQNVIPSVENYTPFGIRLRIFIEYNDSDNLEHISSLMMDLNPENNFIVLGFDFVLHHSFLENLREDFQIFKQKEAEKKANNAEYEEKGLNFFLDRNATNYFNFIRKTVEYDLTTSEANEDNYKDLVKEKISIQNVLNFKFISAKREVSNRDVDKTLSSQTSKLYKKSEESTEQQNAIEEFQDKLIDTDIELSDIYSGLFKEVIEKVKKFGGIKQDDSQIEILSTLQHRELLEGNTTVMYNQFDSSLPESYNGLGYMNLISMIFEIEYLVSDFRRLADEVPADINLLFIEEPEAHTHPQMQSVFIKNIKELLKEGIKREDGNNRKLQYLISTHSSHIVSESDYDDIKYLKKTTDNNVVAKNIKDLEKEYEENGEQENYRFLKQYLTLNRAELFFADKAILIEGDTERILLPAMMKKFDNEYHTDQITGSTLPLLSQNISIVEVGAYSQIFEKFIDFIGVKTLIITDIDSFYEQVLYETDGVTPKCYGNGNVKKETVKCFASNSAATHTSNTALHFFHGNQKKLNYYTNLDFDAKILKKDNCKIWMVNTEGDVWLEQPRKWISSESGNVLLVFQTPEANYHARSFEDAFFHINSEFIKNKNHSFNSLTSKYLKKFKSDEISVFDFSEQAVNSKPSLAIEILLNSKTDIDGNLYSNWQTPAYINEGLTWLKED

SEQ ID NO: 71191 - protein, 632 aa, Flammeovirga sp. SJP92
MDEFQQIMEHIHRGENFLLSGGAGSGKTYSLVQVIKQVIEENPTKKIACMTYTNAAVKEIDERVNHKNLNVTTIHEFLWDVIRRYQKEIVEALVELINDPENTKFKTTETAPITTNFFSDEIEYSYLSTNFSKCRISHDEVLLLSNYLFKKHKKLCDILKDKYKYIFVDEYQDTQEEVIEIFLEHMTQSSKFCIIGFFGDSMQAIYDEGVGDIVKYLENDKVKEVIKRQNRRNPKLIIDLANKLRTDSIEQEPSTDSNAPNMQSGTVKQGTVQFRYSSNKNDLEKLKTELGWDFEYNTVSKKTQAKELNLTHNLIADKAGFRDLMDIYDKDKIIDFKNRIRKYLKENNIQTDFSDKTFGEVIDSLSVGKTDNELKKIKPTPVQQSFISQNQDLFTFAKRLPFSVFIKTYVDKDQLIDDKKQDEDDENKKGSRRDELIKHLHKIQHIIHLYKTGDYNEFLKHTQKRINSISGKRQLKEDIDNLINVGDKTIEEIVQHAHERGICFIGDKLTSFKREMSYVYNRVASVPFLQFQKLYEYLEGRTPFSTQHKTKGTEFDNVLVVLDNGGWKNYNFEALFLNSGRASVLERSQKIFYVCCTRTKENLTVFYHNPSSEVIAQAKSWFGKENVKSIHE

SEQ ID NO: 71192 - protein, 567 aa, Flammeovirga sp. SJP92
MNIRINRVKIQNFRSLKEATVTLENFTLLVGMNNVGKTSFLRALSFALGNDIRQLTLDDFYINENSERASEIKIDIEIIPLNDNKERIEEFDGEIWASYFGGEAIDATEDNEKVIFRSTFSLTEKGVEINRKNLAGWEGVEGAAIKFSLKGLPFRFIDARRDIEEDIKLKTSPLGKLIQQIKWDEDAKQEIENRLTELNNSATENSDVLTHISDNLLSLNDTISNLNGGVAVSPFPKKIHDIHKGVKLHFDDFSFEYLGMGTRSWASLLASKAFVSWEKQVAEEEGEAYNHFLALEEPESHLHPNAQRHLYKQLSDVDGQVIVSTHSPYISALVQLSEVRFFVKNELGTIINDIQLVRSTPEDLRKIQREVLNTRGELYFSNAIILVEGESEEQALPILGKQFFGKELFELGINVISVDGGGKYFPFLNFCEGLKIPWFILSDYDNDNIRRNLSAALSNANISNLENDGRVFCLNYDIEEYLIEDDFLDLLKESIIDLEMVGKDERARPSTVQRITRLTRDEVLEKLRQKKTKIAPIYSEKIISQGDVRLPTIIDELFQEIKDTLDI

SEQ ID NO: 71193 - protein, 618 aa, Flammeovirga sp. SJP92
MKLSEEQKEIIRLESGLISVTAKAGSGKTLVLTERVRYLINEKKVKGKILCLTFTAKAAEEMNSRLSDIDKIEDKVFIGTIHEFCMNIIQSKYRELGYENVPHIFESDIDKQSILADLIQDNPEFEEAYINLPEGNKKKYFFSNALTFFSRIKRKLETDLDNDKPNWALNIRLYNSYKSALQAQNAIDYDDVLLKVFELFRDNPKTLSLYKRIYKYICVDEAQDLNFAHFNIIKYLVNDDLLMLGDENQSIYQFNGASPYFFSKRKLEEVFHKEIIIKSLTNNYRSSKKVVELANQLRKDKVATIANIPIEGYVDLQEFDNEELEAKYILDKIDYYLSNETFLNDIVEKVSLDSFVVLARNRYVFNQLITQLKERNLSYELLGSSNGLQFESKFFKAFDLGSRVIINQRDEFHYKQLLDLYRIEYTEETKAINILSDLKKNNEISDFLVQVLVILKEEKSPALIFRSIQKYIGSLDENDKDYELLIGDYEYFKKLWSNFTRSKNYTKKDYHNFRKYITMGYGDHSKVKEQVSLTLSTVHMAKGKEFDVVFLMGMNEGTFPYYSSLNDSKKLDEEKNAAYVAVTRAKRVLHISYPVEKVMPWGDSKKQIISQFFKEVNL

SEQ ID NO: 71194 - protein, 561 aa, Marichromatium gracile
MLLTSLKIEHYRGIKWLELALGSTTVLVGENNCGKTSVLHALRACLYVLRSAGRASPFDELDLHFDSCRADPTTAPPIVITLTFEEETAGEWSDEVEQRLGGDGGVIALIPPDDHSRVQLRVTAEYSKATQEIETTFDFLDAVGNPLPPKNRSRLTNLQQLRPLFYLSALRDAGKEFSRTSQFWSPFVKHSQIDEATKASIEAQLEDINAQIIEAHGTFKGVREHLGKVQELVALGGQDVVSVDAVPARVFDMLNRTQVSIASATGARLPIGRHGEGTQSLTVLMLFDAFLKSELARKQGVRESKPIVALEEPEAHLHPNAVRALWKTIRDIDGQKLIATHSGDLLSEVDLTAIRRIYKSEGQVKVGALAVGTLAPRDQRKFDFLVRRTRGELFFARCWLLGEGETEAILFAGVAEVLGLDLEQAGVRCVEYRLGDIDYFLDAANALGISWHCMTDADDQGAKDAKKAIDRLPGMRKRPSRHISVLVNAASIEPYLAANGFLDVYEAIAVPAKKLAKLTVSPGDPAYADQIIKCIPDKPSAAYAVVEAMRQRGPASIPKAL

SEQ ID NO: 71195 - protein, 570 aa, Marichromatium gracile
MRERLLSSVPDAKGRVLLTTFHSFATDILRQHGSHFGLSPDFEILEESERLGMVKSVLAEKTDELTKFVSAEKALKAIDFLLRNLTPDAKIPLLLKDAEAGKQLQTLFVRYKELLKQKNCLDYGSILYCCEELLRERPRISKQLRTVYRYVCVDEFQDTNAAQYRVLRSLVPDRNANVFIVGDDDQIIYQWNGASPKRVRELGHDYDLTTIQLPENYRCPPEVVALANALILHNGERSPDKLPLRSMKPGSGCNPIELLAPFEDDQAEARGIAECVAERLKSGSHPRDLVILARATRLLERVKEALDTLSVPSHVQRRKSQFESAPLRFVTSALKLALVRSDDELASTVTKALSDCVEQDSSEEDLAGFSAALNGDQLEALGALVLASPAVPKALQDAVSSLVQGHYADFIQAALAHFDSVEGATPEGGDEQYVEYPTERKVWQAIIHEIGGEEDAYAMSLGQFLQELALANKTPEAPSNAVRCLTIHGSKGLEFPHVYLVGMAEDQLPSFQSKKSGDDSREMQEERRNCFVAITRTIETLTMSYGQRYNGWRKSPSRFLFEMGLLGSDT

SEQ ID NO: 71196 - protein, 687 aa, Bacillus cereus
MYLKSLKIYNFRKFGIDNNKIEFVDAKSFQEQKNKKEINIAPTTTLIVGKNNCGKTTIIKALDNLINNKDAFKANDFNFLYLKKLLDQYEQTILKLDDESKEKIETPYLQFNIGIGIEDNSNDLVTNLVRFMKLDDINNSELEIGIKVELENEEVFIRDVKKLLEKNHNSSIRFSGFLELINNSVFKLNYYNADNDKIENFNIKNLIELRPIKANNIESEKCLSKAFSKIIEYRYKSLFGEEGNDLNSKISDINEELTKLISEKHTHSINESLGEIESNEKLKVLLRADLSFQKVMNNLIKYEYVERDMNIPENQFGLGYTNLMMIIADLIDYMEKYPENSFNSKVNLISIEEPETFMHPQMQELFIKNINEAIASLLKSKNKNVNSQLVITTHSSHILNSKIHSGNTFNNINYVTTKNNYTHVVNLRDDIIIPKSETNAHKREDDLKFLKKHVKYKVSELFFSDAIIFVEGVTEETLLKYYIDNRDKLNKNYISVFNIDGAHGIVYHDLIKALKVPALIITDLDIKRATKEKENFKQISDLKDRLTTNETIKKYNGGSDRLEELRHEKFEVENVYIAYQGKIKGYYATSFEEAFILTNYENKILNSVLEKMKPKIYEDIIGENKNLDNIKENSYKLQKKLSNNKSDFANELLYKFITETEAPGVPSLPQYIDSGLLWLTKKLEGEK

SEQ ID NO: 71197 - protein, 687 aa, Bacillus cereus
MSLSKVALSNREEEQKSLNAIFYSIDKSESIIFNAGAGAGKTYALIESLKYVIRNYEKNLKKHNQQIICITYTNVATKEVKERLGNTDLVLVSTIHERIWGLIKEYQKELVEIHKEKLEDEISNLKQKLKIAREYSKYRELEDDLKEKFEKIMIENKELFFQNYSVTAAELKKSFKTILNDYPDILKNVSNFKKIVNTIYKLDRYRKCYENIISNKKGYKSVEYNSIYNNDQLHKMRISHDTLLDYGLKIIEKYDLLKQIIIDKYPFVFIDEYQDTDEKVVLIMSYLEQYAKKISHNIFISYFGDTAQNIYDGGVGSKITKIHSGLKSINKVFNRRSTKEVIEVINKIRNDNIQQISIYDDCEGGSVKFYTGTSDNVKDLLDKYIHEWKITTKNQLHCLVLTNKIVAEYSGFKNIYEAFKETDKYKGINYNQLNTELFSNDLSKLGEIPKLLFNIVRLQNNLLNKTTSVMDISPKESLFDDMSIEGLKKLIKSLKEHKGKTLGEYIESISTVYSQVNDENYKKIIDWTFGFENITFELFKNYLIGKLFNQTSDDDIDHANTTIQKMLKVDIAEYGLWYKFIMDKQEEKVIYHTYHGTKGREFDNVIIIMENAFGRNRDYFNFFFENSLHSDGLEDERERNLEKIKNLLYVSCSRAIKNLRVIYIDDVTSFESGIKEIFGEIYLFSNN

SEQ ID NO: 71198 - protein, 678 aa, Bacillus cereus
MHNSKSPYISRVKITNFRNFKDIDVNLNHKQIIIGENNVGKTNFLRALQIILDPKLSDEDRFLLDTDFFDGLSEPMKNREQIEISIEIQGYDHNKTILSILDAATVSTSPKTLRLTYRYFPKVKEDGTHDYQFIIFQGEKEEIPFTHYHRRFLNINVIHAMRDVESEMKHIRKSPVNQLLKQYDIRKEELAEIASALKQKSDEVLSIDELKDLTNKISSRFSSIIGNQIDSTVSLETIDFNPNRILNTLKLMIGEKKRHAGDTSLGINNILYISLILLSLEDNTIPSIIKEDKFQQLLKEDSSAFLNDCYEQNQKQNYILKTELSDEMQTELYTFMDTYHSSNNGCTILAIEEPESHLHPALQRVIYKDVMNKNTSILMTTHSPHITSVAPIDSIVHLRHTSEGTCINTTASLTLETRDRKDLERYIDIKRGEIYFGRGVILIEGVAEEYLIPSFASKMGMPLDKKGIICCNVNSTNFKPYVKFLDALDIPFVVITDGDYYINVKKVKEVKKGEEIEEIEKVEKEFGLLQEDSHEDFGYDGNDRMRELLINLNKLTDELIPENYADQDAIFSSLGFFVGYHTMEIDIMSQIKDLSYEKDIINTIFCELTSGGEQQKKNFQLELEQGKYVSCLKKIESSHSAIGKGRFAQHLSIECTKNHVPDYIRLAIESIYKRVDEL

SEQ ID NO: 71199 - protein, 608 aa, Bacillus cereus
MELYLQKIKQIQDDPDQLAAFNSNISTVVKAGPGSGKTTVLTLKILKLLNERIHVPRGLGCITYSKEAAKEFTSRLKKMGYQKRANVSLGTVHSFCISQIIMPYAHLFKDDFPLPIDLIADSDKYKLFLSILKDFNINPNNLKFQEMESERSHSVTGFSKVKIDKNHIAEKVAIEYEKRLKQLGKTDFIEIVKYSNQLINREEYVRKCLEAKFPWILIDEYQDFGKPLHEMVLSLINLTNIKIFAVGDPDQSIYGFNGAHPSYFLELYDSTKLLSIDLKTNYRSNQDIIDASSITLNIDDREYKAGARIEEKGIFHFIQCENELDEQYKYVVDTIIPNSQKQGIPLEEICIIVKDKYAAEGLRKVMEEKSIPYYIAKFEFSKSEIVLWLKDCATWLVNNLSGSFTSISDFWIQLLESHLGILSENERIKEKKKLYNTLIMSKKFNDLLNDWLAFIVARLNLHCILKQSEKYLEEAHLLEKLLQFATNGEFKLYSIKQFSQIGKPENQVTISTRHSSKGLEFEVIAILGMEHKVFPDFRNLKDIEKFNEERRVFYVCITRAKRECYLLMSKNYTKDTSKGTFTFRHYPSIFWNELYQVCKKKNLSHVTS

SEQ ID NO: 71200 - protein, 670 aa, Bacillus cereus
MQTSRSPYISKIKIKNFRNYKDVDVTLNHKQIIIGENNVGKTNFLQAIQLILDPKLSDEDRYLQESDFFDGLEDPMNQKEKIEISIEIKGYEHNKTILSTLQEATVSTEPPTLRLTYEYYPAEDGTGGYQYRIYQGTDANNLFTHYHRRFLNIKVIPAIRDVESEMKSLRKSPINQLINQYDIRKEELEKIATALKEKSDEVLSIDELVDLTQNINSRFSDIIGTQVDSTVSLETIDIDPNRVLNTLKLMIGQKKKRSTSNTSLGLNNILYISLILLSLEDKTIPSILKEDTYDTLTLEKESSILADCYEKKDSNNYILKKDIQKKDYDELYSFMDSNFSSNNGFTLLAIEEPESHLHPALQRIIYKDVMKENTSILMTTHSPHITSVAPINSIVHVHSTKNGTVVNTTASLTLDDRDKKDLERYIDVKRGEIYFGRGVILIEGVAEEYLIPSFAEKLGMSLDRKGIICCNINSTNFKPYVQFLDTLGIPYVVITDGDYYIWEEKKNKKGIIEPKKTFGILAQDSHEDFGYDGLDRTQKLLVELKKLDAEQIPEDYAKQDPLFMRYNFFIGIHTMEIDIMNHISNMKTEKELLCKIFDELTLGGTRQKTNFKTALEKGEYDSCLRKIENNSSGIGKGRFSQHLSIECTKNFIPKYIQAAIETISKRVDEV

SEQ ID NO: 71201 - protein, 608 aa, Bacillus cereus
MELYNKKLKQIQQDPEQFTAFQSNTSIVVKAGPGSGKTTILTLKIMQLLNEKITFPRGLACITYSKEAAKEFTERLQKMGCPKRKNIFLGTVHSFCISQIIIPFAKLFNDDFALPLDIITDAEKQKIFNLALTNLGIDKDELSVEEMDKERSFTITGLSQVSATLNATAATVAYEYEQQLKKLKKTDFIEIVKYSRELINREKYIRRCLESRFPWILVDEYQDFGKPLHEMILSLLSLTNIKVFAVGDPDQSIYGFNGAMPEYLLELYDKPDISSVHLKTNYRSHQDVIDASSIALNVDDREYKAGIEHDGNAEFHFITCEEELDAQYNYVVNTIIPKCENQGIPLQEICVLVKDGNSLKNLSTVMKEKQIPHYSSKFEFAKSDVVLWLRSCALWIVNPTSQSFTEIFNFWIQLLKNETKHFSDENTLMLQKQLYTILEDSKKHTENLSNWLTYLEQELNLAKILNESATYLDEEKYLKMLKSYAQSGSFEDYNLSQFSQIGKPKDQVTLSTRHSSKGLEFEVVIMLGMEKGVFPYYKNEHNSAKLNEERRVFFVCLTRAKRICYLLRSKKYKRKTRWGIRTFDHKPSMFWDELHETCKKKKLVSSTN

SEQ ID NO: 71202 - protein, 775 aa, Collimonas arenae
MHIEIVEIGNFRKLLGVRIGLSKEKTIFVGANNSGKTSAMIALRHFLVDRERAKFSLNDFTLSHWPTIDAMGKAWEAAKAADAELPVPDLSPVLPYLDVWLTVAKTEAHYVQKLIPTLDWDGGRLGVRLRFEPREGLQFQKDFLAAREDAKAIQAVDEPQLNDDGVPVAKSIMLWPRSLSEFLQRRLGKLFVVKSYILDPTKLVDPEFGVAHPQVIGSDAEPIDGEPFKGLIRIDEISAQRGFGQSDGIKDSEDDNAAAGASATRKMSDQLRRYWNRHLDPYENPDARDLRALKAIEDAQKAFDDRLREGFAPALKEVEGLGYPGVTDPRLNISTRLRPIDGLNHEAAVQYMIQIVDGENSFDLNLPEDSNGLGYQNLISMVFRLMSFRDAWMRVGKASSTKTDMPGALVPPLHLVLIEEPEAHLHTQVQQVFIRQAYDILRKHPELEKNGSILSTQMVVSTHSSHVAHECEFDTLRYFRRLPASVRSVPTSCVVNLGNVFGADQDTRRFVTRYLNVTHCDLFFADAAVLVEGPAERILVPFFMRNQPDLHDLAECYVTWLEIGGSHAHRLRPLIEHLGLTTLVVTDLDAMTAERKTIAPLRGAGQKSRNTTLGSWWPGKDDLDVLLDVKSDEKIKVYANERFAIRVAYQCPIDIEFNGNKTEAISNTLEDALVFQNLDFFAKTNGNGLFSRFKISIEKSKTVTELGSALFEDLKGGGKAEFALDLLDIQDPNALRPPLYIKEGLLWLASQLRKQQQELGVATSTLNGVPEAEEK

SEQ ID NO: 71203 - protein, 631 aa, Collimonas arenae
MTAAPLAASNTDLDDHVDNEIAEYINLDKPRSFFLFAGAGSGKTRSLVKALSHIRSTHGRQLVFRGQRVGVITYTNAACDEITRRIDFDPLFYVATIHRFAWELIQDFSYDIREWLRTKLAADIVELQKAEAKGRAGTQASITRLAQIDSKTRRRLQLDTIKSFVYSPTGENREANSLNHSEVIELCADFLLSKPLMQWILVGRFPFLLIDESQDTNKRLVDAFFATAVKHPERFALGLVGDVMQRIYADGKEKIEQGLPESWARPSKKLNHRCPKRIVRLINQIRSAVDDHDQESRSDAIEGFVRLFIRPANTQNRQAVESAIRAQMADITDDEQWRSLDDCKILTLEHHMAATRLGFEGILEPLLAVEAWRTSLLDGSLPATRFFTQNILPLIEAEQRRDKFAVARIVRSRSPLLTVEALKDSPDPGALLRRAQDAVTALMSLWKNGLPTCGQILDSVAASGLFTLPEVLKAIVALRSSQGNPQTDEAEKADPVTEETTALLGFLDAPFEQVGTYNTYVSGQASFDTHQGVKGLEFDRVMVLMDDAETRGFMFNYEKLFGAKAPSSTDIKNAQEGKETGLDRTRRLFYVTCSRAEKSLALVVYTENPAAMKAHVLARSWFAEDEIDDES

SEQ ID NO: 71204 - protein, 787 aa, Collimonas pratensis
MHIAYFEIQNYRKLKHSRISLTDRETVFVGSNNSGKTSAMDALIFFLGQRSRKTISDTEQPSGAGKIIAADFTLSNWNAINEFGITWLTAAAQGITLPEWQCLCPSLDIWLDVKPDEIHRVSHLIPTLKWAGGTLGVRLVYQPKDIGALKSAFLLDFESAAKLLETAKKQLQNKQPADSLKLSIWPSTLHNYLEREISRHFEIKAYILDPAKAQYVGGKPSMPQLLTDDNPSLPYPFNGLFKVDIIDAARGFSDPNSSIAGGNKSASDLASQINKYYNRHLNPSDLPGDEDLDALRAIADAQHIFDERLNNAFSPTLGEIKNLGYPGFNDPSIRLSSRVNPIDNLDHEASILFDLQKLAEDKSLPLLSLSEKYNGLGYKNLIAMVFRLVSFRDQWMRVGKAAKRRVEEDAVIEPLHLVLIEEPEAHLHAQVQQVFIRKAFDVLRNHPDLKEPSSLTTQMVVSTHSSYLAHEIGFERLRYFKRKAAKPGAFIPTAEVVDLAETFGETAKQDVNIKQTAQFVARYLKSTHCDLFFANGIILVEGAAERMLIPHFIRKHYDGPKGLNRSYISILEVGGAHAHRLKALIEKLGIPALVITDTDALEARVNAEGEKLPAIAVRPERNKGYKTGSHTLKNWICVADDSLDAVLDLGDAAKTKDHVHAVYQCGIQVDFDGTGPVEALPYTFEDAIALTNPELFRNIKKPAGMIGKMQKAFACGSLEECCKALFVALKEDKAAMALDLMFCEDPDLLAVPKYIKDGLDWLQIQLEIASKDITPEVILAADMGGAK

SEQ ID NO: 71205 - protein, 620 aa, Collimonas pratensis
MWDDPIDEKIYGYLNFAKPESFMLLAGAGSGKTKTLVAVLEAIKQEHASRLALDGQRVAIITYTNAACEEIKDRLKRDPAFSVSTIHSFSWELIKSFTPDIRAWLREKFVADIAKLDIDIGRARDLEGVTARRNIRSREGKKKRLESLDTVLSFSYTPNSISTEVGSVHHSEVVGLAAYFLANEPLMGRILVNQFPILLIDETQDTNAALLDALIAVQAANSKNFSIGLFGDMMQQIFGGGKTDLVETLPVTWLRPEKKINYRCPRRVITLINKIRLLDDPHQQHPGPDCIEGAAILFIASSDSAKSKAEVEAIARQEMVDRTNDAGWESKLKVKTLTLEHHMAAVRGGFDDFLVPFLGIDHLKDAALSGDSKEIKFIRHVFLPLIIAIKSGDDFATAKVVRDHSPLLKPAHLRGHADPIGEIRAANIVVEHVATALAKNPECSIISVLKIIEAGNLLTIPDDFLPYLIDKPKGPEEGVEDNELESAESKAWDSALSAAVGQAERYVDYISDSSNYDTHQGVKGLQYERVMVVLDDAQARGSGFSYEKLLGAKALSADDLKNEREGKDTAVKKSRRLLYVTCSRAQKSLAVVAYSKDPQAIKDYVVKSKWFEVDEVVSIE

SEQ ID NO: 71206 - protein, 775 aa, Collimonas arenae; identical to SEQ ID NO: 71202

SEQ ID NO: 71207 - protein, 631 aa, Collimonas arenae; identical to SEQ ID NO: 71203

SEQ ID NO: 71208 - protein, 680 aa, Leptospira santarosai
MYITEIEVKNFRLLKNVRISLQETSTIIVGRNNSGKTSLTEIFRRFFSDKKIHFYLEDFHLSSLALFKEALTVKQSGGSEEDIRKIIPKIELNFTINYEDDKADFGILSDYIIDLDENSTNVNIKISYEIADGKIGLLFEELSFENELDSFIRKMKERIPALFSTKIYTIDPTDPNNRTTIEYSKLKNLINVDFISAQRGLDDITQNEKNILGKALNNIFRTAATESAPPDMKKISQELEEIIQEIQVKVDTDFKEKVDSLIPSLNNFGHPALSDSKLSTETTLNIQSLLDTNTRIRYLKAEGISLPESYNGLGSRNLLYMIFQLFDYFRKNQSNSIQAKSHLIFIEEPEAHLHPQMQEVFIKQLEEVANDFSVKFNKNIKWPVQFIVTTHSTHIANQADFSSIRYFKTSTNKPLQTNIKDFGKEFNSEDAKEDREFIHKYLTLTRCDLFFADKAMLIEGATERIMMPIIVNKIDREENTSLFNQYYSVVEVGGAYAHHFYKFIDFLELRTLFITDLDSTKIGISSKGKKVHIACEVSDGTHSSNVGIKEWFKTKGEILDLKEIRRKEPTEKITGSRRLAFQIPEENSRACGRSFEDAFLLSNRELFDLADFEEDKVESEAFSQAEKIKKTNFAVKYSLELTDWNVPLYIKEGIIWLAEFENKGLTKRKGSKAKIKNEKN

SEQ ID NO: 71209 - protein, 584 aa, Leptospira santarosai; identical to SEQ ID NO: 63357

SEQ ID NO: 71210 - protein, 586 aa, Bacillus atrophaeus
MQLKSLTIENFRNFEKVSIDLTNQNVCFGMNDVGKTNLLYAIRFLLDRDIRKNGFKESDYFRNERDRVIRITLGVDLSDRLKDEDSQHIIAKVGGARSSNELDNFFFQVEGTYDISEEVGIPKIYWGSNLKDLDEIIQNGIYSNLDNLFKIVYVDPTIDLEKTFSKNRRQLFDQNKLDDNDITISNEIKTLGIEMNKKISSMGVIQSFQDTITEEYRKLKKEKINIEMKSEITINGYFSNLIPYIKKENDDNIYPTSGDGRKKILAYSLINHLIQAQEGNKIIIHLVEEPENSLHRSMQIALSKQLFNSKVYKYFFLSTHSSELLYEMDNTSLIRIYSEDRINCDSYIYNVSEEYKNVKKELNRALSTALFAEKVLLVEGPSEKVLFEKILENVYPTYELDGGYILDVGGIKFKPYVDVLKGLNITPIVKTDNDLKSKRDNKTIFDLIGIKRCLNLINDEENSIEPIEIEYFENDAQGKRVPNNKVKKQKIKDKKLELYVLFQDTIEHFKENNIYLSKIDLEHDLYEVIGDRMEEILGSNPINYLQDHKLLNMIELTNELTRTDCNNIINHPLFESLRKLVPNEVD

SEQ ID NO: 71211 - protein, 515 aa, Bacillus atrophaeus
MKLIDQEDRTAILENNDDIVVSASAGSGKTTIMIKKMGIELEKITDHRTIAAITFTVKATDEIKKKAVKNIKKPFVVMTNDSFIENEIIRPFIKDAFGKDYGNDYSVEYGNEFKFDNYSSGLNQLRNNNILGSFEDNKRNFNFKVANDILEKSLAAQEYIKAKYSWIFIDEYQDSDRDMHRFFMKLKNKLNIKLFIVGDSKQAIYLWRGAMSNIFKLLEKESFSSYELVTNFRCDKEIENYANLFHNSQYYLHLSENVENVVFKEYNTFSNYYERRDFVGFIDEFKGLILEKTLELDKEVTIIANYNDDAKKITELLNLEGFDFVFIPKTPIDEGIPNGYLLKELALFSKNSTYTIYDFLENTHIDERIRTRYEVNNIIGKLKKNTNPDIVEEVVSGLANYLEISIGEDEIEKFCESICDSKYDMAFRLIESKHKVMTVFASKGLEFEQIISFSRYYKIYKDENLQNHYVCITRAKEKFIMFIDDKGYYDFVLEVADSNGIKNIEKLIRYKESCN

SEQ ID NO: 71212 - protein, 649 aa, Mycobacterium simiae; identical to SEQ ID NO: 65320

SEQ ID NO: 71213 - protein, 630 aa, Mycobacterium simiae; identical to SEQ ID NO: 69757

SEQ ID NO: 71214 - protein, 651 aa, Ralstonia solanacearum
MHIERVVLENFRCFGPQRTQVVLDASLVAFVGDNGTGKTALMQALQRMFGVTAEQRRLRKQDFHVPGDETDRPVARTLVIEAIVAFPELDIDNDNPAVPAFFKNMAAEENGSLKVRLRLQATWSDDGTLDGAIEESYCAVQTFGTFDESDLQQLRGPDRSRIQLIYIPATRDGASQVTAFVRGRLWRAINWSQEVKDSLTGAGNEVNQTFSAEAAVSSISTTVTQRWQQLHSAGTDATPIFRPVDTRWQEFIRRVEVVFHPTEDGHDRALEDLSDGQRSLFHMAMAAATLDIEARLTGGDAPEGFAAAGVPLPALTILALEEPENNLAPFYLSRIIKQVQEIAIGSNAQAIVSSHSPSILARVDPSRVRHFRLNLHSRCSEVRQISLPAGDEDASKFIREAVRAYPELYFARYVILGEGATEEAVLPLLAKAMDFPIDRSFVAVVPLGGRHVNHLWRLLADLQVPYATLLDLDWGRSGGGFGRVKTACEQLLGIGHRPEEVFGGALRPGGPEESLAAIAALNPADIVTLRRWIEWLERFRVYFSDPLDLDYLMLTAYPLAYRVLEAGMRGPAGRGDPRDAVLGEDGSPNFYDGATDDALRWYRYLFLGRGKPSTHVRVLSRLTQADLVAAMPQPLQRMLANVRDALELATR

SEQ ID NO: 71215 - protein, 631 aa, Ralstonia solanacearum
MTWRPVTPETWRPRGIPNLEPNAWAALRRTESTSVVAGPGAGKSEFLAQRAAYLLETGLCKAPQQILAISFKTDAAANLAARVRKRCPPELAGRFVSLTFDAFTKSLVDRFHAAIPSHWRPTRPYDIRFPTRRMVEEELNRIRRMAPQAWQPRIAAFSSATFEAQDIGSYRLATDAHYQLTTAEEFAIYHWLHQQLFGADVSQLTFVMFNRLAELIVRANPRIARALRMTYPYVFVDEFQDTSFAQYDYLLSTFGQQGTVVTAVGDHKQRIMGWAGARQDAFEQFEADFGAQRVNLLFNFRSSPELVRVQHFVARTLDPQSPQIQSQAASQLDRDVVQVWKSRSTAAETQRLAQWIATDMAARQKHPHDYVLLVRQRPDQFEQEIQPTFAAVGLNIRNESRIIGRTNVQDLMVDEVASIALAALRLATGQRSATAWSTFSGAVYAIRGVAEDDELLRNRADRDIQNFLGLLRQDIRGQAPSTELAVQITQRIFEFLDVVAIKGAFAAYTRNDLLEIMIEGFSLHLQQAAATTASWPECVDRYVGTHDIPLMTVHKSKGLEYDTVLFVGLDDQSWWSHTPRNPEGIATFFVALSRAKQRAIFLFCEHRGARERVSDLYQMLADAGVEEVDVN

SEQ ID NO: 71216 - protein, 653 aa, Zhongshania aliphaticivorans
MHIESLSLRNFRCFGDVATTIQFQPGITGFVGDNGAGKSSALEALKRLFSPLSSERQLRKADVHFGVGEDSQSVAEREIIIDVVFGFSSPDVIPHVFNDIFFNASDQALKVRLVLEGNYLKSESYEDDIEIKLYTVRSLDEVPFGPDDERKTPLRGKSTQFAELVYIPAHRDSLGVTRHALKNVLKRIERSADWNEETKNQSQEFAKQLENSLNAVTAIGTTSHDLKTFWGALHDGHYDADPLFSVVATEFEQLIRDLTLRFEKSPGGGNRQLEELSEGQVSLLYFALSATLHNLIWKMEAAAPASLEGFKPLDFVPAPLTIFALEEPENHLAPFYLPRLIGLLESLIKTGTAQSFVTSHSTSVMARISPRNVRYFRNCNQTLISDVREIPLPTSGSEEDNFLHQVILANPEIYFARLVIIGEGDSERIVIPRIAEALGISLDPSFVAFVPIGGRHAQHLWKLVVGLNIPCLTLLDFDLGRHNAGMGRIKNAATWLNDAGYDLDPSAVISNEALTPENVVPWTQWLRAQWVFYSTWLDLDMMMVQAFPEAYKPSRAFDPTKDDPSKIAEAVFGSSGLGNAELNRIGAQFSTEELFAYKNLFKSRSKPASHFKALAALDDEAIRTNCPEPLKALIAMAKIILAPPSSICAGEEE

SEQ ID NO: 71217 - protein, 619 aa, Zhongshania aliphaticivorans
MTYLKADDWKPSPGIRIEGRALEVVKAVEPMSVLAGPGAGKTELLAQRATFLLMTGLCPPPQRILAISFKVDAARNLGDRVTHRCDPIQAKRFESLTLDAFAKRLVDQFLESLPDQWRPSHDYTIEFPNRDVWEEFKLKNESDYSEVRSKNSGQLDRIVHRSIPDFQFEEAVTPEQQIQWLWWRQHIDANPSRLTFDMIKALAVLILQIQPKILSALRKTYSHVFLDEFQDVTARQYELIKTAFLGSDSVLTAVGDSNQAIMRWAGAREDIFNLFEADFGASDERLPFNFRSNSRIVNLINDLATTFDGDYIPTECARQDDPVPENSVEGWVSETRQDEGEYIASFIANELQKNADLAPADFVVLARLRINDVEDRIKVAFQSKGLKIRNEARAVGGIAIQDLVKEKAYTFFLASLKLAVNVRSGQPFQDCRNAIAEVRGADLDSEKGHSETLYAVRCLIDDLEQLVRGRSPAEVTGREIVDILLNHVERGEIQRTYREYAGGERLNSAILGFAEYFDECRDGSPSWSECISNMEGTESVRLMTIHKSKGLEYHTVIFVEFNDDAFWGNDDDVNVFFVALSRARERVLFSFTKDSKGAQNVKGFVKILKDAGVIFIKKQ

SEQ ID NO: 71218 - protein, 638 aa, Pseudomonas sp. ABFPK
MKLHSVRLSNFQSFGEPTSISFEDSTFLIGPNGAGKTAVLQALCRMFCFDPSLRRIRRSDFFVPFDEVEAPEERSLWLEADFLFPELLEEEDNATVAPHFAHMRMDFPDGIPRVRYRLEATMGIAGDIEESLLYVLDASDEGVALGTTPVTRHHRNAIQMHYLPARRDPADHITYGANALLGRLLRAVDWELDRGVVQELTDKISESLSSNVSIKAFSEILSTTWKGLHRGTFFSDPKLTFITSEIESLLRHMSVSFTPGHDENLVDFSRLSDGQKSMLYLSLVLSSHAIGRAVLKGESKAFDVQRLKPPSFTLIAIEEPENSLSPHYLGRIVNALNSSIGGADSQALIATHAPSMLRRVEPEHIRYLRLNENRVTKVSTIQLPEDDGDARKFVREAVQAFPEIYFSRLVVLGEGDSEEIVLPRILKAKGAPVDESAVTIAPLGGRHVNHFWRLLEGLGTPYLTLLDLDIARYQGGWGRIHYVNKQLKLYCPAQQLPPEWPLQKWNAVGMPIRKNSRFGDLKLSTELENRGVFFSSPMDLDFSMIKAYPTAYGVERAAPDEDTLKAVLGKKRHEPEQYSEEEQELFASYHSKFKLGSKPAAHIAALAELSDEDLLKNLPASFNRLADAVIAALEGLPE

SEQ ID NO: 71219 - protein, 554 aa, Pseudomonas sp. ABFPK
MTAVEAWLPADGLTLEKNALLAVKELEQSLSLTAGPGAGKTEVLAQRADFLLRTGESRYPKRILAISFKVDASKNLKQRVQKRCGFELASRFDSHTFHGFAKRIVDRFRPVLEGADYLEPGYKIGTQYVRGKQIKFDQLIPLAIKILSSSAMARNALCQTYSDVFLDEFQDCTTEQYELLHLIFLGKPIRLTAVGDVKQKIMGWAGAMDGIFARFVDDFGAKPLHLFRNFRSKPRLLRMQNEVIRALDPDAVMAGELIAGDEGEIIAYHFDNSEREAAYIVNTIRQWVTVDQIPLHEIAILFSRQISDYGTFIMEGLDAAGIPYRNEHLSQDLVNEPVARLIIDYLACLYRPREPKGWMRLMEQFSVVDSEDNESTVQTIFELIYGAHRKRVKAVARSAQPYDSWWDMAQEFLEQVGLPLLTSLSPDYEAKARLGEVVDQTHQQLNMLYEQGSDLLSALDRFSNDQAIRLLTVHKSKGLEFHSVIMPAIETQTFWGKPYEERCSFFVGVSRAKDRLLLTNCERRFTPPTNPARWSEPRSQHAEFMGYVVPFLST

SEQ ID NO: 71220 - protein, 594 aa, Citrobacter sp. AATXQ
MRISRIRLINFANFSDVDVETGESIVIVGENKVGKSNFIRGLQLILDPGLSERDRQLGFEHFWDGLGEDKLGETIAISVDLTDFTDDPRLMAHLNDCVLNPGPPMVARLTYRFQPKTELNRAPESLKDYEYVIFGGADPDMHIGGAFRRMLPIDVQGALRDAEKDLSSWRNSPLRPLIEELSASLDDETREEIQTQVDEAQRELADHAEVAATAERISERLIAIAGEQHAVPVSLGLAPTRVDALLRSLRLLLDSGIRGIGDASLGTANLIFLALKSLELDRLVNDGERDHTFFVVEEPEAHLHPHVQRLVYRYFLGTDREDGDEGTPLTTILTTHSPHIASVTPIRSIVLLRHDPEEGKTIAVSTANAPFTPRDEDDLQRYIDVTRGEIFFSRGVILVEGDAERFLVPAFADALNIPLDMLGITVCSIGGTNFTPYVKLLGPRGLNIPHVILTDLDPMTGGEPLVRRRLINVLDVLEGDVDHDDMDTDEVIACAGGYGYFVNDSTLEPELFIGGLAEAMKSVIEQELSPRRATLNEIQAWVDDTDLLDIDRLLKLIERIGKGRFAQALAPSVSEDDCPDYIREALEYICDAVT

SEQ ID NO: 71221 - protein, 605 aa, Citrobacter sp. AATXQ
MPSHSVSAAYLAQAAELAGNPDQLAAYHSREHCVVLAGPGSGKTKTLVLKLARILAEDVQAPRGAACITYSQECARELTRRLEALGLREAPNLFIGTVHGFCLRHLLMPYGRLADLPIPFPLSVASQRESERLLRQSGDRLFGANHPYKAIDLGRHRRSVLNRNSVAWRAEEELAAWAEAYEAALRQQGLIDYDDMVIFGQRLIIEHDWVLPLIQAKFPIIAVDEYQDLGVALHRMVKRLAFEGGVRLFAVGDADQSIYGFTGADGALLLELADRRDVETVRLQLNYRSGAGIVNASEMVLGEVRGYRANDPNRQTTIAFQLCPDGLGDQAVHAVEHIIPAALAAKPGRTLGDIAILYKDYHAGDIVADAVTTGGFDYIRVDTAAPYRKVALTSWVEDCAAWCAGGWRIGRPQLRGLIDRYLAFHRARLDDACARRKGQELTKLLWALRADQYPASDFVASLRNGLVDSLLATEPMLSDQAEQLDRMTAALAEGGALAMLDITSLGGRDGSPEHLNLLTLHSAKGCEYDVVIMVGLDLGNLPWRNETPEKLRESRRLFYVGLTRARDEVHMLYSGFVDGRYGPMRLGRSPFLDELEARMRGAGLR

SEQ ID NO: 71222 - protein, 594 aa, Citrobacter sp. AATXR; identical to SEQ ID NO: 69300

SEQ ID NO: 71223 - protein, 593 aa, Citrobacter sp. AATXR
MSDRRALSEALNELLPNREQYAAATYPGHCVVIAGPGSGKTKTLTTAMARALIEEVADPRGVACITYNNECASELEGRLACFKVIGDERNFIGTVHSFALNQVLIPYSRCIPGLLPDDFRVATRDESRAAVEVAYQARFGSVGDPHARWKFAEEKRRRDVNRLLPAWRNNNPELADFIEGYEAELRRLGLIDFDDMPLIAFRIISEHEWVRNAIRSRYPVLFVDEYQDLGHALHELVLLLCFNGGIRLFAVGDADQSIYGFNGANPGLLDSLVSRADVRPFRLRFNYRSGAKIIRASLGALGEDRDYVGPDGNPEGELGFHGINGDYDAQAHFIAHDLIPSLFERGFHPERIGVLYRAAWLGDKVADEFKARNIAIIRADSNALIKRNSRLARFIEACSQWVTGGWKEASPLFNLLLGQALFLVYGRRASRAEEQLLTVQLITFLRNGIDKAESAHEWLRRLNDELITGWMAVSQNTQQEWDVISELLKRTDPLRGLDVALDIFAGKVEGTGRITLSTLHSAKGREFDVAIMFGVNKYDFPSKRDLTSDNALREARRLFYVGVTRPRKELHMVYEKGKHSPWIAELYHRSQQT

SEQ ID NO: 71224 - protein, 723 aa, Bacillus amyloliquefaciens; identical to SEQ ID NO: 63160

SEQ ID NO: 71225 - protein, 653 aa, Bacillus amyloliquefaciens
MAAKLVDNIFLINAPAGSGKTTKIKSMIVNHKIKHPLDNILCITYTKRAAEELKKGLDEEGIHISTIHSFLHKFLRIYFCENEMIDLYMELFGDLIRGNIENKEEKEHVLARNKKYIDKFGCLTLEVIKTNISSIYYNETSNNHLYKGGLSHDSLLIFAEKVFEKFPKIKKRLTQKYQLIFIDEYQDSAPSVLKMFYKAGLNTSSKLYFLGDKMQQIYKNYDGSFEKELKTLNNEIKLDTNHRSIPDIVSILNNIYNDKEFKQISSDKNRANKPDHPPRVVLCDNIQKRIKREQLIYPNALLLFLLNQQRFDSIGAGEFYRQFNRLDRYSQVNQLNASDVLSDNTNENKDPLLKLLFIVDKILSYYEDFNLGSIIQTLKRNQKIFDTRIGTITSHQDKVNLNNLLKQIYDFYQKDSSIYEFLTLLRGSRVIKEEYIDNISNEYIGVLAVTLNEFKALSNYLKDPKVSTQHGVKGESHNTVFFIADDSFRTPLVHMYKFLKLWTITELSLDSLESFYYDYKKWIEDTIDHLACKISDLNKEKYEAHATYLKTRVEELCKYFENNWIFKDLCEDFYNAYLLKPNVTNFKKCFKESTVYGVLSAYRLFYVGCSRAKSNLTIFIDKYKVKDFSEDLIFKLKRTGFSVEIEAKELQKL

SEQ ID NO: 71226 - protein, 618 aa, Geobacillus toebii
MYISKISIKNYRNFGNKPFKMKLNKFTAIIGENNVGKTNLLDSIGLILSQDITMFKKRMLELEDINYESRKKFKYDVLNASIKPENVEFPEVEIQIILEGMNKKQLSVVGDWFCDTSLEKARLTYIFKPRSGFDRKEWVKEQRELIDKIRKEKGIENPDYLVKLIEFPIKQYEYTIYGGNDVTNRCDPYFLRMLKFELLDALRDSKRELIANGESKLLYKILNYRSEGAYEDIKEVLSSLDEKMQNNPRLKDIKETLVSQLNKLSLQEKEGYNNIDFHFSSPETGELLKKLSLIYGQDPITIERNGLGRNNLLYISLILSRLAEDKISEDICFRVVGIEEPEAHLHPHLQMHLATNIESINSDRDDLQIILTSHSSHITSSLNLDNIAILYKENNEIKAHYITHGFQSDKKGKNHRRYLEKYLDATKSNMFFARKIILVEGIAEQILIPKLFELHTGKTLERIGCNIVNVNGVAFSHFLEIIRNGYFIKCVVLTDGDLGTKTEERAEKLKEEYEDDYIKVEINKETFEKELIEANKTGEGKQILLRALKQTRIQKGPKYEEEIGDRALDTDSFFTLIEDYKSEFAFNLHEELKGLKQGEVASFNLPEYIRRAFDFLEG

SEQ ID NO: 71227 - protein, 514 aa, Geobacillus toebii
MSKKLKPILVIAGPGAGKTHYLVEKICESLPSLESHRFLAVITYTNTATSEIRERLSKKIEIPQNVFIGTIHSFLIRFILKPFGSIYGVLPNNPIYKEVNVNAKDKKEEHIIKSQIVKKGVVPYEKIISLSKNLMKDYEKVRVLVSERLQYLFVDEFQDIDSGQYEIFESIRKQQKTKMYFVGDPEQSIMTFRNNGRKKPLNKRPIYEAMQSKMIEKKFLYNNHRSSVTIIDFLNKFHTSLKQVKSNEEIDSQNKVVFIDAQDIRKIIEEFNRLCNDQKYCRNRPKSRFFLGFKGDTYTKVENEYGLIQKESNESNQPKFIEETSHFITKLLNTNQNNIISYMGIDDLQYRMLCLSVIDIIKQNPFISSKSLIDYIKVIFKGDPYKTIHNKIQHKPDELAEEFIKQINSELQGRFNLQKTEDYHLTIHKSKGLQADAVLVIARSKKELMKWLETDVEARLADKQDTCRVGYVAFSRAKEFLCIACLEKVDSELREHMIKLDIEIVPLAEKLLKV

SEQ ID NO: 71228 - protein, 657 aa, Geobacillus sp. B4113_201601
MNSPYISRVKIKNFRNFQSVDISLSHKQVIIGENNVGKTNFLKAIQLILDPTLSDEDRYLTESDFYEGIENPMEKGEEIEIVIEIRGFEHNKNILSVLSDATVSDAPPTLRLTYRYYPVEKEDGTKDYEYIIFQGDKPDKIFKHSHRKYLNMRIINAIRDVESELRNSRKSPINQLLKQYEIDKTELKELAEKLKQKSDEVLTLDEIKDLTNKINTRFKKIIGVQPDSIVSLETIDIDPNRILNTLKLMMGDKKRPTSETSLGINNILYIALILLQLEDRTIPTFLKKEKFEELSKKEGREILISSYEENGNGNYFLKSDLSNDEIKQLYSFMDTYNPVNQGFTILAIEEPEAHLHPTLQRIIYKDVMHGNSSVLMTTHSPHITSVAPIDSIVHMRWTSSGTKVYTSSNINLTSLEKRDLERYLDVKRGEIYFGKGVILVEGIAEEYLIPRFAELMGKPLDQKGIVVCNINCTNFKPYVKFLDVLGIPYVVITDGDYYVMKEDAKKEYHVLHDGSHKSYGFLGLEKIAELIIDLQKIEQSQLPSCLKKQRDAFSEKGFFVGNYTLEVDIMEKSQSNQDAKKIICEVFNELTTGGDKQKRNFAEELDQGEYFKCLRKIEDNIGKGRFAQRLSSICIKEQIPDYIKNAIDEIYKRVSEI

SEQ ID NO: 71229 - protein, 604 aa, Geobacillus sp. B4113_201601
MDLFKEKLNQIKKDKDQYEAFLSENNTVVIAGPGSGKTTVLTLKIMKLLMEEIKPPRGLACVTFSRAAAKEFKDRLNDLGYQKRENVFLGTVHSFCISEIISPFAHLYNYDIPLPIKIVAEKKKKSLFKKIIQDFQLENTNIRIEDMDKERTLNIKGISEVEIPTYDLALKVAIEYEKRLHAEGFVDFVDIVKYATLLIQNHEYVRRCLEAKFPWILIDEYQDLGKPLHEMVLSLLKNTNIKFFAVGDPDQSIHSYNGAIPDYLNELYGLPNINKVRLKTNYRSNQDIIDASELALGDKREYKAGARLNENAEFHFITCEEEMYDQYVKVAKEIIPSCMKAGIPLEEIAIMVGYNNQAKELGAILSREGIPYYITKFEFQRTDVVMWLERCALWCIDKSKESFDDLVEFWIHLNRQHQKFIITNELIFFRRKLFDVLTSSIKHNHCLSKWLTFVIHNLELLSLLKDSHIYPDEVDNLKQLIKTSTKGEFSNYNLDKFSKLGKPEDQVTITTRHGSKGLEFEVVILLGMEDDHFPSYKNKRDPRKLSEDRRVFFVCISRAKRVCYLLRSKKYTKETQYGIKTFNYKPSEFWEILYSKYGEKVPSS

SEQ ID NO: 71230 - protein, 618 aa, Geobacillus caldoxylosilyticus
MYISKISIKNYRNFGNNPFKMKLNKFTAIIGENNVGKTNLLDSIGLILSQDITMFKKRMLELEDINYESRKKFKYDVLNASIKPENVEFPEVEIQIILEGMNKKQLSVVGDWFCDTSLEKARLTYIFKPRSGFDRKKWVKEQRELIDKIRKEKGIENPDYLVKLVEFPIKQYEYTIYGGNDVTNRCDPYFLRMLKFELLDALRDSKRELIANGESKLLYKILNYRSEGAYEDIKEVLSSLDEKMQNNPRLKDIKETLVSQLNKLSLQEKEGYNNIDFHFSSPETGELLKKLSLIYGQDPITIERNGLGRNNLLYISLILSRLAEDKISEDICFRVVGIEEPEAHLHPHLQMHLATNIESINSDRDDLQIILTSHSSHITSSLNLDNIAILYKENNEIKAHYITHGFQSDKKGKNHRRYLEKYLDATKSNMFFARKIILVEGIAEQILIPKLFELHTGKTLERIGCNIVNVNGVAFSHFLEIIRNGYFIKCVVLTDGDLGTKTEERAEKLKEEYEDDYIKVEINKETFEKELIEANKTGEGKQILLRALKQTRIQKGPKYEEEIGDRALDTDSFFTLIEDYKSEFAFNLHEELKGLKQGEAASFNLPEYIRRAFDFLEG

SEQ ID NO: 71231 - protein, 514 aa, Geobacillus caldoxylosilyticus
MSKKLKPILVIAGPGAGKTHYLVEKICESLPSLESHRFLAVITYTNTATSEIRERLSKKIEIPQNVFIGTIHSFLIRFILKPFGSIYGVLPNNPIYKEVNVNAKDKKEEHIIKSQIVKKGVVPYEKIISLSKNLMKDYEKVRVLVSERLQYLFVDEFQDIDSGQYEIFESIRKQQKTKMYFVGDPEQSIMTFRNNGRKKPLNKRPIYEAMQSKMIEKKFLYNNHRSSVTIIDFLNKFHTSLKQVKSNEEIDSQNKVVFIDTQDIRKIIEEFNRLCNDQKYCRNKPKSRFFLGFKGDTYTKVENEYGLIQKESNESNQPKFIEETSHFITKLLNTNQNNIISYMGIDDLQYRMLCLSVIDIIKQNPFISSKSLIDYIKVIFKGDPYKTIHNKIQHKPDELAEEFIKKINSELQGRFNLQKTEDYHLTIHKSKGLQADAVLVIARSKKELIKWLETDVEARLADKQDTCRVGYVAFSRAKEFLCIACLEKVDSELREHMIKLDIEIVPLAEKLLKV

SEQ ID NO: 71232 - protein, 618 aa, Anoxybacillus flavithermus; identical to SEQ ID NO: 63428

SEQ ID NO: 71233 - protein, 514 aa, Anoxybacillus flavithermus; identical to SEQ ID NO: 63429

SEQ ID NO: 71234 - protein, 701 aa, Pedobacter cryoconitis
MYISKITLNGFRNFPENEILFNDGINVIIGHNNAGKTSLLRAIGLLISSEDSRRLEVDDFSKDFSLADLQANPPSVTISLDIVQSVNEDLASDDLVTVANWLTKLEAPYEAKLTYRFYLPVEKFIDYKEELVHATTKDQAWSMIKHEFLRFYTYKIFGGDPTLQVVADSESLNKFDFQFLNAIRDVERDMFTGRNTMLRDVLDFFMDYEIKSASETEKSLTEKQKEIKDLKKIFSSNADALIGELQRRMHAGKEHILAYAHQTGATFNNAKPDFDGAISDVDMYSALRLIIGYDALDIKIPASHNGLGYNNLIFMSLLLAKMQVNSDGNYLGSNAKIFPVLAIEEPEAHLHPAMQYKFLKFLKENKDKRKVRQIFVTTHSTQITSAVSLDEIICLHNEKGVVSVGYPGKTFPDTAEGRTAKAYVQRFLDATRSDMLFAQNIVFVEGLAEQVLLPTLAKYCGKNLEDYHTAIIPVGGRFFDYFLYMFDANKPFTAPKQIVCLKDRDPERKRLSGGSFTSCYPYEMDLDSANYQYKNHIDDKCTLYATHGNIRFFGQNHEKGKTFEYELCLENLENNILFTERLQNRDELINLSELYKGGVSIDLMYDELRKSDENDRVEKSLKAQITTSWSDDDKKKAICASRYLNSVGKGENALELANILEQNLMLPEHAPADDDVTNPTPLKQKFVVPKYIFDSLTHLCV

SEQ ID NO: 71235 - protein, 586 aa, Pedobacter cryoconitis
MIGIASDSLIPINEDFKISAGPGAGKTHWLVNHIKNVLQHSDKLGSYKKIACITYTNVAVDTIVKRLDFVADRVEVSTIHGFLYKHIIRPYMAFIADYYGFNVKKMDGHDDHNISRGRIVDWIKRHPNVSSLRHPYTVNQLTQLNQNLIAIGNWLQSLGYKLEESGIAISIDNGKAFHLETGSRVNLSKTNCLDKLATDLFGYKKTFWEKGILHHDDVLYFTFLLLKKFPFILTVLRAKFPYFFIDEFQDTSPIQTEIVKMISTTGTVIGVIGDRAQSIFSFQGANPDLFTGFSTPSMVNYLIKDNRRSSNQVVGLLNRIRTDIKQDPVRNVDGASVKILVGSVEDAFNHVIEVCAGEEFVSLSRDNTTSNILRRQSNSGLLAINLLDAWNIKDSNGDRRNTALRSMKALELGRQKRFKESIQEMSKNYYSIKDRNEQKKVALAKISLLLSSYSNFRGQPLFAFYELVKSAVDISLSGMRAGAIKDFYDSYTYDQVADFINIPEDDSWSRTIHKAKGDEFDNVLMVINHESNLSFLLNPNLSSEEQRVYYVGASRSRERLFINVPTLAAANEISLSPLADILHLTT

SEQ ID NO: 71236 - protein, 687 aa, Bacillus trypoxylicola
MYLSEVKIWNFRKFGMGNSSEPGVSVQFQKGFNLLIGENDAGKSAIIDAIHFTLGTVSTENSRIVEKDFYIDKEGEVSSHLKVECIFSDLTDEEAGIFLEWLSFNKAKEYELIIRLEAERVSNELLHNKIIRTVKAGPENADSRLEAIPNEVIKSTYLKPLRDARTELRPGYRSRLAQILKGYSEFSTLNGEDHTLVDIVAETNSKIEEYFNTPVNGKDKSIIGEISSYLNEFFSKNTEYNPQFMVTPAKLDDILRKLSIELDSDTLAGLGSLNLLFIAVELLLLNDGKRVGPALTLIEEVEAHLHPQAQLRLIKFLQSNLNNSSSQFILTTHSTTLAASTSLSNIILLHKNSSFPMNPENTKLDTEDYKFLERFLDATKANLFFARGVILVEGDAENLLLPALAEVIDRPLHKYGVSIVNLGNTAFKRYAKIFMRSEFWKNEGGAPLLLPVSLITDVDIKPYEYHVIRNDTEKSMCFYSIKDKGTLDAVESLYGFEDVSDSNIIGEVFTSIKDLESKLVEFGPMDESLEDDLVRLTVIELSNKLIEHLEDMKISKIQTDFRDDFNNLNVYVSPKWTLEYVLANSCLNILLAECVHNVRYKHPNSVPNQKKLQGIIAQLEQDKSRDIKSGAYELFKPLDNKLVSKAEVAQTLAYELINNKEELKEKVMSDSTLSYLIDAIIHVTDNQ

SEQ ID NO: 71237 - protein, 629 aa, Bacillus trypoxylicola
MFSTEGFSLIEKKILGNKYRFNKEQIEVINAEGNANIIAGPGSGKTTVLVAKLALFLKERVTNNKGICIITHTNVAVDEIKEGLKKVGINNIEYPNFVGTIHEFFNHFTAFKAYRELFPNITPVILDNEIFKKKFSDIFLGYHSRMNPPTSKVDNWHLKLISSEEFELYENVSSYYYTELIDTLRDIFKSGNLRHNDSLSLAYWYISKYGEELKKALSKRFDHILLDEAQDTNNIQYNLLCALFNDNIYFQKFGDPYQALYTLYDNNEEAWNPEYERKHNNISYNELTHSTRFGNSIAKILKTTCIKQYSNFSGNSNIRSFKPHMLIYDSEESVIENYRDLIRKYENIDEQFKVSHRKVAVVGMTKPDIKKFNENYKEIKNVRTNTELMSSKIYQIFIKGLYEILKYAHNITEQKSNFSMSDIKKHIAKEQLEIKVDIAKCIHKLIKEKKLIEDDFMSSIENTLRLFKKKELSKIKGQIPYSSVSKYIKDTIISTTLGYKYSEIVEPTTNKQIYFGTVHSVKGETHKATLLTESVIIEDRFSPNEVKYYAGKVLFDYLIGTYIDYNNMLDEQFVRATKKALKIAYVALSRPTHFSAIAIKRECIEDNYEEKIQKAKGAGWEVVECFSPK

SEQ ID NO: 71238 - protein, 572 aa, Bdellovibrio bacteriovorus
MYIKSINIINFRGIENLVVNFESRFNVLIGENNSGKSSIIDALRICLSYGKNQNDFYIKKSDFRLSSSRPPDPIEFHFEFAKEDEEDLGHFHSLLGVNDDGKETLNAHFKYSLVEKNGVYKIKVKTWGGLNEGNPISADEFNEHIFSVYLDALRDAGSQLRPGRTNKLGDFFLKLEPDSDNQKKLADEVKASLDQSTNWNNLIDKGNTAIAAHLASISLKSDSLGLDLNFLPAEYKKIVDSLVIGMKSTLLNGEVVSFDIAQNGLGLNNLLYSSVILSDIETFKQQEKSSLAALLIEEPEAHLHPQQQNLFFKYLSELSEKSKFQIFITSHSPTITAKSPLAALRCIKKRDEKVKCFTPAGVLSPENQEFLHKFLDTTKSQLFFSNGTILVEGISEALLIPIFAKRLGFDLNKMGIEVVNINGVAFDHFANLYRSTDEKLRMNAKCSILTDDDRSSESEEISSRAKIAKELESGNLSVNLAEKTFEVALFAAGSNKDIFLDIWKKLHPKSKVDANDDVHVYADNFLKKVESNKAKSELAYALLKRLEEKPENLSSFTVPTYIENAIKWVCNG

SEQ ID NO: 71239 - protein, 563 aa, Bdellovibrio bacteriovorus
MVSLEKLSDKQREIVLNGAGLFVVRAAAGSGKTYTVAAKISHILDSWKEKGKGIAIISFTNTAWLEIASTLKSDFGISDLGYPHFLGTIDSFINKFIFLPFGNKVMNCQGRPKLVGEPHGPWRGRYYKDSFFDKITYSKGGELYFTSQQLRPNKSMVAATLSQKKSLIKAGFATQSDANYFSLILLRKYPWLAKSIVTRFPYFIMDEAQDTSDIQMEIIDLLIAAGLKQLMLVGDPDQAIYEWRNSKPELFVAKFNEWREASYILDESRRSSQAICNFVFKLSSLETIPNAVSEEVKDCDIEPEIISLDGMTAVQISDQFIEKCRQNGIQPDTHKIGILFRSKSFYAELDSDYSDSEQVEWTENRDLMDIAKAKYLFDNGQIQKAVLKLAFLYARRITKEDNLSKEQLHEAIDDFGKAALYKKILTLLREIPGIKEISVGDWCKGIESTVKKELDIDVSCKRKFKDLALGNLLKDDEAPSDYKGCRVSTIHKVKGETFDAALVLLKGKGVGKSYIKLIAEKTTVYQNEELRNVYVAITRPKRLLVIAVPDQKNVAAWTSVLKG

SEQ ID NO: 71240 - protein, 586 aa, Bacillus sp. KCTC 13219
MKIEWIKIKGFRNFDYEKINFAEQTLIIGANDVGKTNLIYALRILFDRSLSDRDLDLFNSDYNVYTKSDSIEITVKLVEVTEDCLITVFKGDLNNETVYIQYKNSKNSDYSILSGATEETLEERNSRFYIKRLNMEYVNTNRNLESFMKREKNQILEDAKLKLTEVQTQSDEKSVLKIKRNLELVNKRVDRLNYIQESLNKVNNELSLLAIHNEGKVLTYKNTNSDATRMLDNLELTYSTDEGALTLGGDGRNNQIFLATWVSRQKNVSSLEKVTFYAIEEPEAHLHPQQQRKLSSYLLEKFEEQVFITTHSPYIATEFKPDRIVKLYSKNKSTKAAKGGCSEELKMNFDDFGYRLDAITSDVFFVNGVFLVEGPSEKLFYTALAKQLNIDLDRLNVSIISVNGVGFKPYIKICLALDIPFVLRTDNDIFNKTKKIGNNNVEFSFQGGISRVMGIYTELLQTEDNQGLIEYWKTYQLKNEWLKIKQHPQVAKDLANNIIQQVEKNNIYISQVDLENDLANSNLFSSLKKFYSTRTIKSTVNKMQKAKAENMLKFLKAHFDDLKYLSDDKISEPLKKIKILAEKVVK

SEQ ID NO: 71241 - protein, 539 aa, Bacillus sp. KCTC 13219
MKKATIPTPEQIRIIEEQENIVVTAKPGSGKTFTIIEKIIDISKSLLSYQGVIAISFTRKASQELEQRYKRKSIESNSHFFGTIDKFYISEIIIPFSNLLFGKGEPLEVKDSIDDYPKYKELKKLKEHRGDKELFELLEESLQEGLIFLEISGETALFILNNVPQCLIYLKARYTHVFIDEYQDCGEIQHEIFLKFVSNGIIGIAVGDLDQAIYAFSNRYSKYLLSLIGDDDFTHLEITRNHRCHKSISDYSLELMGVKREHVEKDKRIFKVNVRGTDEQVIYAIENNLEEIKTKFNISRNSDFAILCRGNDTARRAANFLSVDNKLFVDTPLDKINGNWASLFNDILISYYLYKLNEITVLNFVSKYIDEEFYYKNFKKGLELVNKLFNLEENDLEKNIEEIIKIAQLIYPEQKDERIVQMLKDILKSEEALYSFKPATENEINIMTLHKSKGLEFKCVFLMDLYRWILPHEGDRVSEEDYIQALNLHYVGVTRAIEACYIMIGEQRYRPRQEDFIRAQESPFLYLNNVSNMRGNLNW

SEQ ID NO: 71242 - protein, 748 aa, Bacillus sp. KCTC 13219
MRIKSIQIKNFKKLKDVTINLSEEQSIFVGANNSGKTSAMEAISKFLKRKNQIGFYDFTIYNWTNINSLFEKIQALKKEQSESKDEVRLADIQSEYDRAEENLKSLLPSMKIVLSIEENELQKVIEIIPSIEKELNEVAVFFRFEPENYEKLFKEYIEARKRIDQMSEIINTHSEKDEIEKAVEKQWPINFQDFLKGEGQLKNNFKIQAYLANPVENEDEFPFDESTKLEGNPLKSIIKVDEIYAQRGLSDKDDDENIKKIKKLSKQFTNYYKKFHLKTDINQGVIDLINANFKAERNMETQLDKTLMTLVKPLLSFGYPGFGSPHIRVAPTIDVVEAMDNESSVLFNVHPNNIRDNNYYLPERNNGLGFQNLISMFFELIYFTKERVVTNGDDVVKALHLILIEEPEAHLHAQAQKVFIEKALNVIQENQEEDLYTQLVISTHSSHIADHACFDDLLYFKRRTNEDLLHEVEVVNLEKIKLDDNPKETNKKFVERYLQLAAHDIFFADGIIMIEGAGERILLPRIIKKDFPMLGNKYLTIMEVGGAYAHKFFPLLESLERPVLIITDIDSVKKHTTEKKDNWNKTYTKKSNDLRTSNATLKKIFGREITIKKLLEKSEDDKLKDGFIRVAYQYVNHTTISKGQAYSRTFEDDFAMSNREFIKAIANPTGLLKKFKNILDESPQMNADVSKKLFKVTNKEKTQFALDVIYEELENKTKYITPQYIIEGLNWLQEKLNEENKGEIIDEA

SEQ ID NO: 71243 - protein, 596 aa, Bacillus sp. KCTC 13219
MRRKSDELVEEKLKSYVDLSKPKSFFLLAGAGSGKTKSLVTILQHIHTEHGQQLRNEGKKIGVITYTKAASEEINRRLDSTNVFQVSTIHSFAWNIIRYFQGDIKDYLIESTQKKLTDLICEIEKKESKGQMPTQTEENKREKLGAQLAEWEMVDKFTYSPDTNNRVIGYLGHTQVISILKYFLNSKVFFRKLFVSKYPILLIDECQDTESDLMDALLLVEKEHDNFCLGLFGDMMQRVYTSGKADLKDAIAHWENKPIKEMNWRSQKRIVDFNNQLRKNEDGLMQYSNREKINGVFMVYIRPIEPKGVKEVEGEIKKNFKEKIQVDDKEINSLILEHKMAARRNGFINLYEQLNVGPTKDALQDANGKELTFIKTIIFKLYEIYLSNCNKILMLKLLREEKILKNKGLKWKDILDVAEGLNKYLLLFNHIDDKSMKEFITELHKLDLFDVPEIFLFKDENSEKWRIWNNALNCTCSEFNRYFKYKEKVDGFVTQQGSKGLEYNNVLVIINDDEQGGNLISYEKLFGVTGLSDTDKNNIKQNKDNTLSRTRRLFYVAASRAKESLAIVVYTKDVHQTKKFFIDHNLAQEDEIDIKI

SEQ ID NO: 71244 - protein, 604 aa, Roseivirga ehrenbergii
MKITKLKIENFRGIEKAELYFNGNTVLVGDNNTGKSTVLEAIDLVLGPERLSRYPVIDEHDFYAGKYISPSELEDEDIENPKIKIEVIVNDLNEDQETRFSNNLEWWDSNSKSLLEGPPANATDQDNVKAALRIHFIGYYDEEEDDFFGETYFSSPQLEDETFTKFGRSDKRICGFLFLRTLRTGSRALSLEKGSLLDVILRLQELRPKMWEDILSELRQIPIAENPEIGISPILEKVQKSVRSFVPSEWAVDPHLRVSDLTRVHLRKLLTVFMGTGAMVDDETEYAAPFQHQGTGTINTLVLSLLTMIAELKQNVIFAMEEPEIAIPPHTQKRIVNSVTGKSAQAIFTSHSPYVLEEFDPQNILVVKKTGGELTGSIAKYPPAVKPKKYREEFKRRFCETLLARRVLIAEGRTEYEAFTTAARRLNDLDSDKYTSLEALGIAVINAETDSQIEPLGKFYKDLGKEVFGVFDQQTDESRAAIEAVIDHPYEAPEDKFEKVVLNQTAESGLRKFALSLVEIDEWPPHLTDRTPTEEMSFEDLKETLKRYFNWSKGSGTAADLFSICSIHEIPEYVKSTLEAIKNIVDPKAEDAADLDHDEAQAAE

SEQ ID NO: 71245 - protein, 578 aa, Roseivirga ehrenbergii
MPEIFDLSVEKRRLLDQDGHLLVLGGPGSGKTTIALLKAEKLITEGLGNHQKILFLSFARATISRVEEKAKGMLNPINKKWLEINTYHGFIWGLLRSHGYLINDSRLKLLTPPEAGAILAPFTNEDRDREKLRLLNEDGLLHFDLFAHTCAQLLTRSEKLSSIICKKYPVIILDEFQDTNGDEWSFIQELGKRSTLIALADLEQRIYGFRGADPARVGQYIDVYAPEQFDFGNENHRSFGTDITRFGNDLLTGANRNNTYNNVRCIQYRYYNPPHIPLKTEVISRIRKLSVENRESWSLAILVPTKNLMTTVSDFLSEEQTFGNRRLPIIGHDVLLEMAGPSLAAVLIARLIGKESLHDGLVKNCLADLDAHIRGRGGNTAPAQAKLQLSEAIRNYIETGNIRGKNRQLLIAEVTRIAEEVQEFRFSGIPGDDWILVRKLLQNSTSPEIKQVGEDARYLRLLRKGTVLNSGLSDLWRTNGSYNGASSLISNALIQEHFSSTITTWKGVHVMTMHAAKGKEFDEVIIYEGPSRYRDKILRQNANDRDTDQAKLALRVAVTRAMKNTTILTPSYDSCPLL

SEQ ID NO: 71246 - protein, 718 aa, Roseivirga ehrenbergii
MKIERVDIKNYRLLRDFSIELEDDLSLIVGKNNTGKTSLLTALDRFLTGSDRNKFSFDDFNLDLKSEIKTQVKSDLPDKDKYTPLGIRLNLLIRYSESDSLANLSRIMTDLDPDHYYINLEFGLLLEHDSLKQLKSDYAEFQTNEKQKEAKKEGYKARDLFYFLHSNLIEYFKLSKKSLSCSKATGQPDGKFFIDLGGENNISLKNLIQFRYISARRDVTNKEQNSTLSLQTSRIYEKTEATDKQNEHIANFKDALGDTDLALTKVYDELFKETVDKVSKFGGIAEGDSKISINSTLQHRDLLKGNTTVMYSHGEHTFPEFYNGLGYMNLISVIFEIEILLKEFKKTKYEVPADINLLFIEEPEAHTHPQMQYVFINNIKGLLKEGIKREDGANRNLQTVITTHSSHIASESDFNDIRYLKKVNDTSVIAKNLKALEAEYDSAGEEENYRFLKQYLTLNKAELFFADKAILIEGDTERIILPAMMKKIDQAESESPLLSQNISIVEVGAYSQVFERFIDFIGLKTLIITDIDSAEVVTKPVAGKDKTTREACKVSDPKAEFSTNYSLKFFLNTDSLAELKGFDLDQKRVEKTEEAEGKKWKVSSTGNVQLVFQTQEANEAGEEYHARSFEDAFFHVNKAFIKDPHNKFPSLTQKHLKTFRNDKMHVYEFAEKAIGSKPSFAIEILLNSKTNKAGIEFSNWEIPAYIKEGLTWLRDIKV

SEQ ID NO: 71247 - protein, 635 aa, Roseivirga ehrenbergii
MTEIEEIFDHIHNGRNFLLSGGAGSGKTYTLVEVIKRAIEENPSAMIACMTYTNAAVKEIEERVGHEHLNVTTIHDFLWDQIKHFQKELKLCLVELANEEEIKVIKVDGVDPVPNDYFDNLEDGIQYKEYSRINQGVISHDEVIALSNRVFERYPKLGDMVKDKFKFIFVDEYQDTQIDVVRIFLDHFKLTKKRNIIGFFGDAMQSIYDKRIGRLDDYRGTEEGQVREVQKRQNRRNPKLIYELANQLRTDGLVQIHSSDNSAPNMTGGNVKEGEITFLYSASGNIDDVKAHLAWDFANSKETKELNLTHNLIADKANFQTLMNIYDKDKILEYKKRIKDYIKDHPVDWDLSEMTFGEVIERLKEGKKGRELKKVEPTPTQQEFIDMHTSLYQVALDMEYEAFSRVYVDKDQLLDDKKQDEDDINKKGSKRDNLIRHLYRLQEVIWLYQNQRYYEFLRATDHKGQLNTVAEKRNLKNKIESLVDVGEKTIGKVIQEANDFGICLIDDKLNRFSENQKYIYDQVIKVPFKEFQALFDYLEGRTPFSTQHKTKGTEFDNVLVILDNGGWNNYNFEYLFTNRTDKASVLERSQKIFYVCCTRAKERLAVYYHAPGQAVIDKAIEWFGVKNVVNLDETH

SEQ ID NO: 71248 - protein, 776 aa, Chryseobacterium sp. GSE06
MRIQTIKVRNFRRLKNAQIDLEDKTSIFVGANNSGKTSATYILQKFLDPNSKAFSIHDFSSDCWKKINSLAEIEDDTPPDFPAISLDIWFAVNSTDLHRIIDLLPNLDWKDIPVGVRIEYAPKSPELLLSNYRELNAKAAAKAKDDYHPWPRTLTDYLSKNIRSEYETKYYVLDREQFDDEMNIIGDYEPLQLGNDSDRPGAKIIRSLIRIDMLNAQRFLDDLSSGGRAEDLSKRMNRFYDRNLEKKEDDFDAMQALATSESELTKHLKTVFNPTLQSLNKLGYPGFSNPKLEVRATLNHESIIGQTKLHYSLGGGTDFLSLPDRYNGLGFKNLIYMILEILDFHARWLEEEDARAPLHLIIIEEPEAHLHAQLQQVFIKKVWEIINPTEAEDTFKNQIIVTTHSPHIIYESGFQPIRYFQRQIADTGVQTTNVLNLTTFYNKSHEESREFLQRYMKLTHCDLFFADGAILVEGNVERLLLPPMINKCAEELNSCYLSIIEVGGAYGHIFKQLIEFLGLTTLIITDLDSIEPVPAKLEGADKDTTSSTELLVEADLTVAATIDSNLDEQEIIDEDDEDILSKPGKSCISDFEGAVTSNQTLIKWLPKISGIRELLDAPNESKIQNKSADNNADVFITYQTRTEVSWNGESGAYAGRTLEESFALTNLEWTQDIAQRHLGLRVITLKKKRTLEEVRTRLYKRVSGGSFNKTDFALGLMLKDPESWNVPNYIEKGLEWLKEKIAFVDDEPDPVEELEIAENKSEVGQKSEIADEQENK

SEQ ID NO: 71249 - protein, 637 aa, Chryseobacterium sp. GSE06
MSRRINKPDTAADIELQKCLKDKTSFVVVAGAGSGKTTSLIKALKYIDENEGKMLRQQGKRIACITYTTTAEKEILDDVGHDYLYHVSTIHSFLWELIRPFQINIKKWVINKIQSKINELEDAAEAFGPRVQQRTRERNQADTQRYKEMAGLIQNIHGFNYETGSNYLEGILGHNDIIAMVPELISSSSLLQTILAEKYPYFFIDESQDTVPNFIGAMKVVDKNIKKFCLGFFGDPMQKIYMTGAGPITLEDGWTQIAKPENFRCSTDVLNIINKIRIGGDDLQQTGGRQEKIDDEWKAVTGSSLLFVLESDDHREEKIRMVRQYLAITNNDQLWTSEEKEADVKILVMEHRMAAKRLRFGDLFAAFNDGSTESISTGFKEGTLWAVQPFIKFIIPVAIAHGNNKHFEVIELLRRFCPQLEKDNLKHLTIESSELLSGLKNHVESLFGLMSSGTATVKQVFQYLADHKLMELDERISKRLAGNEVELLTEVDEATGITNAVISRFFDVPAKQFFGYQIYINDESPYSTQHSIKGAEFERVLVILDDEEGNSNSYSYEKLLGIVPLSDRDKENIEAGNDSTPARTRRLFYVCCSRSLKDLAVVLFVSDVNTALEKIKEVSIFDGSEVRTETDLTPSLS

SEQ ID NO: 71250 - protein, 583 aa, Enterobacter aerogenes; identical to SEQ ID NO: 63878

SEQ ID NO: 71251 - protein, 591 aa, Enterobacter aerogenes; identical to SEQ ID NO: 63879

SEQ ID NO: 71252 - protein, 676 aa, Klebsiella quasipneumoniae; identical to SEQ ID NO: 63920

SEQ ID NO: 71253 - protein, 557 aa, Klebsiella quasipneumoniae; identical to SEQ ID NO: 63921

SEQ ID NO: 71254 - protein, 789 aa, Lactobacillus plantarum; identical to SEQ ID NO: 66576

SEQ ID NO: 71255 - protein, 646 aa, Lactobacillus plantarum; identical to SEQ ID NO: 66577

SEQ ID NO: 71256 - protein, 603 aa, Mucilaginibacter sp. PAMC 26640
MHLSNLKLWNFRKFGTPVELDASKQPNLSLDFSTGLNVIIGENDSGKTAIIDAIKLVLKTHSYEYIKVENSDFFDNTNRFRIELVFTGFEPEEAKNFTEWLGYETIDSKIVTYLRVIFDVRKDGQKILPADVKAGVDEDCYILTAEAREYLKATYLKPLRDAENELIAKRNSRLSQILLGDATFKGKEKSHDLVKLFQVLNKNLTDYFKGTFEIVTKEEDGITEKKHLPQDGKRIKDSIDIHVKQFHGKKHESHFNASPNDIKAILEKLSLSLINEQHPGLGTLNRLFMAAELLHLNKKEWSGIRLGLIEELEAHLHPQAQMQVIEALQSQDKIQLILTTHSPNLASKLKIENLIICQQGKAYPMGDDYTRLEKDDYKFLEKFLDTTKANLFFAKGIILVEGWAEEILIPSIAKSIGVNLTEAGISIVNVGNLALDRYSKIFLRKTGSAMEMPIAIVTDPDVRAYSRNKKPDGKYEYYKVEEDQFKKDTANKIKDIERLSVANVKYFPAKIWTLEYSLFKSTSLTKSFIAETTKIHSGQEWKDDFEYNLGKSLINKVLHKTEIAYNLALSIDKDISNNVFIDATDDSDTISYILNAIKYAAGI

SEQ ID NO: 71257 - protein, 711 aa, Mucilaginibacter sp. PAMC 26640
MQLEFEITDADIQYAESILLPLGCRFDHERKEFIKNLATLDLQAVPGSGKTTALLAKLLIIEQKLPFKNGRGILVLSHTNSAVDEIKEKIHKYCPKLFSYPNFVGTIQSFVDTFLALPCGHNLLKSRFSWIDKDKYEETLLKKFHQIAWLEEYGEPTKWFYSRFITRATAEAAKEGKFKKEVVNGLIDAEVKSLYYDFNDDTIKSFKTLEVVLKTPDNLKFIGLKKIILEVLQCGIISFDYAYCLAKYFISKIPNSKIYVQERFAFVFVDEMQDMDNRQYELLETIFHFDAADRCIYQRIGDKNQAIYHAVNESTIWVNRIPKLPLQGSQRLSRLIGEIVNQFAIEQDDDQKIVGLKECPLKAHLLVFDDDSTGELIPFYVDIVEKYKIQNLLPDYLKYPICVIAWNADWKNLIDAQNIEKLRLIDFYGNYNKTIKSQKPDYENYYAYLEHCDKNKNTLESFRKNILNGLVKLLRIENLYNTGGRFFTKRSMLQFINEYDLKNGTENLTELKLHIYNWSIKVLMDEIESVHTEVIAYADHFVNIWSKPISCTGKQFCSQKTITQNVVVGNQPVIEPFKVSTIHAAKGQTHCATLYIESYYDGHYESEILSDAFLMHATHDSLNKLREQAVVLKETITNLNGAKGSKARQTDLNSVYAKIAKVSQCAKMAYVGLSRSTNLLCYAVHKKRYELYLKGLDREKWQVEFVAGKEY

SEQ ID NO: 71258 - protein, 564 aa, Pseudoalteromonas spiralis
MYIKKVTINNYRNFRSFVAQLQQLTVVIGENDTGKTNFFTALSLPLSGNQIDFNHKRLSVSDINKDAVIDFLTSVVNEEAEENQLQKIPKVSVTVEFADPKDAYETALLAKWIVAGDEETYRIRYDFKPKSDKDLLDLVKKSLAGKTLDDINWFTLPVEIYDYQIVSVNNEKPIAYSDLKHVSVHSINAERDDFSESSSMKSNSIFTKLLMNTLDDDDKGQINTAYSEFFSAIEKTETFDKVIGTNEDFENYDSIIKQLECTPNLPNLKNILSNITLRYGNEFLYQKGLGQRNLIYILILFAYYKSCGDTFNLCCIEEPEAHLSVNNLRLVRDFIEKSSSKSGSLVQTIISSHNPSIINKLKISNVLAFTGEKAISLSDTPTKLVNYLRKRPNFDILKLLFANKVILVEGPTEEMLISTYLSKQPALSDIDIIPIGQRGYATFLDIWLALNKDNQNKKIGIIRDYDNSDAAKARHDAYDTAHANVTVRTTTNYTLEIDLVEAEDNLALLNGLFKMDGDLDEVSGHMIDGKTARMLDVCDAMVDEEKPLDIKLPAHIAEVIGELS

SEQ ID NO: 71259 - protein, 457 aa, Pseudoalteromonas spiralis
MIEIQIAGAGAGKTYGLAKTLIDHTKACTSHKKTFALTYTNTATAKIEQEIIKQHGFIPSNLYIQTVHSFLLNEIIYPFSSFTLGDVYNDTSIMSLPPPKYKNSLFARLRKMNVIHADNVYNIAKQIVDETISKHSNKAKKAKVRRLLAILKSCFDKIFIDEVQDLDKDALRFFEVLGSNDIDMYMIGDPKQAIKFPQDLDTFVKTVAPKEYATILPINNQTRRVPTEILAVSNSFCYEEQQQESLSEVIGELMFIESTDGRYDKLLEGYIATKQLVCIEKKNGRYTTSSKHKQSFPRDIEEMIRESNHKKDKMLFVKAAFIDFMSNVTEVGARVAISRLRSRHSLTFNKSHFAQLYELCNKLKNDDMQYTVQSIESIKGLEAETCLLILSPNTLKYLTKEKLSQASHYNKEWKKIYVALTRAKKRLVLALDHELLAGYDMNAVRESLGALGFVNHD

SEQ ID NO: 71260 - protein, 771 aa, Klebsiella pneumoniae; identical to SEQ ID NO: 64244

SEQ ID NO: 71261 - protein, 625 aa, Klebsiella pneumoniae; identical to SEQ ID NO: 64245

SEQ ID NO: 71262 - protein, 771 aa, Klebsiella pneumoniae; identical to SEQ ID NO: 64244

SEQ ID NO: 71263 - protein, 625 aa, Klebsiella pneumoniae; identical to SEQ ID NO: 64245

SEQ ID NO: 71264 - protein, 771 aa, Klebsiella pneumoniae; identical to SEQ ID NO: 64244

SEQ ID NO: 71265 - protein, 625 aa, Klebsiella pneumoniae; identical to SEQ ID NO: 64245

SEQ ID NO: 71266 - protein, 771 aa, Klebsiella pneumoniae; identical to SEQ ID NO: 64244

SEQ ID NO: 71267 - protein, 625 aa, Klebsiella pneumoniae; identical to SEQ ID NO: 64245

SEQ ID NO: 71268 - protein, 771 aa, Klebsiella pneumoniae; identical to SEQ ID NO: 64244

SEQ ID NO: 71269 - protein, 625 aa, Klebsiella pneumoniae; identical to SEQ ID NO: 64245

SEQ ID NO: 71270 - protein, 771 aa, Klebsiella pneumoniae; identical to SEQ ID NO: 64244

SEQ ID NO: 71271 - protein, 625 aa, Klebsiella pneumoniae; identical to SEQ ID NO: 64245

SEQ ID NO: 71272 - protein, 771 aa, Klebsiella pneumoniae; identical to SEQ ID NO: 64244

SEQ ID NO: 71273 - protein, 625 aa, Klebsiella pneumoniae; identical to SEQ ID NO: 64245

SEQ ID NO: 71274 - protein, 576 aa, Klebsiella pneumoniae
MFVEAVLAFPELEEQDATPLDAVPEFFNQMAASGEGGPLKARIRLQATWTDDGTPEGAIEEDIRWIRALDDNFEWDDCSRIQAVERSSIQFIYLPANRDATTQVTALLKGRLWQAAKWSTAFRDASYVNAGQIQSSFEEEEPSKFLLERLSKRWQQVHEADTDSKPRLRLIENRFEELVRKAEFTFTPDEEGQERHLSELSDGQRSLFHIALTAATLETEREAFSLPADDSSFEQDKLRRIHLTILAIEEPENSLSTFFLSRIIKQAREIGALPSAQVLLSSHSPAILSRIEPEEVRYFRMDRSARRSSIRELTLPEDDVEASVYVRLAVKAYPELYFARFVILGEGDSERVVIPKIAEEMGVSLDPSFVPVVPLGGRFVAHFWRLLNDLEIPHATLLDLDLGRRHGGVNTMRSCLQNLADIGSNFGSANGANVAQLTDQQLYNEGLQGQWLQAFRREGVFFSYPIDLDFAMLHAFPTAYQVANPGGNGPQSSAVAIQAKKVSTLKTGGNPALYTAHYDDAFKWYPYLFLSRSKPETHLAAFSRIAEGGVAASAPVELRALIEYVTDKLNLSGESE

SEQ ID NO: 71275 - protein, 621 aa, Klebsiella pneumoniae; identical to SEQ ID NO: 64651

SEQ ID NO: 71276 - protein, 771 aa, Klebsiella pneumoniae; identical to SEQ ID NO: 64244

SEQ ID NO: 71277 - protein, 625 aa, Klebsiella pneumoniae; identical to SEQ ID NO: 64245

SEQ ID NO: 71278 - protein, 771 aa, Klebsiella pneumoniae; identical to SEQ ID NO: 64244

SEQ ID NO: 71279 - protein, 625 aa, Klebsiella pneumoniae; identical to SEQ ID NO: 64245

SEQ ID NO: 71280 - protein, 771 aa, Klebsiella pneumoniae; identical to SEQ ID NO: 64244

SEQ ID NO: 71281 - protein, 625 aa, Klebsiella pneumoniae; identical to SEQ ID NO: 64245

SEQ ID NO: 71282 - protein, 771 aa, Klebsiella pneumoniae; identical to SEQ ID NO: 64244

SEQ ID NO: 71283 - protein, 625 aa, Klebsiella pneumoniae; identical to SEQ ID NO: 64245

SEQ ID NO: 71284 - protein, 771 aa, Klebsiella pneumoniae; identical to SEQ ID NO: 64244

SEQ ID NO: 71285 - protein, 625 aa, Klebsiella pneumoniae; identical to SEQ ID NO: 64245

SEQ ID NO: 71286 - protein, 771 aa, Klebsiella pneumoniae; identical to SEQ ID NO: 64244

SEQ ID NO: 71287 - protein, 625 aa, Klebsiella pneumoniae; identical to SEQ ID NO: 64245

SEQ ID NO: 71288 - protein, 771 aa, Klebsiella pneumoniae; identical to SEQ ID NO: 64244

SEQ ID NO: 71289 - protein, 625 aa, Klebsiella pneumoniae; identical to SEQ ID NO: 64245

SEQ ID NO: 71290 - protein, 771 aa, Klebsiella pneumoniae; identical to SEQ ID NO: 64244

SEQ ID NO: 71291 - protein, 625 aa, Klebsiella pneumoniae; identical to SEQ ID NO: 64245

SEQ ID NO: 71292 - protein, 778 aa, Pseudomonas aeruginosa; identical to SEQ ID NO: 63720

SEQ ID NO: 71293 - protein, 625 aa, Pseudomonas aeruginosa; identical to SEQ ID NO: 70191

SEQ ID NO: 71294 - protein, 712 aa, Pseudomonas aeruginosa; identical to SEQ ID NO: 63712

SEQ ID NO: 71295 - protein, 599 aa, Pseudomonas aeruginosa; identical to SEQ ID NO: 63713

SEQ ID NO: 71296 - protein, 583 aa, Limnobacter sp. CACIAM 66H1
MYLGGLTISRFRSCDNVTVSLRPDLTVLVGENNGGKSNVIDAIRLLTLPLSGRRERYPEDEDIRRHAAVPNFQIEGAFRGLSDTQKGLLISAVPDLTNSEAVFGYRYESRSERLPRGKTTFWAGRFDTNEPEAGSSDLIRHVYLPPLRDAYQALGTGSGTRVMALLRNFLPKNQEQDFLTGVSRGENRPDVLMTMNAEIGTALGLLTNGVRPQTAILDFCTETLLDVARDLRFRLADTGLVPEDIRASGLGYSNLLYMATVVVELTKAKEADLTIFLVEEPEAHLHPQLQVLVLEFLLDQARRSTSCNIEPGKPEGRIQIVVTTHSPNLTAWVSPIHLVVMRSRRSEQNGVTVSESVSVPIAELGLKPKTLDKISRYLDVTRSSLLFGNRAILVEGIAEALLLPVIAQKLVLNDDTDGWLRFKGAVIVPIDGVDFRPYVEVLLRPHGDARIADRLIVITDADPTVLGNRKVDLENLAATHGASQALTVLTNQHTLEHEIFSAGNEVFLKQVFLSLHRKSRSDWEDKIERIELDKRPDAFLKLIEVKKTRKGDLAQAIASRIAVGDEFVVPNYLVNAIRSASQA

SEQ ID NO: 71297 - protein, 591 aa, Limnobacter sp. CACIAM 66H1
MTGIGGLTAEQDAFALHVGEVFVHACPGAGKTRTILARLSRIVSELPPRRGVAVLSFTNSAVDEFRERCQIAGLDSLLKHPSFMGTLDAFVRHFVVLPHCAATRSIRPTILDSWNTLGVEIRLSGKFAFKGESVSLDLFDPETNIIDPSKIGHLGLQNHVRLHQVRYQQTAAHRRRGLLQAGYMSAADARIQALKLIRDPVNGTTLGRSLAARFHEIMVDEGQDCNPLDLQILSWLRAHGVHVTFVCDPDQSIYEFRHGSPARILEFKETYPVDSHIQLTGNFRSSPVVCRLAATLKSSGQVDHSLGDTVNVEHPVLLLTYGGRSPMATIGQAFLDQVTELGLEVTDAIILAHAGKIALQAAGVITKDPNGNSRIESLARKVAEFWSPATTARTREAVLQVVEMLLLDFMGLSKPNEYLSRAIERLGLNRRAHRRRALSFLLSLPRACGDSDTDRLAWINCVHKEMERLDLPTPTGVSVRNFFRRPANEQWSNHLRIPPELGLSCAKIHEVKGHEYGAVCVVIPPNHTRENRSEALFDSWETRTDSEAKRVLYVGLTRAQHLSALAVPVAFANRCTAILAAGQVPYTRRDL

SEQ ID NO: 71298 - protein, 703 aa, Bacteroidetes bacterium UKL13-3
MHISSLSIRNFRNFKNVKLNFKNGINTIIGENGSGKTNLFYALRILLDDTLPRYINFYSSDFNRALGSWAGHWIIISIAFDELEASEEAQALAVQSSGHMDTETKGSYAVYFRPKYQFRKELFDYSQTAGKNTTDLQLILDKLTLEDYETVYLSRGSADFSVDATYNQYVGNFEKVEFPDPDNKEELIFGTWLPKEINIHNEVSCTFIKALRDVESDLRSYANNPLLNLLRGKEKTVEVAKQTEIIESIDKLNEQISSLDEVKEIKRGIDKSIKEAVGTTYAPNIDIKSELPNEMEKLFQSLKLWVGDPDDEGYKGRIWELSLGGANLIYLSLKLLEYEKVKTDRIANFLLIEEPEAHIHTHIQKTLFNNLKENKTQVIISTHSTHISSVSKISSVNILSRGERQALVFHPSNNLEPDEIVRVERYLDAVRSNLLFAKGIILVEGDAEQILIPEMFKKVFGLSLDEIGISLINIGSTGFENVASIFHFDRIQKNCAILTDLDKSIVTLPANPIDDDDYQKHCRASEKSGAERKVRLTDFCNGNDFLKPFYAKNTFEVDFLMKGNSYEFVQCLEKIYSREADRTKAKVKLEDASVEIAGVEVLRIADKQGKGWLALLVAEQIFYNTYIPSYILKAIAFASAHINQSSKVKAIIYRLNSIRNNENDDLQDEAKKFKTRGKSEEEILKTFCDTFTEDQLTKFLALI

SEQ ID NO: 71299 - protein, 591 aa, Bacteroidetes bacterium UKL13-3
MILDKLNDEQRLAVQQDGNVLLTACPGSGKTRVIIHKLAYEVSRLEEGSKKRIAAVTFTVRASEEIFRRLNALGISSERIWSGTLHAFCLEWIMKPYSCYLPELKNGFSIADETFCSDLISELKEKYGLQQIDPVNLRFNRDGSFVEPKSVQKKLLKEYHEILKQKKLIDFELLLYYSYQILETYPKIQKTLSNIFKLICVDEYQDTQDLLYAIISTIIKAGNGNTSLFLVGDTDQAIYASLGGVAKSMDEIQAELNGMQITPLTLTGNYRSSQRVIDFYRHFQTQSIEIEAVGNNAATEGLITLNNTIHSSKIVDEITRLIQNSLDNGTPEDEICVLVPQWWLITSVSKKLRATLPEVNFDASGLAPMSRNRENIWYKLSRLFLTEPNPKIYSSRYRWANELIENFRVITNTEFIEKYKIERNLLRLINSIKSDEAEGIDYLVDCFDQFLSAVEIDYTKYPQLVENRKLFFDNIESRLNDPDFKVPSDIQSFKSFYREMTGVIINTCVGVKGEEFETVIAYGLLYGYIPHWNEIFSGNAMEASKKLLYVICSRAKTNLHLISETGRTTRRGDELTITPELASKVFEYDEI

SEQ ID NO: 71300 - protein, 692 aa, Bacillus cereus; identical to SEQ ID NO: 71086

SEQ ID NO: 71301 - protein, 580 aa, Bacillus cereus; identical to SEQ ID NO: 71087

SEQ ID NO: 71302 - protein, 689 aa, Streptococcus pneumoniae; identical to SEQ ID NO: 62612

SEQ ID NO: 71303 - protein, 605 aa, Streptococcus pneumoniae; identical to SEQ ID NO: 62783

SEQ ID NO: 71304 - protein, 666 aa, Listeria monocytogenes
MSNPYLSKVRIKNFRNFKDVAVELEKQQIVIGENNVGKTNFIRAIQLILDPSLSEEERYLNETDFFEGLESPFENNEFIEIEIELRNYENNLKLLTILSGATVSNNPDTIRITYQFFPEVDSMGNTEYKYRIFQGENKELNFGHNERRFLNMKVIPPIRDVEKDIRSNKKSPIKALIKDYDIDSKELEAISEELDEATSSLLDMDELKYLTGSINDRFSAVVNSQIDLPVSFKTMDIAPAKLLNSLKIVLGESGRGLHDTSLGINNLLYISLLLLSLEDNTVPSILSEKQYNILLEDDTELIIDKLYKVTSNGKRIINSNISEADYKKLYTFMDENNKNKNFQGFSILVIEEPEAHLHPAMQRTIYKDIFNRNVSMLMTTHSPHITSVAPINSIVHLRKSSQGTLINSTANLDFTDGEQKDLERYIDVKRGELYFGKGILLVEGVAEEYLIPEFSRVLEKDLDKHGIICCNINSTNFKPYYKFLRALKMPTAIITDGDFYFQEEKIENGEKKIISTFHKMEYNTPTGANKFYDGLERMRQLVKDIGMFSEAVDTLDDESLEATLNKEGIFIGFYTLEIDIFENLDAIDKDNVWNLFNELTAGGDNHKSNFKDHLDNKRFDKCLKMIEGTTSKIGKGRFAQRLSLDISPEMVPDYIKNAINYIVENV

SEQ ID NO: 71305 - protein, 592 aa, Listeria monocytogenes
MTKYFEKLSQIKEDKNQYEALLANSNAVIKAGPGSGKTTVLTVKLKQLLMEKIVDPRGIVCLTYSNSAVKNFTQKLRELGVNKSNRVILSTVHGFCISQILIPFGKIYDTRINFPIKIINEKEKNEIFRVSENELAISKQYTLKNVEEYRNEMYGSRSSVDINKDKQLEKLCLLFEGKMLEKNFCDFNLIISESLRLMEKRPYILKCLEAKFPWILIDEYQDLGKILHEIVLLFLEKTKIKFFVVGDPDQSIYKFQGASPFYFLELYDHPDMKKINLTTNYRSDQFLIDSVLKTLDWDDREYVSGIINEKPAKINFFECENGMEQQYKLVAQRLIPTCIANDISLSEICILVGYNKQLDELSNVLDEEDIAYYREGLPFLKLKFVLWLQECCLYLSGSNKVNFNDISDEWLFINNKDIRNFDEKMNLYKSLEKSKLNKASFKKWLKEIFIDLDLSNVLSCSPYSNEVDDVKKFIIQVIQNEVLKNHTVNQFGNISAIDNQVTISTRHSSKGLEFEVVIILGLEDGSFPHYTHEIGGQEYQEDLRVFFVSLTRAKRVVYLVRSKSISGISKYGNPYSFKKEPSPFWTLLKQNF

SEQ ID NO: 71306 - protein, 585 aa, Streptococcus pneumoniae; identical to SEQ ID NO: 64134

SEQ ID NO: 71307 - protein, 512 aa, Streptococcus pneumoniae; identical to SEQ ID NO: 62977

SEQ ID NO: 71308 - protein, 729 aa, Staphylococcus aureus; identical to SEQ ID NO: 62500

SEQ ID NO: 71309 - protein, 597 aa, Staphylococcus aureus; identical to SEQ ID NO: 62501

SEQ ID NO: 71310 - protein, 585 aa, Streptococcus pneumoniae; identical to SEQ ID NO: 64134

SEQ ID NO: 71311 - protein, 512 aa, Streptococcus pneumoniae; identical to SEQ ID NO: 62977

SEQ ID NO: 71312 - protein, 585 aa, Streptococcus pneumoniae; identical to SEQ ID NO: 62976

SEQ ID NO: 71313 - protein, 512 aa, Streptococcus pneumoniae; identical to SEQ ID NO: 62977

SEQ ID NO: 71314 - protein, 689 aa, Streptococcus pneumoniae; identical to SEQ ID NO: 62612

SEQ ID NO: 71315 - protein, 605 aa, Streptococcus pneumoniae; identical to SEQ ID NO: 62613

SEQ ID NO: 71316 - protein, 556 aa, Acinetobacter baumannii; identical to SEQ ID NO: 62630

SEQ ID NO: 71317 - protein, 593 aa, Acinetobacter baumannii; identical to SEQ ID NO: 62631

SEQ ID NO: 71318 - protein, 597 aa, Acinetobacter baumannii; identical to SEQ ID NO: 62720

SEQ ID NO: 71319 - protein, 593 aa, Acinetobacter baumannii; identical to SEQ ID NO: 62631

SEQ ID NO: 71320 - protein, 585 aa, Streptococcus pneumoniae; identical to SEQ ID NO: 62976

SEQ ID NO: 71321 - protein, 512 aa, Streptococcus pneumoniae; identical to SEQ ID NO: 62977

SEQ ID NO: 71322 - protein, 585 aa, Streptococcus pneumoniae; identical to SEQ ID NO: 62976

SEQ ID NO: 71323 - protein, 512 aa, Streptococcus pneumoniae; identical to SEQ ID NO: 62977

SEQ ID NO: 71324 - protein, 597 aa, Acinetobacter baumannii; identical to SEQ ID NO: 62720

SEQ ID NO: 71325 - protein, 593 aa, Acinetobacter baumannii; identical to SEQ ID NO: 62631

SEQ ID NO: 71326 - protein, 585 aa, Streptococcus pneumoniae; identical to SEQ ID NO: 62976

SEQ ID NO: 71327 - protein, 277 aa, Streptococcus pneumoniae; identical to SEQ ID NO: 67083

SEQ ID NO: 71328 - protein, 585 aa, Streptococcus pneumoniae; identical to SEQ ID NO: 64134

SEQ ID NO: 71329 - protein, 512 aa, Streptococcus pneumoniae; identical to SEQ ID NO: 62977

SEQ ID NO: 71330 - protein, 638 aa, Listeria monocytogenes; identical to SEQ ID NO: 64506

SEQ ID NO: 71331 - protein, 635 aa, Listeria monocytogenes; identical to SEQ ID NO: 64507

SEQ ID NO: 71332 - protein, 585 aa, Streptococcus pneumoniae; identical to SEQ ID NO: 62976

SEQ ID NO: 71333 - protein, 512 aa, Streptococcus pneumoniae; identical to SEQ ID NO: 62977

SEQ ID NO: 71334 - protein, 585 aa, Streptococcus pneumoniae; identical to SEQ ID NO: 62976

SEQ ID NO: 71335 - protein, 512 aa, Streptococcus pneumoniae; identical to SEQ ID NO: 62977

SEQ ID NO: 71336 - protein, 585 aa, Streptococcus pneumoniae; identical to SEQ ID NO: 64134

SEQ ID NO: 71337 - protein, 512 aa, Streptococcus pneumoniae; identical to SEQ ID NO: 62977

SEQ ID NO: 71338 - protein, 585 aa, Streptococcus pneumoniae; identical to SEQ ID NO: 64134

SEQ ID NO: 71339 - protein, 512 aa, Streptococcus pneumoniae; identical to SEQ ID NO: 62977

SEQ ID NO: 71340 - protein, 585 aa, Streptococcus pneumoniae; identical to SEQ ID NO: 64134

SEQ ID NO: 71341 - protein, 512 aa, Streptococcus pneumoniae; identical to SEQ ID NO: 62977

SEQ ID NO: 71342 - protein, 585 aa, Streptococcus pneumoniae; identical to SEQ ID NO: 62976

SEQ ID NO: 71343 - protein, 512 aa, Streptococcus pneumoniae; identical to SEQ ID NO: 62977

SEQ ID NO: 71344 - protein, 585 aa, Streptococcus pneumoniae; identical to SEQ ID NO: 62976

SEQ ID NO: 71345 - protein, 512 aa, Streptococcus pneumoniae; identical to SEQ ID NO: 62977

SEQ ID NO: 71346 - protein, 585 aa, Streptococcus pneumoniae; identical to SEQ ID NO: 62976

SEQ ID NO: 71347 - protein, 512 aa, Streptococcus pneumoniae; identical to SEQ ID NO: 62977

SEQ ID NO: 71348 - protein, 585 aa, Streptococcus pneumoniae; identical to SEQ ID NO: 64134

SEQ ID NO: 71349 - protein, 512 aa, Streptococcus pneumoniae; identical to SEQ ID NO: 62977

SEQ ID NO: 71350 - protein, 585 aa, Streptococcus pneumoniae; identical to SEQ ID NO: 64134

SEQ ID NO: 71351 - protein, 512 aa, Streptococcus pneumoniae; identical to SEQ ID NO: 62977

SEQ ID NO: 71352 - protein, 666 aa, Listeria monocytogenes; identical to SEQ ID NO: 71304

SEQ ID NO: 71353 - protein, 592 aa, Listeria monocytogenes; identical to SEQ ID NO: 71305

SEQ ID NO: 71354 - protein, 585 aa, Streptococcus pneumoniae; identical to SEQ ID NO: 62976

SEQ ID NO: 71355 - protein, 512 aa, Streptococcus pneumoniae; identical to SEQ ID NO: 62977

SEQ ID NO: 71356 - protein, 585 aa, Streptococcus pneumoniae; identical to SEQ ID NO: 62976

SEQ ID NO: 71357 - protein, 512 aa, Streptococcus pneumoniae; identical to SEQ ID NO: 62977

SEQ ID NO: 71358 - protein, 585 aa, Streptococcus pneumoniae; identical to SEQ ID NO: 62976

SEQ ID NO: 71359 - protein, 512 aa, Streptococcus pneumoniae; identical to SEQ ID NO: 62977

SEQ ID NO: 71360 - protein, 585 aa, Streptococcus pneumoniae; identical to SEQ ID NO: 64134

SEQ ID NO: 71361 - protein, 512 aa, Streptococcus pneumoniae; identical to SEQ ID NO: 62977

SEQ ID NO: 71362 - protein, 585 aa, Streptococcus pneumoniae; identical to SEQ ID NO: 62976

SEQ ID NO: 71363 - protein, 512 aa, Streptococcus pneumoniae; identical to SEQ ID NO: 62977

SEQ ID NO: 71364 - protein, 585 aa, Streptococcus pneumoniae; identical to SEQ ID NO: 64134

SEQ ID NO: 71365 - protein, 512 aa, Streptococcus pneumoniae; identical to SEQ ID NO: 62977

SEQ ID NO: 71366 - protein, 585 aa, Streptococcus pneumoniae; identical to SEQ ID NO: 64134

SEQ ID NO: 71367 - protein, 512 aa, Streptococcus pneumoniae; identical to SEQ ID NO: 62977

SEQ ID NO: 71368 - protein, 585 aa, Streptococcus pneumoniae; identical to SEQ ID NO: 62976

SEQ ID NO: 71369 - protein, 512 aa, Streptococcus pneumoniae; identical to SEQ ID NO: 62977

SEQ ID NO: 71370 - protein, 656 aa, Haemophilus influenzae
MKIIYVKIKNFRLLSNVELELEKDTTVIVGRNNSGKTSLTEVIRRFLGNDSPSFQLEDFSTESYDNFLNLFERKLSSEEQTEESLDESPEIKFRNSLPAIELCLTIEYDKSLPNFGALSPFIIDLNEDCTKTHIIIRYELEYGKINEFFLSEINLENKILFLQELRKRISKFFTTKVWAQDPNDINNQKELTLKDVKKLIQVDFINAQRGLDDVTTKESKPLARLLEGFFDTTSMSKEDQDKSITQELENAVASVQTSINKDISEKLKDLFPSLKKFGYPGLGTRSLQTEVILDVKKLLSNFTHVYYPNSGVNLPESYNGLGTRNLILILLQLARFHKEYSTKNDGRNIHLIFIEEPEAHLHPQMQEVFIKQLEEATKMLASTGTSWIPQFIISTHSSHISNAVGFEHIRYFLQNNQQKTIVKDLKKDFSDCGKNKEFIHKYMTLTKSDLFFADKAILVEGLTERLMIPKMIEKLDKEEKTNLEGNYLTLLEISGAFAHKFILLLDFLELKTLIITDLDSVTEEVKGKSCEVHNGKSTSNACIKFWFDDEKDLYTIQQKTDSDKIKNKIRIAYQCPESKDSACGRSFEDAFMIANKEMFCLQITNANELECAAYEEAKKYANKKSDFAIKYAIDEPDNWKTPKYIKDGLVWLATGE

SEQ ID NO: 71371 - protein, 577 aa, Haemophilus influenzae
MEQLTLTEADKASKKALEELFKCLDNQRHFRLEAGAGAGKTYSLIKALNYIIDNKQDLYLKQGKKIACITYTNVAKDEILTRIDNNPIIFCETNHAFCWNLISQFQKKLQELINEIREWGKKLEEESENTDGKQIIYELGHRSIKDGKISLHHDDVITLTIKLLDIAKFRQIIIERYPIILIDEYQDTDKDWIDAIKNYFLDNKISPQFGFFGDHWQKIYSNGCGLIEHKNITEIGKKVNFRSNHVIVSALNKIRQDLPQASNDESSDGAIRIFHTNSWSVNRQTASHWKGDLSEEDFQKAFKLTKDYLTIQGWDLSSSKTKILMLTHKLLAKTQGYTEIANAFKYNESFVKKEHKYIEFFIDKLEPVCEAFINKKYGEMFSILEHRFPLLYSHSEKTEWQNAMKKLIDIRKSGTIKNVIDLLKETSKPKLPDSILTMEERLLMVNKSDELSSNQRELLALHNIAYSEIIELKTFLDGHSPFQTQHGVKGAEFENVLVIIGRGWNQYNFGDMLKWVTDGIPRGKEEAFERNRNLFYVACSRPKKRLAILFTQQLETSAIITLNEWFKKENVISLSQE

SEQ ID NO: 71372 - protein, 597 aa, Acinetobacter baumannii; identical to SEQ ID NO: 62720

SEQ ID NO: 71373 - protein, 593 aa, Acinetobacter baumannii; identical to SEQ ID NO: 62631

SEQ ID NO: 71374 - protein, 556 aa, Acinetobacter baumannii; identical to SEQ ID NO: 62630

SEQ ID NO: 71375 - protein, 593 aa, Acinetobacter baumannii; identical to SEQ ID NO: 62631

SEQ ID NO: 71376 - protein, 597 aa, Acinetobacter baumannii; identical to SEQ ID NO: 62720

SEQ ID NO: 71377 - protein, 593 aa, Acinetobacter baumannii; identical to SEQ ID NO: 62631

SEQ ID NO: 71378 - protein, 585 aa, Streptococcus pneumoniae; identical to SEQ ID NO: 62976

SEQ ID NO: 71379 - protein, 277 aa, Streptococcus pneumoniae; identical to SEQ ID NO: 67083

SEQ ID NO: 71380 - protein, 585 aa, Streptococcus pneumoniae; identical to SEQ ID NO: 62976

SEQ ID NO: 71381 - protein, 209 aa, Streptococcus pneumoniae
MSDIATQDKNVKKELLEYQGNILILANAGSGKTTFLTKKLKSDSKRLNNYQKLAAITFTRNATEEIKQKLVDIPDNVVVSTIDSFLDKEIILPFLNQKYEIQTSVQFSFRIDHNFSDYSTGIKQILQDGIFGTYDFPTSKHGKNFKCEVALDILKTIDSASEYIKYKFNTLYIDEFQDCDQSMNDLFLYLKNELGIPLFIVGDDKQSIY

SEQ ID NO: 71382 - protein, 585 aa, Streptococcus pneumoniae; identical to SEQ ID NO: 64134

SEQ ID NO: 71383 - protein, 512 aa, Streptococcus pneumoniae; identical to SEQ ID NO: 62977

SEQ ID NO: 71384 - protein, 585 aa, Streptococcus pneumoniae; identical to SEQ ID NO: 62976

SEQ ID NO: 71385 - protein, 512 aa, Streptococcus pneumoniae; identical to SEQ ID NO: 62977

SEQ ID NO: 71386 - protein, 585 aa, Streptococcus pneumoniae; identical to SEQ ID NO: 64134

SEQ ID NO: 71387 - protein, 512 aa, Streptococcus pneumoniae; identical to SEQ ID NO: 62977

SEQ ID NO: 71388 - protein, 585 aa, Streptococcus pneumoniae; identical to SEQ ID NO: 64134

SEQ ID NO: 71389 - protein, 512 aa, Streptococcus pneumoniae; identical to SEQ ID NO: 62977

SEQ ID NO: 71390 - protein, 585 aa, Streptococcus pneumoniae; identical to SEQ ID NO: 64134

SEQ ID NO: 71391 - protein, 512 aa, Streptococcus pneumoniae; identical to SEQ ID NO: 62977

SEQ ID NO: 71392 - protein, 585 aa, Streptococcus pneumoniae; identical to SEQ ID NO: 62976

SEQ ID NO: 71393 - protein, 512 aa, Streptococcus pneumoniae; identical to SEQ ID NO: 62977

SEQ ID NO: 71394 - protein, 585 aa, Streptococcus pneumoniae; identical to SEQ ID NO: 64134

SEQ ID NO: 71395 - protein, 512 aa, Streptococcus pneumoniae; identical to SEQ ID NO: 62977

SEQ ID NO: 71396 - protein, 597 aa, Acinetobacter baumannii; identical to SEQ ID NO: 62720

SEQ ID NO: 71397 - protein, 593 aa, Acinetobacter baumannii; identical to SEQ ID NO: 62631

SEQ ID NO: 71398 - protein, 585 aa, Streptococcus pneumoniae; identical to SEQ ID NO: 62976

SEQ ID NO: 71399 - protein, 512 aa, Streptococcus pneumoniae; identical to SEQ ID NO: 62977

SEQ ID NO: 71400 - protein, 585 aa, Streptococcus pneumoniae; identical to SEQ ID NO: 62976

SEQ ID NO: 71401 - protein, 512 aa, Streptococcus pneumoniae; identical to SEQ ID NO: 62977

SEQ ID NO: 71402 - protein, 585 aa, Streptococcus pneumoniae; identical to SEQ ID NO: 64134

SEQ ID NO: 71403 - protein, 512 aa, Streptococcus pneumoniae; identical to SEQ ID NO: 62977

SEQ ID NO: 71404 - protein, 585 aa, Streptococcus pneumoniae; identical to SEQ ID NO: 62976

SEQ ID NO: 71405 - protein, 512 aa, Streptococcus pneumoniae; identical to SEQ ID NO: 62977

SEQ ID NO: 71406 - protein, 585 aa, Streptococcus pneumoniae; identical to SEQ ID NO: 62976

SEQ ID NO: 71407 - protein, 209 aa, Streptococcus pneumoniae; identical to SEQ ID NO: 71381

SEQ ID NO: 71408 - protein, 585 aa, Streptococcus pneumoniae; identical to SEQ ID NO: 64134

SEQ ID NO: 71409 - protein, 512 aa, Streptococcus pneumoniae; identical to SEQ ID NO: 62977

SEQ ID NO: 71410 - protein, 585 aa, Streptococcus pneumoniae; identical to SEQ ID NO: 62976

SEQ ID NO: 71411 - protein, 512 aa, Streptococcus pneumoniae; identical to SEQ ID NO: 62977

SEQ ID NO: 71412 - protein, 687 aa, Staphylococcus aureus; identical to SEQ ID NO: 63306

SEQ ID NO: 71413 - protein, 582 aa, Staphylococcus aureus; identical to SEQ ID NO: 63307

SEQ ID NO: 71414 - protein, 585 aa, Streptococcus pneumoniae; identical to SEQ ID NO: 62976

SEQ ID NO: 71415 - protein, 512 aa, Streptococcus pneumoniae; identical to SEQ ID NO: 62977

SEQ ID NO: 71416 - protein, 585 aa, Streptococcus pneumoniae; identical to SEQ ID NO: 62976

SEQ ID NO: 71417 - protein, 512 aa, Streptococcus pneumoniae; identical to SEQ ID NO: 62977

SEQ ID NO: 71418 - protein, 638 aa, Listeria monocytogenes; identical to SEQ ID NO: 64506

SEQ ID NO: 71419 - protein, 635 aa, Listeria monocytogenes; identical to SEQ ID NO: 64507

SEQ ID NO: 71420 - protein, 509 aa, Listeria monocytogenes; identical to SEQ ID NO: 71144

SEQ ID NO: 71421 - protein, 793 aa, Listeria monocytogenes
MKMDKNFGRTIINWLFSYSDERRMMGYNILSLKKSKDELLNVVSNLEKEIRNLKENQVNNESEQKKLSMLVNEYTNRFGTISNTNNFASDVVRMEDEDANIFHHLVSLNGGNEFNKEQVNAIRFDMRTHLRIIAGAGSGKTQTICAKAAYLVLKEKIQERNIVMCTFSKKASQEMKERVNEFLGGNSRIEVLTFHGWFQKEYNVLIKKYPYLEKYGIAGEVPGKGSGKDSHDRILMNLIKQYHLYNFDKYEEKPINERLSYWRNMGYNDEEIVAFIARYFDDKEILKDQLLSEVFSEMLKELERIKRREKVINFDDMLINLKCVLENDSNALSLIQTRYQYIFIDEFQDINPLQKQIIELICPPDYEKSVINSTKLIIVGDDDQSIYFFRGAEPRYIKEFDRQYRQTSIELMTNYRSIAPVVHIGNTLISNNQHDRIKKSMIPHKLNEGDCYAKIFQNEQLEANWIAMRILSLSSEEKPFQDQIGKPNYTETIVLYPNKNQLKSMIIALQEKGIPFVTKSDDDLLGIFGINFFKRSFNLLMDIIDAETIEIKKHLYKQLIKNICLYYYIPFAKSIDFVSDETNYTSEKLTDFICKEKKVSKKEMALIKSIFRDINEFIKTEELNIKVFVNWLVETPKVKKQLIDEEKDWLLKEVSNVKTLKELILKYKAARTLKEEMADKLREYDNNNYNAVYLLTIHSSKGLGYKNVFVKGIYKNSLPDYRSVDKESIELQPLIEQASPPTTMEEQRRLMYVALTRAKENLYVTYPREVNEKPTLVSPFIKESNIMFRVGKI

SEQ ID NO: 71422 - protein, 585 aa, Streptococcus pneumoniae; identical to SEQ ID NO: 62976

SEQ ID NO: 71423 - protein, 512 aa, Streptococcus pneumoniae; identical to SEQ ID NO: 62977

SEQ ID NO: 71424 - protein, 656 aa, Haemophilus influenzae; identical to SEQ ID NO: 71370

SEQ ID NO: 71425 - protein, 577 aa, Haemophilus influenzae; identical to SEQ ID NO: 71371

SEQ ID NO: 71426 - protein, 585 aa, Streptococcus pneumoniae; identical to SEQ ID NO: 64134

SEQ ID NO: 71427 - protein, 512 aa, Streptococcus pneumoniae; identical to SEQ ID NO: 62977

SEQ ID NO: 71428 - protein, 509 aa, Listeria monocytogenes; identical to SEQ ID NO: 71144

SEQ ID NO: 71429 - protein, 793 aa, Listeria monocytogenes; identical to SEQ ID NO: 71421

SEQ ID NO: 71430 - protein, 585 aa, Streptococcus pneumoniae; identical to SEQ ID NO: 62976

SEQ ID NO: 71431 - protein, 512 aa, Streptococcus pneumoniae; identical to SEQ ID NO: 62977

SEQ ID NO: 71432 - protein, 687 aa, Staphylococcus aureus; identical to SEQ ID NO: 63306

SEQ ID NO: 71433 - protein, 582 aa, Staphylococcus aureus; identical to SEQ ID NO: 63307

SEQ ID NO: 71434 - protein, 585 aa, Streptococcus pneumoniae; identical to SEQ ID NO: 62976

SEQ ID NO: 71435 - protein, 512 aa, Streptococcus pneumoniae; identical to SEQ ID NO: 62977

SEQ ID NO: 71436 - protein, 729 aa, Staphylococcus aureus; identical to SEQ ID NO: 62500

SEQ ID NO: 71437 - protein, 597 aa, Staphylococcus aureus; identical to SEQ ID NO: 62501

SEQ ID NO: 71438 - protein, 687 aa, Staphylococcus aureus; identical to SEQ ID NO: 63306

SEQ ID NO: 71439 - protein, 582 aa, Staphylococcus aureus; identical to SEQ ID NO: 63307

SEQ ID NO: 71440 - protein, 589 aa, Staphylococcus aureus
MEIEWIKISGFRNFDNDKINLSKNTLIIGANDVGKTNLLYALRLLFDRSLSDKELDLSNSDYNVYTKSETIEITVKLTNVYEDCLKSTFKEDIKDGSLFIQYKNSKHGEYSILTGSSEKLLEPKNSRFYLKRLNMEYVHTNRNLTAFIKKEKNQILEYAKSQLNDEKNNQDKNVIEGIENKLNDINIEVDKLNYIQESLIKVNEELESLAIHNEGQKLTFKNVNSNIDRMLNNIELTYNTDEGALTIGGDGRNNQIFLATWISKQKNIKSLERVTFYAIEEPEAHLHPHQQRKLSNYLLENFSEQIFITTHSPHIANDFKPNKIVKLYRQNKKTKIAKGGCSEDLELIFDDFGYRLNAITSDLFFVNAVFLVEGPSEKLFYYALSKSLNIDLDRLNVSIISVDGVGFKPFLKVCLALDIPFVLRTDNDIFTKTKKVNDKNVKFSYQAGISRVIRIYEDILTSENKDKLLKFWDEIKHETEWEKSKGAPQVAHENVKYIIEIVECDNIYFAEKDLENDIVNSALFNSLKEFYQAEDKNEIVKKMQTAKANNMFNYLKNNIDQLSYLKSDSLAKPLYQIKDLAEKVASCYE

SEQ ID NO: 71441 - protein, 536 aa, Staphylococcus aureus
MSRYLNLTKEQNEVINEEGNLVVTANPGSGKTLTIVEKILNISQTLYSYQGVIAISFTRQSSKELEVRYNKKKTNDNNHFFGTIDKFYISEIIIPFSKQICGIRKSIEVINSLKSHPQYESLLKLKENSNNQEINVLLEKSLKEGLIFLEICGETALYILRKVPQCAYYLKSRYTHIFIDEYQDCGEIQHKIFLELINHGIKGIAVGDLNQAIFAFSYRFPKYLHSLIGNQDFRHVLLTRNFRCHKSISDYSLQLIEKRKVTNTDVKRVFKVNVIGNDKTVIDAIEKNFVNLKKKYKLNNNDFAILCRSRLSAERASKFLNIKNKLFDNTDFEKETSILANFYKDLLNSYFLYKINKTTVLDFVIKYLNEEVNYFNFRKGLETVNEIFNLELTNFVSNIEKFYDLAQLVYPDDFDEVVFNKLVGLLKDRKDLNSFKPATEDEINIMTVHKSKGLEFKCVFLLDLYKYVFPRENIDEESLNQDLHLHYVGITRAIEACYIIVATERYRPSKKDYCNAMESPFLYRNNVQDLREDIKW

SEQ ID NO: 71442 - protein, 597 aa, Acinetobacter baumannii; identical to SEQ ID NO: 62720

SEQ ID NO: 71443 - protein, 593 aa, Acinetobacter baumannii; identical to SEQ ID NO: 62631

SEQ ID NO: 71444 - protein, 585 aa, Streptococcus pneumoniae; identical to SEQ ID NO: 64134

SEQ ID NO: 71445 - protein, 512 aa, Streptococcus pneumoniae; identical to SEQ ID NO: 62977

SEQ ID NO: 71446 - protein, 689 aa, Streptococcus pneumoniae; identical to SEQ ID NO: 62612

SEQ ID NO: 71447 - protein, 605 aa, Streptococcus pneumoniae; identical to SEQ ID NO: 62613

SEQ ID NO: 71448 - protein, 585 aa, Streptococcus pneumoniae; identical to SEQ ID NO: 62976

SEQ ID NO: 71449 - protein, 512 aa, Streptococcus pneumoniae; identical to SEQ ID NO: 62977

SEQ ID NO: 71450 - protein, 689 aa, Streptococcus pneumoniae; identical to SEQ ID NO: 62612

SEQ ID NO: 71451 - protein, 605 aa, Streptococcus pneumoniae; identical to SEQ ID NO: 62783

SEQ ID NO: 71452 - protein, 729 aa, Staphylococcus aureus; identical to SEQ ID NO: 62500

SEQ ID NO: 71453 - protein, 597 aa, Staphylococcus aureus; identical to SEQ ID NO: 62501

SEQ ID NO: 71454 - protein, 729 aa, Staphylococcus aureus; identical to SEQ ID NO: 62500

SEQ ID NO: 71455 - protein, 597 aa, Staphylococcus aureus; identical to SEQ ID NO: 62501

SEQ ID NO: 71456 - protein, 597 aa, Acinetobacter baumannii; identical to SEQ ID NO: 62720

SEQ ID NO: 71457 - protein, 593 aa, Acinetobacter baumannii; identical to SEQ ID NO: 62631

SEQ ID NO: 71458 - protein, 597 aa, Acinetobacter baumannii; identical to SEQ ID NO: 62720

SEQ ID NO: 71459 - protein, 593 aa, Acinetobacter baumannii; identical to SEQ ID NO: 62631

SEQ ID NO: 71460 - protein, 687 aa, Staphylococcus aureus; identical to SEQ ID NO: 63306

SEQ ID NO: 71461 - protein, 582 aa, Staphylococcus aureus; identical to SEQ ID NO: 63307

SEQ ID NO: 71462 - protein, 687 aa, Staphylococcus aureus; identical to SEQ ID NO: 63306

SEQ ID NO: 71463 - protein, 582 aa, Staphylococcus aureus; identical to SEQ ID NO: 63307

SEQ ID NO: 71464 - protein, 585 aa, Streptococcus pneumoniae; identical to SEQ ID NO: 62976

SEQ ID NO: 71465 - protein, 512 aa, Streptococcus pneumoniae; identical to SEQ ID NO: 62977

SEQ ID NO: 71466 - protein, 689 aa, Streptococcus pneumoniae; identical to SEQ ID NO: 62612

SEQ ID NO: 71467 - protein, 605 aa, Streptococcus pneumoniae; identical to SEQ ID NO: 62783

SEQ ID NO: 71468 - protein, 609 aa, Streptococcus suis
MTIWENIKKVAYTPDSELEPILGINLQIWIQYSEEDSYQNIQPLMMDLNPDNNYIILDFSYIVPISRLHDLNTEISNFSDDFSKFESFMKKSMSKFFEMQINSRGYNPDIQKLTEEKSDLLEMKDIHKLIKIRGIRANREVSNKENNHSLSKTSNLFYKSNNGDDIDNATKNLLQSAITEADEALTKAYSGDGEDDGVFTSIFERVKKFGGNDSESELEIHSSLSEKDILSNNTTLYYRHDDSLLPETYNGLGYLNLYGMIFEIETLMADIKNNPADINLVYIEEPESHKHPQLQYVFIKNIKGLLKEHDDELKASGYTSGIQTLITTHSSHIVSDCNFDDLIYFKHDNGTAISKAFNSLKEEYEDDKLGYRFVKQYLTLNSSELFFADKVICIEGDTERILLPTMMQKVDIATPIEQGSNIMPLLSQNISIIETGAHSQVFRKFFDFLGIKVLIITDIDPVNKNEKNRFIACSAVNATSTSNTSLKSFFNISGDGIFSTVTQKSFAEKITPDNRIRIAYQIPEDNNGYQPASFEDSFIGLNKEFIIKQKDGLIEYEALKNFDDDEIEDFYTFARNKVNKKSAFASSLLYFEDEENTWKVPKYISEGLL

SEQ ID NO: 71469 - protein, 597 aa, Streptococcus suis; identical to SEQ ID NO: 62965

SEQ ID NO: 71470 - protein, 609 aa, Streptococcus suis; identical to SEQ ID NO: 71468

SEQ ID NO: 71471 - protein, 597 aa, Streptococcus suis; identical to SEQ ID NO: 62965

SEQ ID NO: 71472 - protein, 695 aa, Streptococcus suis; identical to SEQ ID NO: 62538

SEQ ID NO: 71473 - protein, 605 aa, Streptococcus suis; identical to SEQ ID NO: 62705

SEQ ID NO: 71474 - protein, 744 aa, Legionella pneumophila
MHITKILIKNFRLLKDISIDLEDNLSIILGKNNSGKTSILLLLDKFLSSTMSRPSFTFDDFNTEFKEILKSKVENNEDIDTFPCFPGISLKLFIEYNEDDNLSNIGNNVIMDLDPDNKMVVLAFEYHISQERLSALKEQYHEYLERGHTGNDLFSFLKNNYADFFQTAKKSLLFDIENQKENDDIFTDLIKENIQIDKIINFKWISARRNVSNKDSEKALSALSSKIYKKIEARKDNSEIIEKFKATLTETDKELDIVYKEIFEDVIQDVKKFGGIRQDDSVIKIISSLKHKELLEENTTVMYELKTPGHSLPESYNGLGYMNLISMIFEIKILLHDFQKEINESPSDINLLFIEEPEAHTHPQMQRVFINNIKSLLDRGISKEDGRKYNLQTILSTHSSHIVSESNFEDIKYLKRENNGIVSKNLKDLKNEYHGYEQNYKFLKQYLTLHRAELFFADKAVFIEGDTERILLPAIMKKIDQEDFIQEFSKGKIHSIPLLSQNISVIEVGAYSHVFEKFIDFIGIKSLIITDLDSGKTVTDTNETGTPIKNKDGTDKKKIEPCPVCDGSLTSNTSLRFFYGDDKNLNEFMSMRLENKRLKKDPTSKKWIAHENGHLLCVYQTEETVDGKKYHARSFEDAFFHVNRSFIKDSSINKNMDFIGDISFPSLTKKKLRNFIENKINVWQIAEDVKSKPSFAMEILLSSKDKKITIKNNSTGEETTVVDEFSNWKIPKYIEEGLKWLKTD

SEQ ID NO: 71475 - protein, 645 aa, Legionella pneumophila
MVKNRLSLEPEVNQILEQIYLGHNFLLSGGAGSGKTFSLVQLIRQLILDNPNVNIACITYTNAAVKEIEDRVHHKNLNVMTIHNFLWDNIKSYQKELRATLINLINDDNVNQIKSNDTKLPNFFFDDKRITYKEYTLLNEGIISHDELLILAQYMFKEYPKLCDILIDKFNYIFIDEYQDTNPLVINIFLEQLVRCKRKNIIGLFGDAMQSIYDDGVGNLNNYIKSGIVYEIKKEQNRRNPRLIYELANKLRTDNITQRFANDSNAPNMKDGTVKEGNIKFYYTDNEENLDKIKKLLDWDFTDSKKTKELNLTHNLIAPKAGFQKLMAVYDGDKILEYRNRIKKYIKDKAIQEDFSDLSFGQVIEKLLEGKATDSERKPILPTPAMTEFINKNPDLYERAKSIQFDIFKKIYVDKESLLDDKKEDIESDGKQTSKRDNLIKHLFKIQSNLNLYNNNKYNEFLRKIEFNIGSIADKKRLKETIFQLQNLTDSSIEEVIEFAHEKGICRKDDKLSEFIKSNQYIYDQVKVLNFKEFQNLFNYLEGYTPFSTQHKIKGAEFDNVLVILDNGSWSKYNFEYLFHPEIFDSLSKSQKSTFPQILERSQKLFYVCCTRSKENLVVYFNSPSSETISKAKKWFGESNVQFIT

SEQ ID NO: 71476 - protein, 769 aa, Legionella pneumophila
MKIVYIDIQNFRKLKACRVDLADQSTIFVGANNSGKTSAMDALIMFLKRSKRRDLSTTDVTLSNWSALNEIANDWITTKEDQAPNLSLDTWRPLLPTIDIWLHVDESQIHYVSHILPTLDWDGGLLGVRLILEPKDMENLYKSYITTHAASQETLSARKILKEKEPASTLTLWPTSMRDFLDRKLHDFFSISAYVLDPARSKDAQPQPFTELMEPLEGDPFDGLFKIDIINAQRGFSDPNAGEGTVNTDRRLSSQLRHYFDKHLDPTELPEASDLDALEALEAARTAFDQKLKTSFSAAIGELERLNYPGFSDPQILLSSKVNPLEGLNHDSAVQFKVACSEASSGNELCLPEKYNGLGYQNLISMIFNLIRFRDEWMRVGKVGKREEDTSKPREPLHLMLIEEPEAHLHVQVQQVFIKKAYNVLRNHPELVKEHQFTTQMVVSTHSSHIAHETDFTGLRYFRRKPLESNSEIPCASVINMTTTFSTEKNDLMDKTAEDKEKIETAKFATRYLKTTHCDLFFADAVILVEGPAERLLIPHFIRHHYSDLDRSYISLLEIGGSHAHRLRPLIEALGIPTLVITDLDSIKAESSGKVRPATGKDHRTGNNTLKSWVPKKTTLDEVLAAKFEDKITSNGLVRVAYPCVTSIQYDTANYTNAQPDQAIPYTLEDALVLDNISLFKALTDKTGLIKKMADAVNKPTLDEACQSMFDALDKNAKKAEMALELLYTTEPSQLNPPKYIADGLDWLKNKLVTSASLMNNPLNTSEGE

SEQ ID NO: 71477 - protein, 629 aa, Legionella pneumophila
MTSIIDTDTVDDEIYSCLDLDNPKSFFLFAGAGSGKTRSLVEVLKRFRKNNTHRLRSNAQQAAIITYTNAACDEIKRRLEFDPTFNISTIHSFVWELIKPYKHDIREWLRIKLLSDIEELEEAQRKGRAGTKAAEDRPRQIEAKRRRLESLNSIRKFSYNPNGDNSGMDTLNHAEVIGITASLLSNRPLLQSILIRKFPVLLIDESQDTKKELIEALFTIQGLHKSQFSLGLFGDIMQRIYTDGKEDLGITHLPDGWLAPKKIYNYRCPRRIVKLINKIRSDVDQNLQEPRNPDEGLVRLFIADTSRTIDKTAFEEAICEEMAKLTVDELWRDKTKSNKILTLEHHMAAQRGGFSNFFNPLYSVDKLKTGLLEGSLSSITFFSEKVLPLINYLEAGNQFAVFRILSKHSPLMSKEHIEHSKNPKAELVKAKEAVNAFHALWSHGADPTLHSILKEIQNSRLFKVPDNLVPIAERQEKNYEGAKDEYDANQMMDAWDDALASSFSEFKKYVLYISDESRFGTHQGIKGLEFPRVMVILDDEEARGFLFSYDKLFGAKAPTKSDIDNLEKGKETSIDRTRRLFYVTCSRAEKSLAIIAYTNEPNKVKENVLGQGWFNEEEIILSSEIDMHN

SEQ ID NO: 71478 - protein, 689 aa, Streptococcus pneumoniae; identical to SEQ ID NO: 62612

SEQ ID NO: 71479 - protein, 605 aa, Streptococcus pneumoniae; identical to SEQ ID NO: 62613

SEQ ID NO: 71480 - protein, 677 aa, Streptococcus suis
MKIKKINVQNYRLLKDFSLELKSELSLIVGKNNCGKTSVLSVLEKIINKSSSLTWEDINLYHRKVIFENIKKVAYTPDSELEPILGINLQIWIQYSEEDSYQNIQPLMMDLNPDNNYIILDFSYIVPISRLHDLNTEISNFSDDFSKFESFMKKSMSKFFEMQINSRGYNPDIQKLTEEKSDLLEMKDIHKLIKIRGIRANREVSNKENNHSLSKTSNLFYKSNNGDDIDNATKNLLQSAITEADEALTKAYSGDGEDDGVFTSIFERVKKFGGNDSESELEIHSSLSEKDILSNNTTLYYRHDDSLLPETYNGLGYLNLYGMIFEIETLMADIKNNPADINLVYIEEPESHTHPQLQYVFIKNIKGLLKEHDDELKASGYTSGIQTLITTHSSHIVSDCNFDDLIYFKHDNGTAISKAFNSLKEEYEDDKLGYRFVKQYLTLNSSELFFADKVICIEGDTERILLPTMMQKVDIATPIEQGSNIMPLLSQNISIIETGAHSQVFRKFFDFLGIKVLIITDIDPVNKNEKNRFIACSAVNATSTSNTSLKSFFNISGDGIFSTVTQKSFAEKITPDNRIRIAYQIPEDNNGYQPASFEDSFIGLNKEFIIKQKDGLIEYEALKNFDDDEIEDFYTFARNKVNKKSAFASSLLYFEDEENTWKVPKYISEGLLWLREQ

SEQ ID NO: 71481 - protein, 641 aa, Streptococcus suis
MVTRTVEPEVEKVFEAIKQGQNFILEGGAGSGKTYSLISIIEKILIEEPKKSIVCITYTNNAVAEIKSRIINDNLWVSTIHEFIWHIIGNFQKEIKECLVELINDDSQKLFVSPKDVIEEESISLDYFDDVRVDYAEWYSMSITEQNKVQISHDHILIVAEKMFSKYKKLCDVLADTANYIFVDEYQDTSPLIVKILLEHLQKSTKKNVVGFFGDSMQAIYDSGVGDLNSYNLAKIQKTQNRRNPKKVIDLANKVRNDGLVQTPSNDDTAPNMDDGSVIAGTVKFVYGNDINQLDVLRNSKLYKALEFDIAKKTKELRLTHKLNAEMAGFSKLFELYNTDLFVKLITGIKKKINENKIADKGKTFEELVEEAKIAVGKGGPLIIDVVNSIPELLAFYDEIKTCSFEEVSNKSKVNKESLLAYKFNGLSSRYEAGTDRDRILKRLDLIYELLELYKTGKHNEFLRITKFNITSSEDKISLSKVMTKISVDDITIGKVIELAEESGLISKDDLFTNFIESRGHYLWSRLKIMPFQEYVNSIAYLREYVSVITQHKVKGSEYDNVLVLLDNGKWNQYNFDSLFGKGSVNENVQKRTKKLFYVAITRAMKNLIVYMPSNDSQIIQKAQDYFEPIDIIDVLSLVDE

SEQ ID NO: 71482 - protein, 689 aa, Streptococcus pneumoniae; identical to SEQ ID NO: 62612

SEQ ID NO: 71483 - protein, 605 aa, Streptococcus pneumoniae; identical to SEQ ID NO: 62613

SEQ ID NO: 71484 - protein, 695 aa, Streptococcus suis; identical to SEQ ID NO: 62538

SEQ ID NO: 71485 - protein, 468 aa, Streptococcus suis
MVKSDDWFPKGVIKLEDAALEVVKDVTNSLVIAGPGAGKTELLAQKLDYLFSTNKCISPKKILALSFKTDAAANLKDRVKKRYGDEYASRFTSLTYSAFEKRILDQFRDVLPEDIRPSRDYLIEDWDTIKELLSMNGINVNGWRMSDIRNFVENIILNDGNTHKLKKDLLKGTQDNKPVLLYRQITKLSTQIIATNEYIRKALQMTYDFVFLDEFQDTTYAQYNLLKTCFLGSSCKLTAVGDNKQAIMRWAGAKPDIFPDYIRDFNSNEYQLLMNHRSVPKLVKFQKEVHQILNSNHSSIQPNNYPEFQEGEITLFEFENESLEAELIANDIESKIQGGIRPSEICILAKQKVDDYSSKLITTLNSKGIKARIENEYQELLKDPTCNLLLDLISCSQGKRDPLIWENISNFYGNINGIDEFTDELILAKSYKEIDNIVSDITYLISNFIPNEESKFSSVKFFSFSLLL

SEQ ID NO: 71486 - protein, 609 aa, Streptococcus suis; identical to SEQ ID NO: 71468

SEQ ID NO: 71487 - protein, 597 aa, Streptococcus suis; identical to SEQ ID NO: 62965

SEQ ID NO: 71488 - protein, 695 aa, Streptococcus suis; identical to SEQ ID NO: 62538

SEQ ID NO: 71489 - protein, 508 aa, Streptococcus suis
MVKSDDWFPKGVIKLEDAALEVVKDVTNSLVIAGPGAGKTELLAQKLDYLFSTNKCISPKKILALSFKTDAAANLKDRVKKRYGDEYASRFTSLTYSAFEKRILDQFRDVLPEDIRPSRDYLIEDWDTIKELLSMNGINVNGWRMSDIRNFVENIILNDGNTHKLKKDLLKGTQDNKPVLLYRQITKLSTQIIATNEYIRKALQMTYDFVFLDEFQDTTYAQYNLLKTCFLGSSCKLTAVGDNKQAIMRWAGAKPDIFPDYIRDFNSNEYQLLMNHRSVPKLVKFQKEVHQILNSNHSSIQPNNYPEFQEGEITLFEFENESLEAELIANDIESKIQGGIRPSEICILAKQKVDDYSSKLITTLNSKGIKARIENEYQELLKDPTCNLLLDLISCSQGKRDPLIWENISNFYGNINGIDEFTDELILAKSYKEIDNIVSDITYLISNFIPNEESMLNLIDCIIEKIDEKRIISNFSTYNGKSDLFNYQFQCRNSYLLAGSVCIQTGSL

SEQ ID NO: 71490 - protein, 699 aa, Streptococcus pneumoniae; identical to SEQ ID NO: 64132

SEQ ID NO: 71491 - protein, 605 aa, Streptococcus pneumoniae; identical to SEQ ID NO: 64133

SEQ ID NO: 71492 - protein, 695 aa, Streptococcus suis; identical to SEQ ID NO: 62538

SEQ ID NO: 71493 - protein, 468 aa, Streptococcus suis; identical to SEQ ID NO: 71485

SEQ ID NO: 71494 - protein, 699 aa, Streptococcus pneumoniae
MKLTKMVINNFRSFGECQAINFNNQTVLIGNNSSGKTTVLQALSKLFSDKQSDRIIRKSDFHLPKGLRPGKNTRNLFIETIFEFDELAGTVYGPAIPTFFEHFTVSQDGAKPFLRIRLESSWEDDGTVEGSIDTQIYYISSDEDTIRDEDKHRAPRKDLDKIRVLYVPASRTPEKELGNASGSMLSRLVNSINWTKDEINEIKDKIDELNNIFLSENGALTQINNEIQKSWELYHEDNRFSQAELIINSSEMAAALRQIALKFSPTTTEEAFTVSDLGDGLRSIFYFSLVDSILDIELEITKDREENPDNPRFKLVPPILTILAIEEPENHIAPHHIGKLIKRFKQLGNNDNSQVILTSHSPAIVKRIEPEDLRYLRIENNDRVLQTIVSDIQLPQAIDESYKYIKGAIQAYPELYFAKLVVLGEGDSEELLLPKFFDLLGLEIDSSQISVVPLGGRHVNYFWKLLNALRIPHITLLDFDNERYGGGWGRIQYAIKQLILNGVAKEKLVTVTTEFQKSRVLDDDEIDKIKDWKIDRPDNQLLEGWIKMLEKFNVFFSAPLDIDFLMLQHYREYYLDMLSAKEGPVISYADSGGNNKKVKLTDLDRIDKLQLEGLEKRIEEAKIATLKDKSGPGDSFTREEKELMIWYQYFFLGRGKPTTHMQFLSSISDDELKRCLPPVFEKMVKRAEELLGDIEHDEE

SEQ ID NO: 71495 - protein, 605 aa, Streptococcus pneumoniae
MMRSEEWHPKGDIDLEKAALGAVKDVTNSLVIAGPGAGKTELLAQKLDYLFSTNKCVSPKKILALSFKTDAAANMKNRVKKRYGDEYASRFTSLTYSAFEKMILDQFINALPEEIRPARDYLIDDWDVIKETLIKNGINVNGRRMSDIRMSVENTVLNDEANLKFKKELLKGTQNNKAVLLYKQITKLATYIIYTNKYIRKALQMTYEFVFLDEFQDTTYDQYNLLKICFLGSTCKLTAVGDNKQAIMRWAGANPDIFRDYKQDFKANEYQLLMNHRSVPKLIEFQKEVHQILDSNNSPFQTNNHPNFEKGEITLFEFENESLEAELIANDIESKIQGGIRPSEICILAKQKVDDYSSKLITTLNSKGIKARIENEYQELLKDPTCNLLLDLISCSQGKRDPLIWENISNFYGNINGIDEFTDELILAKSYKEIDNIVSDITYLISNFIPNEESMLKLIDCIIEKIDEKRIISNFSTYNGKSDLDIIVKNFSKLLYIEYSQIQGEWLDTVSSFKGENSIPIMTIHKSKGLEYEVVYFLGLEDSAFWSFNDQPEEDKSAFFVALSRAKSHLIFTYCKLRNNSPQNNRNINEIYSLLTQSNLVDVIN

SEQ ID NO: 71496 - protein, 609 aa, Streptococcus suis; identical to SEQ ID NO: 71468

SEQ ID NO: 71497 - protein, 597 aa, Streptococcus suis; identical to SEQ ID NO: 62965

SEQ ID NO: 71498 - protein, 695 aa, Streptococcus suis; identical to SEQ ID NO: 62538

SEQ ID NO: 71499 - protein, 605 aa, Streptococcus suis; identical to SEQ ID NO: 62705

SEQ ID NO: 71500 - protein, 695 aa, Streptococcus suis; identical to SEQ ID NO: 62538

SEQ ID NO: 71501 - protein, 605 aa, Streptococcus suis; identical to SEQ ID NO: 62705

SEQ ID NO: 71502 - protein, 609 aa, Streptococcus suis; identical to SEQ ID NO: 71468

SEQ ID NO: 71503 - protein, 597 aa, Streptococcus suis; identical to SEQ ID NO: 62965

SEQ ID NO: 71504 - protein, 609 aa, Streptococcus suis; identical to SEQ ID NO: 71468

SEQ ID NO: 71505 - protein, 597 aa, Streptococcus suis; identical to SEQ ID NO: 62965

SEQ ID NO: 71506 - protein, 613 aa, Legionella pneumophila; identical to SEQ ID NO: 70982

SEQ ID NO: 71507 - protein, 603 aa, Legionella pneumophila; identical to SEQ ID NO: 70983

SEQ ID NO: 71508 - protein, 695 aa, Streptococcus pneumoniae; identical to SEQ ID NO: 64780

SEQ ID NO: 71509 - protein, 605 aa, Streptococcus pneumoniae; identical to SEQ ID NO: 66879

SEQ ID NO: 71510 - protein, 583 aa, Legionella pneumophila
MYLSKLNISNFRKLKQISLEFEKGLNVIVGANNIGKSAVVDALRALLTGFDGAFLRLTVDDVYTDQSMSEPSPNIMFHYIFDGLSLDDEADFLPALIQNEDNSFEAHFYVSYMNDGLNSRLRVKRWCGKHEEIGISSDMMENIRGVYLQPLRDASKGLMPGRNSRLSHLIQLLSDENSRQAVEEKLGQLDSFLTNEIPIADTRTAVINNHENMLGQVLAQSLELDIGGADFRSLSSRLSLYADKFDIEQNGLGYNNLIYMAVVLCELAKDPYILYRGLIIEEPEAHLHPQLQAILLDYLENIKADKGEGHVQVFVTSHSPNFGSIAQLNSITCLVDVNDEVKTFFPRKVNFEPQKREKLERYLDVTRAEIFFARRIIFVEGTAELMLINIFGKMLGEEYDLRKNGVSVISVDGLNFDSFLPLFGRDAISIPVAVITDADPIADENDDLKSVYPDLNEDITVSSTIEKMKKCESDFVKIFYGVKTFEYDLALHEKNREKMLTALESIHPQIGAELRNLVNEAQSNRDKARELFCGMFERGKGKSNVKKGVFGQALAQTISSSKYDFIVPDYIENAIKFVCDYKK

SEQ ID NO: 71511 - protein, 582 aa, Legionella pneumophila
MNLSRKQIEIINSPSESLCVLACAGSGKTMTAVHRLNHIRTINKDSRSWFALLSFSNVAIDTFKEKYLDLVEGQILSSYQNRILIETFDSFLTNVILKPHASQVMGCENSPFLLSGNEGFLKNDNYKFWYKSSSKDIPVPPQKIDNIFIDISGGNFVFKYRDDKGNISIINNGRKVTENLGAIGAYTHEFGRFWALKTLKMHPELLRTISKRYSHIIIDEAQDIGLLHKYCIDLLIKEGSSISLIGDPCQAIYEFAGADGFFLRDFYTRSGVSNYELIMNYRSIPEINAVSSVISGKNISSKKTNFNQNLGAFFVTYDPKNPVLLKELFSNKISQCNISSNNAAILCRSNEMVNKLTIENSSLGQGKIKLLTNAAIQRDLHRDYNTAFNLVTKCIVGLLINPPNDLYNKILQSNRFFEFYDLKKDIWSFIRDAEKGLPLSSLNAKQDWVKILRTNLEELLNKCNQRYGFEILPNINSVLSTRGLSNSPLYSLDVTSTKDEKLRVDTVHKSKGESIDAVLYIANGNHIEAMLDGVNTETGRIGYVALTRARNLFILGVPNNKTNTIRTKLIDLGFKEIEVENC

SEQ ID NO: 71512 - protein, 689 aa, Streptococcus pneumoniae; identical to SEQ ID NO: 62612

SEQ ID NO: 71513 - protein, 605 aa, Streptococcus pneumoniae; identical to SEQ ID NO: 62613

SEQ ID NO: 71514 - protein, 609 aa, Streptococcus suis; identical to SEQ ID NO: 71468

SEQ ID NO: 71515 - protein, 597 aa, Streptococcus suis; identical to SEQ ID NO: 62965

SEQ ID NO: 71516 - protein, 695 aa, Streptococcus pneumoniae; identical to SEQ ID NO: 64780

SEQ ID NO: 71517 - protein, 605 aa, Streptococcus pneumoniae; identical to SEQ ID NO: 66879

SEQ ID NO: 71518 - protein, 695 aa, Streptococcus pneumoniae; identical to SEQ ID NO: 64780

SEQ ID NO: 71519 - protein, 605 aa, Streptococcus pneumoniae; identical to SEQ ID NO: 66879

SEQ ID NO: 71520 - protein, 585 aa, Streptococcus pneumoniae; identical to SEQ ID NO: 62976

SEQ ID NO: 71521 - protein, 512 aa, Streptococcus pneumoniae; identical to SEQ ID NO: 62977

SEQ ID NO: 71522 - protein, 585 aa, Streptococcus pneumoniae; identical to SEQ ID NO: 66870

SEQ ID NO: 71523 - protein, 512 aa, Streptococcus pneumoniae; identical to SEQ ID NO: 62977

SEQ ID NO: 71524 - protein, 583 aa, Legionella pneumophila; identical to SEQ ID NO: 71510

SEQ ID NO: 71525 - protein, 582 aa, Legionella pneumophila; identical to SEQ ID NO: 71511

SEQ ID NO: 71526 - protein, 583 aa, Legionella pneumophila; identical to SEQ ID NO: 71510

SEQ ID NO: 71527 - protein, 582 aa, Legionella pneumophila; identical to SEQ ID NO: 71511

SEQ ID NO: 71528 - protein, 689 aa, Streptococcus pneumoniae; identical to SEQ ID NO: 62612

SEQ ID NO: 71529 - protein, 605 aa, Streptococcus pneumoniae; identical to SEQ ID NO: 62613

SEQ ID NO: 71530 - protein, 609 aa, Streptococcus suis; identical to SEQ ID NO: 71468

SEQ ID NO: 71531 - protein, 597 aa, Streptococcus suis; identical to SEQ ID NO: 62965

SEQ ID NO: 71532 - protein, 695 aa, Streptococcus suis; identical to SEQ ID NO: 62538

SEQ ID NO: 71533 - protein, 468 aa, Streptococcus suis; identical to SEQ ID NO: 71485

SEQ ID NO: 71534 - protein, 695 aa, Streptococcus suis; identical to SEQ ID NO: 62538

SEQ ID NO: 71535 - protein, 419 aa, Streptococcus suis
MVKSDDWFPKGVIKLEDAALEVVKDVTNSLVIAGPGAGKTELLAQKLDYLFSTNKCISPKKILALSFKTDAAANLKDRVKKRYGDEYASRFTSLTYSAFEKRILDQFRDVLPEDIRPSRDYLIEDWDTIKELLSMNGINVNGWRMSDIRNFVENIILNDGNTHKLKKDLLKGTQDNKPVLLYRQITKLSTQIIATNEYIRKALQMTYDFVFLDEFQDTTYAQYNLLKTCFLGSSCKLTAVGDNKQAIMRWAGAKPDIFPDYIRDFNSNEYQLLMNHRSVPKLVKFQKEVHQILNSNHSSIQPNNYPEFQEGEITLFEFENESLEAELIANDIESKIQGGIRPSEICILAKQKVDDYSSKLITTLNSKGIKARIENEYQELLKDPTCNLLLDLISCSQGKRDPLIWENISNFYGNINCIR

SEQ ID NO: 71536 - protein, 699 aa, Streptococcus pneumoniae
MKLTKMVINNFKSFGECQAINFNNQTVLIGNNSSGKTTVLQALSKLFSDKQSDRIIRKSDFHLPKGLRPGENTRNLFIETIFEFDELDGTVYGPAIPTFFEHFTVSQDGAKPFLRIRLESSWEDDGTVEGSIDTQIYYISSDEDTIRDEDKHRAPRKDLDKIRVLYVPASRTPEKELGNASGSMLSRLVNSINWTEDEIKEIKDKIDELNNTFLSENGALTQINNEIQKSWELYHEDNRFSQAELIINSSEMAAALRQIALKFSPTTTEEAFTVSDLGDGLRSIFYFSLVDSILDIELEITKDREENPDNPRFKLVPPILTILAIEEPENHIAPHHIGKLIKRFKQLGNNDNSQLILTSHSPVIVKRIDPEDLRYLRIENNDSVLQTIVSDIQLPQSNDESYKYIKGAIQAYPELYFAKLVVLGEGDSEELLLPKFFDLLGLEIDSSQISVVPLGGRHVNYFWKLLNALRIPHITLLDFDNERYGGGWGRIQYAIKQLILNGVAKEKLVTVTAESQKSRVLDDDEIDKIKDWKIDRPDNQLLEGWIKMLEKFNVFFSAPLDIDFLMLQYYKEHYLETLSTNEGPVVSYTDENSDNKKIKLTKMDRTNDYQLIGFKNRISEAIQATLKDKSGPGDSFTEEEKELMIWYQYFFLGRGKPTTHMQFLSSISDDELTRNLPPVFKKIVNRAEELLGDIEYGKE

SEQ ID NO: 71537 - protein, 605 aa, Streptococcus pneumoniae; identical to SEQ ID NO: 64133

SEQ ID NO: 71538 - protein, 695 aa, Streptococcus pneumoniae; identical to SEQ ID NO: 64780

SEQ ID NO: 71539 - protein, 605 aa, Streptococcus pneumoniae; identical to SEQ ID NO: 66879

SEQ ID NO: 71540 - protein, 695 aa, Streptococcus pneumoniae; identical to SEQ ID NO: 64780

SEQ ID NO: 71541 - protein, 605 aa, Streptococcus pneumoniae; identical to SEQ ID NO: 66879

SEQ ID NO: 71542 - protein, 661 aa, Legionella pneumophila
MHLEKICVSNFRCFPESETSIFMEQDLTCFVGNNGSGKTTMILALKRLFGANRQDRVITREDFYLAMNETYKDIVGRELYIEVVFIFPELNDDIQNARETCPAFSSVIFADENDKKLKARMRLEAVWSETEYEDEVQSRLYWITTSEKIEFGDETDLKYPVSPQDRKHIKLRYIPAFRDSTSILRDEVKLLAKLLADYSDINHTTQETIKKASEKLSSEVQGLDAIKTTTGILKSIWQEVHDNTLKHYQEPKIEATPTEVDELLRSISIKLAPTENGESCDLKGLSDGQVSLLYVTLSMALYELEQKHYAREIKGFKELDKDIAVFTIFAFEEPENHLSPYYLGKVIKLLHLKTQTAKAIGIITSHSSSVVRRMKRVEQIRYFRQEINTDIRYSVVKKILLPLTRSDDDYKYINQAVTAHPELYFSKLVILGEGDSEEIVIPQLANKLGLDLDPSFVAFVKLGGRHVIHMWRLLNDLAIPYVTLLDLDLGRQSGGPVRIKNIIDELEKQDKYIELPKGMNKKDLSATSIKQDQLNELLIQLEKCNIFFSVPLDLDMVMIQSFPSYYCANARDSKRKILEKAVLGDACIPDAYSQSGFSLSDDELKKYRYLFCTKSKVASHYQAMAEIRELPVSELEEHCPDSIRQLIKLCSKLITRVLDNE

SEQ ID NO: 71543 - protein, 618 aa, Legionella pneumophila
MSKYLSLEQWKPSKEFLTSDFLERIIRENQNNLAILAGPGAGKTEILAQRASFLLQTGTCRAPQKILALSFKNDAAANIQKRVVMRCGQELSRRFDSFTFDSFFISLVRRFITLLPDWINIHADFDIYSFDSNWWNEYEKFVLNGSPCLYRNTYSQSDRHSPSDLSQKPEDEIVKIWDYCSTKSVVDYAMCRSMAYTIIKNHSQVRNLILSTYKYLFLDELQDVTDFQYNFIKTVFENSNVVITAVGDTNQMIMGWAGANPLNFKKLQSDFDSEIIPLAINHRSNSKIINLINFIIHDLTPQGEVAVVYEGTRKDPPPSRCLGARSFNCINDEGEYIAHYIKQLMQQNPGLKPCDFILVLRQKAQEYFVQVNDIFTMNGLHLRNEDMEVTKNGIKIQDLMEEPLSSFLILLIRKRIGAINYEQEKELERLIASVGGYHMDQDREYKRLHKHLSDLISIINFSTPLKTIVSRVIENIGLTKLKNVFPQYRSKYLKKTENSFCAFFQEALDRNLQDIRLAIESYEGHNQIKLMTIHKSKSLEFDTVFFVDFNTSSWWGLENAVKDNNAKKQREEKNAFFVGLSRAKERLFFTRGQGDWPQTILNLLIESKLLIKLPDINK

SEQ ID NO: 71544 - protein, 585 aa, Streptococcus pneumoniae; identical to SEQ ID NO: 62976

SEQ ID NO: 71545 - protein, 512 aa, Streptococcus pneumoniae; identical to SEQ ID NO: 62977

SEQ ID NO: 71546 - protein, 695 aa, Streptococcus pneumoniae; identical to SEQ ID NO: 64780

SEQ ID NO: 71547 - protein, 605 aa, Streptococcus pneumoniae; identical to SEQ ID NO: 66879

SEQ ID NO: 71548 - protein, 695 aa, Streptococcus pneumoniae; identical to SEQ ID NO: 64780

SEQ ID NO: 71549 - protein, 605 aa, Streptococcus pneumoniae; identical to SEQ ID NO: 66879

SEQ ID NO: 71550 - protein, 695 aa, Streptococcus suis; identical to SEQ ID NO: 62538

SEQ ID NO: 71551 - protein, 468 aa, Streptococcus suis; identical to SEQ ID NO: 71485

SEQ ID NO: 71552 - protein, 695 aa, Streptococcus suis; identical to SEQ ID NO: 62538

SEQ ID NO: 71553 - protein, 468 aa, Streptococcus suis; identical to SEQ ID NO: 71485

SEQ ID NO: 71554 - protein, 677 aa, Streptococcus suis; identical to SEQ ID NO: 71480

SEQ ID NO: 71555 - protein, 641 aa, Streptococcus suis
MVTRTVEQEVEKVFEAIKQGQNFILEGGAGSGKTYSLISIIEKILIEEPKKSIVCITYTNNAVAEIKSRIINDNLWVSTIHEFIWHIIGNFQKEIKECLVELINDDSQKLFVSPKDVIEEESISLDYFDDVRVDYAEWYSMSITEQNKVQISHDHILIVAEKMFSKYKKLCDVLADTANYIFVDEYQDTSPLIVKILLEHLQKSTKKNVVGFFGDSMQAIYDSGVGDLNSYNLAKIQKTQNRRNPKKVIDLANKVRNDGLVQTPSNDDTAPNMDDGSVIAGTVKFVYGNDINQLDVLRNSKLYKALEFDIAKKTKELRLTHKLNAEMAGFSKLFELYNTDLFVKLITGIKKKINENKIADKGKTFEELVEEAKIAVGKGGPLIIDVVNSIPELLAFYDEIKTCSFEEVSNKSKVNKESLLAYKFNGLSSRYEAGTDRDRILKRLDLIYELLELYKTGKHNEFLRITKFNITSSEDKISLSKVMTKISVDDITIGKVIELAEESGLISKDDLFTNFIESRGHYLWSRLKIMPFQEYVNSIAYLREYVSVITQHKVKGSEYDNVLVLLDNGKWNQYNFDSLFGKGSVNENVQKRTKKLFYVAITRAMKNLIVYMPSNDSQIIQKAQDYFEPIDIIDVLSLVDE

SEQ ID NO: 71556 - protein, 585 aa, Streptococcus pneumoniae; identical to SEQ ID NO: 62976

SEQ ID NO: 71557 - protein, 512 aa, Streptococcus pneumoniae; identical to SEQ ID NO: 62977

SEQ ID NO: 71558 - protein, 695 aa, Streptococcus pneumoniae; identical to SEQ ID NO: 64780

SEQ ID NO: 71559 - protein, 605 aa, Streptococcus pneumoniae; identical to SEQ ID NO: 66879

SEQ ID NO: 71560 - protein, 689 aa, Streptococcus pneumoniae; identical to SEQ ID NO: 62612

SEQ ID NO: 71561 - protein, 461 aa, Streptococcus pneumoniae
MSDIRRYVENIILNNGDNHKFKTDLLKGTQDNKPVLLYRQITKLSTQIIDTNEYIRKALQMTYDFVFLDEFQDTTYAQYDLLKTCFLGSSCKLTAVGDDKQAIMRWAGAKPDIFPDYIRDFNPNEYQLLMNHRSVPKLVEFQKEVHQILNSNHSSIQTNNYPEFQEGEITLFEFENESLEAKLIANDIESKIQGGIRPSEICILAKQKVGIYSFELISILNSKGIKARIENEYQDILKDPTCNLLLDLISCSQGKRDPLIWENISNFYGNINGIDELTDELILAKSYKEIDNIVSDITYLISNFIPNEESMLKLIDCIIEKIDEKRIISNFSTYNGKSDLDIIVKNFSKLLYIEYSQTQGEWLDTVSSFKGENSIPIMTIHKSKGLEYEVVYFLGLEDSAFWSFNNQPEEDKSAFFVALSRAKSHLIFTYCKLRNNSPQNNRNINEIYSLLTQSNLVDVIN

SEQ ID NO: 71562 - protein, 695 aa, Streptococcus suis; identical to SEQ ID NO: 62538

SEQ ID NO: 71563 - protein, 605 aa, Streptococcus suis; identical to SEQ ID NO: 62705

SEQ ID NO: 71564 - protein, 609 aa, Streptococcus suis
MTIWDNIKKVAYTPDSELEPILGINLQIWIQYSEEDSYQNIQPLMMDLNPDNNYIILDFSYIVPISRLHDLNTEISNFSDDFSKFESFMKKSMSKFFEMQINSRGYNPDIQKLTEEKSDLLEMKDIHKLIKIRGIRANREVSNKENNHSLSKTSNLFYKSNNGDDIDNATKNLLQSAITEADEALTKAYSGDGEDDGVFTSIFERVKKFGGNDSESELEIHSSLSEKDILSNNTTLYYRHDDSLLPETYNGLGYLNLYGMIFEIETLMADIKNNPADINLVYIEEPESHKHPQLQYVFIKNIKGLLKEHDDELKASGYTSGIQTLITTHSSHIVSDCNFDDLIYFKHDNGTAISKAFNSLKEEYEDDKLGYRFVKQYLTLNSSELFFADKVICIEGDTERILLPTMMQKVDIATPIEQGSNIMPLLSQNISIIETGAHSQVFRKFFDFLGIKVLIITDIDPVNKNEKNRFIACSAVNATSTSNTSLKSFFNISGDGIFSTVTQKSFAEKITPDNRIRIAYQIPEDNNGYQPASFEDSFIGLNKEFIIKQKDGLIEYEALKNFDDDEIEDFYTFARNKVNKKSAFASSLLYFEDEENTWKVPKYISEGLL

SEQ ID NO: 71565 - protein, 597 aa, Streptococcus suis; identical to SEQ ID NO: 62965

SEQ ID NO: 71566 - protein, 689 aa, Streptococcus pneumoniae; identical to SEQ ID NO: 62612

SEQ ID NO: 71567 - protein, 605 aa, Streptococcus pneumoniae; identical to SEQ ID NO: 62613

SEQ ID NO: 71568 - protein, 677 aa, Streptococcus suis; identical to SEQ ID NO: 71480

SEQ ID NO: 71569 - protein, 641 aa, Streptococcus suis; identical to SEQ ID NO: 71555

SEQ ID NO: 71570 - protein, 695 aa, Streptococcus suis; identical to SEQ ID NO: 62538

SEQ ID NO: 71571 - protein, 468 aa, Streptococcus suis; identical to SEQ ID NO: 71485

SEQ ID NO: 71572 - protein, 695 aa, Streptococcus suis; identical to SEQ ID NO: 62538

SEQ ID NO: 71573 - protein, 419 aa, Streptococcus suis; identical to SEQ ID NO: 71535

SEQ ID NO: 71574 - protein, 687 aa, Staphylococcus aureus; identical to SEQ ID NO: 63306

SEQ ID NO: 71575 - protein, 582 aa, Staphylococcus aureus; identical to SEQ ID NO: 63307

SEQ ID NO: 71576 - protein, 585 aa, Streptococcus pneumoniae; identical to SEQ ID NO: 66870

SEQ ID NO: 71577 - protein, 512 aa, Streptococcus pneumoniae; identical to SEQ ID NO: 62977

SEQ ID NO: 71578 - protein, 689 aa, Streptococcus pneumoniae
MKLTKVIINNFRSFGESQIIELNNQTVLIGNNSSGKTTVLQALSKLFSDKQNDRIIKKSDFHLPKGSRPGENTRNLFIETIFEFDELDGTPYSQAIPSFFEHFTVSKDGAKPFLRIRLESSWEDDGTVEGSIDTQFYYISSDEDTIRDEDKHRAPRKDLDKIRVLYVPASRTPEKELGNASGSMLSRLVNSINWTEDEINEITDKIDELNNTFLSENGALTQINNEIQKSWELYHEDNRFSQAELIINSSEMAAALRQIALKFSPTTTEEAFTVSDLGDGLRSIFYFSLVDSILDIELEITKDREENPDNPRFKLIPPVLTILAIEEPENHIAPHHIGKLIKRFKQLGNNDNSQVILTSHSPAIVKRIDPEDLKYLRIENNDRVLQTIVSDIQLPPAIDESYKYIKGAIQAYPELYFAKLVVLGEGDSEELLLPKFFDLLGKEVDSSQISIVPLGGRHVNYFWKLLNALRIPHITLLDFDNERYGGGWGRIKYISQHLYELNTEFQEWFHTQRLDFNEIGSRGCESIGAQRLINWFNKLEEFNVYFSSPLDIDFLMLQHYKDNYLNTLSPIEGPVVSYNDSDGSSKKVKLSDLDCLDRLQLEGFNKPKEEAIRATLKDKSGHGDSFNEEEKELMIWYQYFFLGRGKPTTHMQFLSSISDDELTRNLPPVFEKIVNSAEELLGDIQHGKE

SEQ ID NO: 71579 - protein, 605 aa, Streptococcus pneumoniae; identical to SEQ ID NO: 62613

SEQ ID NO: 71580 - protein, 695 aa, Streptococcus suis; identical to SEQ ID NO: 62538

SEQ ID NO: 71581 - protein, 468 aa, Streptococcus suis; identical to SEQ ID NO: 71485

SEQ ID NO: 71582 - protein, 585 aa, Streptococcus pneumoniae; identical to SEQ ID NO: 62976

SEQ ID NO: 71583 - protein, 512 aa, Streptococcus pneumoniae; identical to SEQ ID NO: 62977

SEQ ID NO: 71584 - protein, 677 aa, Streptococcus suis; identical to SEQ ID NO: 71480

SEQ ID NO: 71585 - protein, 641 aa, Streptococcus suis; identical to SEQ ID NO: 71555

SEQ ID NO: 71586 - protein, 388 aa, Streptococcus suis
MKIKKINVQNYRLLKDFSLELKSELSLIVGKNNCGKTSVLSVLEKIINKSSSLTWEDINLYHRKVIFENIKKVAYTPDSELEPILGINLQIWIQYSEEDSYQNIQPLMMDLNPDNNYIILDFSYIVPISRLHDLNTEISNFSDDFSKFESFMKKSMSKFFEMQINSRGYNPDIQKLTEEKSDLLEMKDIHKLIKIRGIRANREVSNKENNHSLSKTSNLFYKSNNGDDIDNATKNLLQSAITEADEALTKAYSGDGEDDGVFTSIFERVKKFGGNDSESELEIHSSLSEKDILSNNTTLYYRHDDSLLPETYNGLGYLNLYGMIFEIETLMADIKNNPADINLVYIEEPESHTHPQLQYVFIKNIKGLLKEHDDELKASGYTSGIQVH

SEQ ID NO: 71587 - protein, 425 aa, Streptococcus suis
MQAIYDSGVGDLNSYNLAKIQKTQNRRNPKKVIDLANKVRNDGLVQTPSNDDTAPNMDDGSVIAGTVKFVYGNDINQLDVLRNSKLYKALEFDIAKKTKELRLTHKLNAEMAGFSKLFELYNTDLFVKLITGIKKKINENKIADKGKTFEELVEEAKIAVGKGGPLIIDVVNSIPELLAFYDEIKTCSFEEVSNKSKVNKESLLAYKFNGLSSRYEAGTDRDRILKRLDLIYELLELYKTGKHNEFLRITKFNITSSEDKISLSKVMTKISVDDITIGKVIELAEESGLISKDDLFTNFIESRGHYLWSRLKIMPFQEYVNSIAYLREYVSVITQHKVKGSEYDNVLVLLDNGKWNQYNFDSLFGKGSVNENVQKRTKKLFYVAITRAMKNLIVYMPSNDSQIIQKAQDYFEPIDIIDVLSLVDE

SEQ ID NO: 71588 - protein, 609 aa, Streptococcus suis; identical to SEQ ID NO: 71468

SEQ ID NO: 71589 - protein, 597 aa, Streptococcus suis; identical to SEQ ID NO: 62965

SEQ ID NO: 71590 - protein, 583 aa, Legionella pneumophila; identical to SEQ ID NO: 71510

SEQ ID NO: 71591 - protein, 582 aa, Legionella pneumophila; identical to SEQ ID NO: 71511

SEQ ID NO: 71592 - protein, 729 aa, Staphylococcus aureus; identical to SEQ ID NO: 62500

SEQ ID NO: 71593 - protein, 597 aa, Staphylococcus aureus; identical to SEQ ID NO: 62501

SEQ ID NO: 71594 - protein, 609 aa, Streptococcus suis; identical to SEQ ID NO: 71468

SEQ ID NO: 71595 - protein, 597 aa, Streptococcus suis; identical to SEQ ID NO: 62965

SEQ ID NO: 71596 - protein, 695 aa, Streptococcus suis; identical to SEQ ID NO: 62538

SEQ ID NO: 71597 - protein, 605 aa, Streptococcus suis; identical to SEQ ID NO: 62705

SEQ ID NO: 71598 - protein, 609 aa, Streptococcus suis; identical to SEQ ID NO: 71468

SEQ ID NO: 71599 - protein, 597 aa, Streptococcus suis; identical to SEQ ID NO: 62965

SEQ ID NO: 71600 - protein, 695 aa, Streptococcus suis; identical to SEQ ID NO: 62538

SEQ ID NO: 71601 - protein, 468 aa, Streptococcus suis; identical to SEQ ID NO: 71485

SEQ ID NO: 71602 - protein, 585 aa, Streptococcus pneumoniae; identical to SEQ ID NO: 62976

SEQ ID NO: 71603 - protein, 512 aa, Streptococcus pneumoniae; identical to SEQ ID NO: 62977

SEQ ID NO: 71604 - protein, 609 aa, Streptococcus suis; identical to SEQ ID NO: 71468

SEQ ID NO: 71605 - protein, 597 aa, Streptococcus suis; identical to SEQ ID NO: 62965

SEQ ID NO: 71606 - protein, 695 aa, Streptococcus suis; identical to SEQ ID NO: 62538

SEQ ID NO: 71607 - protein, 419 aa, Streptococcus suis; identical to SEQ ID NO: 71535

SEQ ID NO: 71608 - protein, 695 aa, Streptococcus suis; identical to SEQ ID NO: 62538

SEQ ID NO: 71609 - protein, 468 aa, Streptococcus suis; identical to SEQ ID NO: 71485

SEQ ID NO: 71610 - protein, 701 aa, Streptococcus suis
MRIDEIYIDGYRKFNKGTINLEHGNFAILAGANNSGKTSLIQLLDFVFNNSSRRSLTFNDFSIELKAFLDKKIKELNLSSEFDEDKFMNFIECIDKKIKIKLQLKLSYDLGEPIGLFANYLMDLEDDMHNFYFEYNYGINTPKIRKEFIEQGIKSSETLQEIIERNTESIYFYTDKDFDNKKNIEYKEFKKLFHFEYISADRELDDENLKNKKITTLILSSADSTWDNKFNDLKNKISDNLDDSKIDLSVQEETQKVLATLKDSLDNVSKNEIEALEAKFNFNEKNLLNLIKDSLLISYSHNSADFVFSLTEESQGLGVSNLIYISLQIDKFSRAIQENPHNSVNLFVIEEPEAHMHIQMQKVLVSYIETIFSKTDNVQGIITTHSTEIVKNVDVNDIKVIRPEKNFMNRIVDLHLFLVKNGDKEFYETFFKLNFADLIFSDAVIFYEGDAERMYFENLINRKQLKYDNLARQYISYCQCGGAYAHKYFPLLNELGMKACIFTDIDYGKEREDITEIEQDKSTNATLNSLLSDATGDIGSIYRQQKQIRRNSIEIFTQTSKDGFARTLEEAIFYKLIIPKSNYSEVNMRKYRGKLISGWSNVKRVRRIIESKKYNISMKNKYRGVFVRHSRNFWEELKDETNLKFSISNKKVFISIRDIVKSLNKTNFMYSIIMNNKVIEVLPNYIEEGLSWLDKKVISTE

SEQ ID NO: 71611 - protein, 659 aa, Streptococcus suis
MARQESNFYRVNAPAGSGKTYFISKTINDILGKKTFANILCITYTNRASEVMRERIISPNVEISTIHSFLNNFLKPFFRNEKVLNYYFEFYKKEIKTILDSKPELLERYKEGFDINGDVSEERIKENLKEIYYNERQNSFVLTGGLSHDDLLNFSFKLVERFPKIGFKLREMYSYIFIDEVQDTGADILRFFYNSTKNSSTKVYFLGDKMQEIYNKYDGSFEREYAEFDDSISKTFTKNYRSSKEIVDLLNNLYISSNKAEQTSARGNKGRLPRVVFTDDIEQYLSDYVGDYKEFYKLRTVNKKRFENINNSGKSAIEIYEKYQELYPNYGRISVMDVLTNSNYDENPDELMSFLNLLFQVLNEYNNKNYGEVIRILKSVRKSLPYGKLISVFDGNLLKIEFHKDKVSLREKMNSFVTLLESTQPLGVIIQELADKKIISSDFYNFIFLYERNGEFLYTDLFCYSIELFKLINEYNRNPMVSTQHGVKGEGHRKILFVAENSSKPGIEIYEFLNLFTSFYRRNIEFNFDAFQEFYYNFNHDIVLLEEKIGKKMSKIKASDRKEYFGDFQTIYNRYLDNEYFKFICLKESTFTFQEKTAIKDMKVIFNNNLVRSTLTAYKLFYVGCSRAEEELVVLIDSNNIENMEEFKNCFKHLGFTYD

SEQ ID NO: 71612 - protein, 747 aa, Streptococcus suis
MYLKSLSIKNYRKYGEEVQTINFAHSKWPEMLGVDDESKKINITEEYISKSSSLIVGKNNSGKSTIVKLLNTLQNTKSGSRNIFKYTDFNLKMLSDWYQENIESKSEEEIKKLDKFPFLEFQLVLGIDDENDLISSFEDILILGGIETVETGGNEEVAEVTINIKYEIADAQSFLEELVKLKTSYSEEVQQDAKLLNYKKEVQYRQFLGLLSSNYFILNCYPLGREEPAKEFSLSSLLKVETIEANTVKNDKTLSQAYNKIVSTYIKNNDIAVIDSLVGDINYRVKDMVDANIKDILQSAVSSIESTKNLQMNLHPDVTLEKIFANSIIYEYQEGNNNIPESQFGMGYTNLMVIIAKIVDYIELYSEKDINGSVNILCIEEPESFMHPQMQELFIKNISKTIATLLGKKQQLDTFQILITTHSTHILNSKIQSGNTLNNISYLGQTGVNNFIKNISDDAIVSGIDIDKKAYEYIKKYLRLEVSDIFFADAVILVEGVSEETYLRYEIDRHPILKNHHIKVYRIDGAYAHQFISLLELLNIKTIIFTDLDLKRTEDEMKVDIKDNDVPDIIPSNISDLAGKYAIGESSLTTNGTLQYFIKKELSDEKAKYSRINSKLIEMLTDKEELIVEYKNVSAHSQGKINGYYATSFEEAIILTNAVNNNDENLNKKSLIKLLQYVHPRMKYFGDIDETSEIADKSYMYQVKLSDGKSKFSTGVVFLSITDDTFNLKLPKYIESGLESLCDYFKE

SEQ ID NO: 71613 - protein, 672 aa, Streptococcus suis
MTHTISPENRELELGIQQKINECLDNFESFCFNAGAGAGKTYALQKSIEHILKTKGENLKLSNQKILCITYTNAAKDEILNRLGKNSSAVVSTIHEFLWGFIAIQQELLTEEHKNKIKGELEKIEQKINGNSLSSNVEQNEFRERICDEDFLKVFYSVPSSPAKTFKEVIKGFDEYFSPYLSSVKSFRDFIKDINKKYKLGITLKEIEDKKSKKVIYNPVQNRDKLENYVISHDTLLLYCENIITSQNLLKRLFSDRYPYVLVDEYQDTDEKVVNIIDSIREYSNSKQNFVVGFFGDSLQNIYGSGVGVLPNKEEYKSIEKIFNRRSSSQIVELIEKIRNDNFGQQSIYTDFNNGSYNFYVADDNFDLDIFLQENSLINNTACLLMKNDDISKARGFDELLSALKKFPRFSGGNYENVTNEFLQKNLQQMGWFLRDVLTFIDFIQKSSDPNSTVKEIVQFIASSKSTLTFGKMKQFIGRLREISLSTLTIGECINGIVNIQEPISGEEILRKIFSIDETSENVLLTIKNKAYSYFYYARDLEEDSESELSVIEEFFRLDVSQFIKWYKYIFDDLKDEGISYYTLHGSKGLEFDNVVVVLQDNFAKKKDYCKYFFENYDNRTDDVNRFNEIRNLLYVACSRAKINLHVVYIAEIQENILANIESIFGKIQNLI

SEQ ID NO: 71614 - protein, 689 aa, Streptococcus suis
MKLTKVIINNFRSFGESQIIELNNQTVLIGNNSSGKTTVLQALSKLFSDKQNDRIIKKSDFHLPKGSRPGENTRNLFIETIFEFDELDGTLYSLAIPSFFEHFTVSQDGAKPFLRIRLESSWEDDGTVEGSVDTQFYYISSDEDTIRDEDKHRAPRKDLDKIRVLYVPASRTPEKELGNASGSMLSRLVNSINWTENEINEITDKIDELNNTFLSENGALTQINNEIQKAWELYHEDNRFSQAELIINSSEMAAALRQIALKFSPTTTEEAFTVSDLGDGLRSIFYFSLVDSILDIELEITKDREENPDNPRFKLIPPVLTILAIEEPENHIAPHHIGKLIKRFKQLGNNDNSQVILTSHSPAIVKRIDPEDLRYLRIENNDRVLQTIVSDIQLPQAIDESYKYIKGAIQAYPELYFAKLVVLGEGDSEELLLPKFFDLLGKEVDSSQISIVPLGGRHVNYFWKLLNALRIPHITLLDFDNERYGGGWGRIKYISEYLYELNTEFREWFHTQGLDFSEIGEREFESIDAPRLNNWFNRLEEFSVYFSSPIDIDFLMLQHYKEHYLDMLSSKEGPVVSYADSGGNSKKVKLTDLDCIDKLQLEGLEKRIEEAKIATLKDKSGPGDSFTREEKELMIWYQYFFLGRGKPTTHMQFLSSISDDELNRNLPPVFEKMVRRAEELLGDIDYGEE

SEQ ID NO: 71615 - protein, 605 aa, Streptococcus suis
MVKSDDWFPKGVIKLEDAALEVVKDVTNCLVIAGPGAGKTELLAQKLDYLFSTNKCISPKKILALSFKTDAAANLKDRVKKRYGDEYASRFTSLTYSAFEKRILDQFRDVLPEDIRPSRDYLIEDWDTIKELLSINGINVNGRRMSDIRNFVENIILNDGNTHKLKKDLLKGTQDNKPVLLYRQITKLSTQIIATNEYIRKALQMTYDFVFLDEFQDTTHAQYNLLKTCFLGSSCKLTAVGDNKQAIMRWAGAKPDIFPDYIRDFNSNEYQLLMNHRSVPKLVEFQKEVYQILNSNHRSIQTNNYPEFQEGEITLFEFENESLEAELIANDIESKIQGGIRPSEICILAKQKVDDYSSKLITTLSSKGIKARIENEYQELLKDPTCNLLLDLISCSQGKRDPLIWENISNFYGNINGIAEFTDELILAKSYKEIDNIVSDITYLISNVIPNEESMLNLIDCIIEKIDEKRIISNFSIYNGKSDLDIIVKNFSKLLYKEYSQTQGEWLDIVSSFKGENSIPIMTIHKSKGLEYEAVYFLGLEDSAFWNFNNQPEEDKSAFFVALSRAKSYLIFTYCKLRNNRSQNNRNINEIYSLLIQSSLVDVVN

SEQ ID NO: 71616 - protein, 609 aa, Streptococcus suis; identical to SEQ ID NO: 71468

SEQ ID NO: 71617 - protein, 597 aa, Streptococcus suis; identical to SEQ ID NO: 62965

SEQ ID NO: 71618 - protein, 585 aa, Streptococcus pneumoniae; identical to SEQ ID NO: 62976

SEQ ID NO: 71619 - protein, 512 aa, Streptococcus pneumoniae; identical to SEQ ID NO: 62977

SEQ ID NO: 71620 - protein, 695 aa, Streptococcus suis; identical to SEQ ID NO: 62538

SEQ ID NO: 71621 - protein, 468 aa, Streptococcus suis; identical to SEQ ID NO: 71485

SEQ ID NO: 71622 - protein, 695 aa, Streptococcus suis; identical to SEQ ID NO: 62538

SEQ ID NO: 71623 - protein, 605 aa, Streptococcus suis; identical to SEQ ID NO: 62705

SEQ ID NO: 71624 - protein, 86 aa, Streptococcus suis
MEYSLVSQLNSKRLYISEIDLENDLAKVLSESERNGMNVSDFVNWLQSSKQYNMLEYIEGDLTPEIAHKIVKSEYFKVLAEFLDYE

SEQ ID NO: 71625 - protein, 513 aa, Streptococcus suis
MSDITTRDETIKKELLEYQGNILILANAGSGKTTFLAEKLKSDSKKLDNYQKLAAITFTRNATEEIKQKLVEIPENVVVSTIDSFLDNEIILPFLDQRYKVATSLQFSFQQEYKFNNFDIGLSQIMQNGIFATYDNPTARQGKNFKCEVALDILKNIVSASEYLKYKFNSLYIDEFQDCDQSMNDLFMYLKDELGIRLFIVGDDKQSIYQWRGASPRYIKNLWENENDLKKERFIGNFRSLPKIVDFSLALTPEVKIDSINETGSILYIETKQFALKEDVIRSLVDNGDINLDEKNYFLIGNNQHIEETVTQLGGIFPNEFDYVRKNPFIECTNGRFLQSLAQYYFLESFSEYDVLNNLFPDYNDDFRKGLLKKLKILRQNPERLLIEDIASYLGVPITQFGDKLESQILLEVLIDVENRILFDTSSLKNNLLMTTHNSKGLAADTVIIFVEYLIDRYKNTLKFEDHYVAITRAKSKIILIDNKTNYVSEINRLLCNNNGNFSFDNFIERRNL

SEQ ID NO: 71626 - protein, 585 aa, Streptococcus pneumoniae; identical to SEQ ID NO: 62976

SEQ ID NO: 71627 - protein, 512 aa, Streptococcus pneumoniae; identical to SEQ ID NO: 62977

SEQ ID NO: 71628 - protein, 695 aa, Streptococcus suis; identical to SEQ ID NO: 62538

SEQ ID NO: 71629 - protein, 468 aa, Streptococcus suis; identical to SEQ ID NO: 71485

SEQ ID NO: 71630 - protein, 689 aa, Streptococcus pneumoniae; identical to SEQ ID NO: 62612

SEQ ID NO: 71631 - protein, 605 aa, Streptococcus pneumoniae; identical to SEQ ID NO: 62613

SEQ ID NO: 71632 - protein, 609 aa, Streptococcus suis; identical to SEQ ID NO: 71468

SEQ ID NO: 71633 - protein, 597 aa, Streptococcus suis; identical to SEQ ID NO: 62965

SEQ ID NO: 71634 - protein, 701 aa, Streptococcus suis
MRIDEIYIDGYRKFNKGTINLEHGNFAILAGANNSGKTSLIQLLDFVFNNSSRRSLTFNDFSIELKAFLDKKIKELNLSSEFDEDKFMNFIECIDKKIKIKLQLKLSYDLGEPIGLFANYLMDLEDDMHNFYFEYNYGINTPKIRKEFIEQGIKSSETLQEIIERNTESIYFYTDKDFNNKKNIEYKEFKKLFHFEYISADRELDDENLKNKKITTLILSSADSTWDNKFNDLKNKISDNLDDSKIDLSVQEETQKVLATLKDSLDNVSKNEIEALEAKFNFNEKNLLNLIKDSLLISYSHNSADFVFSLTEESQGLGVSNLIYISLQIDKFSRAIQENPHNSVNLFVIEEPEAHMHIQMQKVLVSYIETIFSKTDNVQGIITTHSTEIVKNVDVNDIKVIRPEKNFMNRIVDLHLFLVKNGDKEFYETFFKLNFADLIFSDAVIFYEGDAERMYFENLINRKQLKYDNLARQYISYCQCGGAYAHKYFPLLNELGMKACIFTDIDYGKEREDITEIEQDKSTNATLNSLLSDATGDIGSIYRQQKQIRRNSIEIFTQTSKDGFARTLEEAIFYKLIIPKSNYSEVNMRKYRGKLISGWSNVKRVRRIIESKKYNISMKNKYRGVFVRHSRNFWEELKDETNLKFSISNKKVFISIRDIVKSLNKTNFMYSIIMNNKVIEVLPNYIEEGLSWLDKKVISTE

SEQ ID NO: 71635 - protein, 659 aa, Streptococcus suis; identical to SEQ ID NO: 71611

SEQ ID NO: 71636 - protein, 661 aa, Legionella pneumophila; identical to SEQ ID NO: 71542

SEQ ID NO: 71637 - protein, 618 aa, Legionella pneumophila; identical to SEQ ID NO: 71543

SEQ ID NO: 71638 - protein, 585 aa, Streptococcus pneumoniae; identical to SEQ ID NO: 66870

SEQ ID NO: 71639 - protein, 512 aa, Streptococcus pneumoniae; identical to SEQ ID NO: 62977

SEQ ID NO: 71640 - protein, 609 aa, Streptococcus suis; identical to SEQ ID NO: 71468

SEQ ID NO: 71641 - protein, 597 aa, Streptococcus suis; identical to SEQ ID NO: 62965

SEQ ID NO: 71642 - protein, 583 aa, Legionella pneumophila; identical to SEQ ID NO: 71510

SEQ ID NO: 71643 - protein, 582 aa, Legionella pneumophila; identical to SEQ ID NO: 71511

SEQ ID NO: 71644 - protein, 677 aa, Streptococcus suis; identical to SEQ ID NO: 71480

SEQ ID NO: 71645 - protein, 641 aa, Streptococcus suis; identical to SEQ ID NO: 71555

SEQ ID NO: 71646 - protein, 613 aa, Legionella pneumophila; identical to SEQ ID NO: 70982

SEQ ID NO: 71647 - protein, 603 aa, Legionella pneumophila; identical to SEQ ID NO: 70983

SEQ ID NO: 71648 - protein, 695 aa, Streptococcus suis
MKLTKVIINNFRSFGDSQVIGFNDQTVLIGNNSSGKTTVLQALSKLFSDKQNDRIIRKSDFHLPKGLRPGENSRTLFIETIFEFDELDGTAYSPAIPSFFEHFTVSQGDAKTFLRIRLESSWEDDGTVEGSIDTQIYYISSAEDIIKDEDKHRAPRKDLDKIRVLYVPASRTPEKELGNASGSMLSRLVNSINWTDDEIKEITNKIDELNNTFLSESGALTQINQEIQKSWKLYHEDNRFSQAELTINSSEMAGALRQIALKFSPTTTEEAFTVSDLGDGLRSIFYFSLVDSILDIELEITKDREENPDNPRFKLIPPILTILAIEEPENHIAPHHIGKLIKRFKQLGNNDNSQVILTSHSPAIVKRIDPEDLRYLRIENNDSVLQTIVSDIQLPQSIDESYKYIKGAIQAYPELYFAKLVVLGEGDSEELLLPKFFDLLGKEIDSSQISIVPLGGRHVNYFWKLLNSLKIPYITLLDFDNERYGGGWGRIKYAIQQLLEIGIERSDLVTMEDGRILNDEDIARISSNQISDIFSKPLSSWINHLEKFNVFFSAPLDIDFLMLQHYKDYYLGTLSTNEGPVVSYTDENNDKKKIRLTKMDRTNDYQLIGFKNRISEAIQATLKDKSGPGDSFTDEEKELMIWYQYFFLGRGKPTTHMQFLSSISDDELKRNLPPVFEKMVRRAEELLGDIDYGEE

SEQ ID NO: 71649 - protein, 605 aa, Streptococcus suis
MVKSDDWFPKGVIKLEDAALEVVKDVTNCLVIAGPGAGKTELLAQKLDYLFSTNKCVSPKKILALSFKTDAASNLKERVKKRYGDEYASRFTSLTYSAFEKRILDQFRDVLPEDIRPSRDYLIEDWDTIKELLSINGINVNGWRMSDIRNFVENIILNDGNTHKLKKDLLKGTQDNKPVLLYRQITKLSTQIIATNEYIRKALQMTYDFVFLDEFQDTTSAQYSLLKTCFLGSSCKLTAVGDNKQAIMRWAGAKPDIFPDYIRDFNSNEYQLLLNHRSVPKLVEFQKEVHQILNSNHSSIQTNNYPEFQEGEITLFEFENESLEAELIANDIESKIQEGIRPSEICILAKQKVDDYSSKLITTLSSKGIKARIENEYQELLKDPTCNLLLDLISCSQGKRDPLIWENISNFYGNINGIDEFTDELILAKSYKEIDNIVSDITYLISNFIPNEESMLNLIDCIIEKIDEKRIISNFSTYNGKSDLDIIVKNFSKLLYKEYSQTQGEWLDIVSNFKGENSIPIMTIHKSKGLEYEAVYFLGLEDSAFWNFNNQPEEDKSAFFVALSRAKSHLIFTYCKLRNNRAQNNRNINEIYSLLTQSNLVKVGN

SEQ ID NO: 71650 - protein, 609 aa, Streptococcus suis; identical to SEQ ID NO: 71468

SEQ ID NO: 71651 - protein, 597 aa, Streptococcus suis; identical to SEQ ID NO: 62965

SEQ ID NO: 71652 - protein, 677 aa, Streptococcus suis; identical to SEQ ID NO: 71480

SEQ ID NO: 71653 - protein, 641 aa, Streptococcus suis; identical to SEQ ID NO: 71555

SEQ ID NO: 71654 - protein, 677 aa, Streptococcus suis; identical to SEQ ID NO: 71480

SEQ ID NO: 71655 - protein, 641 aa, Streptococcus suis; identical to SEQ ID NO: 71555

SEQ ID NO: 71656 - protein, 695 aa, Streptococcus suis; identical to SEQ ID NO: 62538

SEQ ID NO: 71657 - protein, 605 aa, Streptococcus suis; identical to SEQ ID NO: 62705

SEQ ID NO: 71658 - protein, 503 aa, Streptococcus suis
MKLTKVIINNFRSFGDSQVIGFNDQTVLIGNNSSGKTTVLQALSKLFSDKQNDRIIRKSDFHLPKGLRPGENSRTLFIETIFEFDELDGTAYSPAIPSFFEHFTVSQGDAKTFLRIRLESSWEDDGTVEGSIDTQIYYISSAEDIIKDEDKHRAPRKDLDKIRVLYVPASRTPEKELGNASGSMLSRLVNSINWTDDEIKEITNKIDELNNTFLSESGALTQINQEIQKSWKLYHEDNRFSQAELTINSSEMAGALRQIALKFSPTTTEEAFTVSDLGDGLRSIFYFSLVDSILDIELEITKDREENPDNPRFKLIPPILTILAIEEPENHIAPHHIGKLIKRFKQLGNNDNSQVILTSHSPAIVKRIDPEDLRYLRIENNDSVLQTIVSDIQLPQSIDESYKYIKGAIQAYPELYFAKLVVLGEGDSEELLLPKFFDLLGKEIDSSQISIVPLGGRHVNYFWKLLNSLKIPYITLLDFDNERYGGWLGKNKICYPTVTRNRY

SEQ ID NO: 71659 - protein, 605 aa, Streptococcus suis; identical to SEQ ID NO: 62705

SEQ ID NO: 71660 - protein, 695 aa, Streptococcus suis; identical to SEQ ID NO: 62538

SEQ ID NO: 71661 - protein, 468 aa, Streptococcus suis; identical to SEQ ID NO: 71485

SEQ ID NO: 71662 - protein, 695 aa, Streptococcus suis; identical to SEQ ID NO: 62538

SEQ ID NO: 71663 - protein, 508 aa, Streptococcus suis; identical to SEQ ID NO: 71489

SEQ ID NO: 71664 - protein, 585 aa, Streptococcus pneumoniae; identical to SEQ ID NO: 66870

SEQ ID NO: 71665 - protein, 512 aa, Streptococcus pneumoniae; identical to SEQ ID NO: 62977

SEQ ID NO: 71666 - protein, 609 aa, Streptococcus suis; identical to SEQ ID NO: 71468

SEQ ID NO: 71667 - protein, 597 aa, Streptococcus suis; identical to SEQ ID NO: 62965

SEQ ID NO: 71668 - protein, 695 aa, Streptococcus suis; identical to SEQ ID NO: 62538

SEQ ID NO: 71669 - protein, 605 aa, Streptococcus suis; identical to SEQ ID NO: 62705

SEQ ID NO: 71670 - protein, 597 aa, Acinetobacter baumannii; identical to SEQ ID NO: 62720

SEQ ID NO: 71671 - protein, 593 aa, Acinetobacter baumannii; identical to SEQ ID NO: 62631

SEQ ID NO: 71672 - protein, 655 aa, Rhizobium sp.
MFIERLSLTNFRCFGPVATSVDLTSGLTTFVGVNGAGKTALMQALQRLFGVTGDQRRLRRQDFHVPSTELVALLQRNFVLEAIIAFPELDADGAGGAAIPEFFHQMAAEEAGKLKCRLRLEATWTDDGSLDGAIEQKYWAVRTFGAFTDADCTELKAADRARIQMIYVPATRDGASQVTAFLRGRLWRAINWSQGVRDTFTNAGAALNGAFAGEPAVDVIAAAVTRRWQEVYTAGTDTTPVFRPLDLRFEHFIRKVEVVFRPDEVGRERALDDLSDGQRSLFHLAMTAATLDVEAGIVADPAGAGFQAGGVPLPALTLIAIEEPENNLAPFYLSRIVRQIQDLTKSPQAQAVVSSHSPSILARVDPTQVRHFRLDPHDRTARIRPINLPVGEEEASKFIREAVRTYPELYFARFVVLGEGASEEVVLPRLAEAMGLDIDRSFVAVVPLGGRHVNHLWRLLTDLDIPYATLLDLDRGRSGGGWGRIKTACTQLLANNVTPQAIFGQHLNPQGPAANLAAFDALPIEDTANITNWMNWLRQFNVFFCTPLDLDYSMLKALPLAYQIIEPGRQGPSPAGEPRTAVLGDDGLPHLYAADQDVLMRWYRYLFLGRGKPSTHVRVLSAQDPAALAATAPEELRALLTSIVARLTPPPPAGA

SEQ ID NO: 71673 - protein, 627 aa, Rhizobium sp.
MRLIRPEDWRPSGINDLEPAAWNALRHVGSACVVAGPGAGKTEFLAQRADYLLETGLCRAPHRVLAISFKTDAANNLASRVRQRCPPEFANRFVSVTFDAFTKSLVDRFLNAILAEWRPTRPYEIAFPKRKTIEGFLTLARLGAPPEWQAEIAGYSAGDFEAKIVGGYRLPMGPIAPQNAAEFTIARWWSTQLPPGQPSSLTFVGINRLAEQLLRANPHIRRALVATYPFVFVDEFQDTTYAQYDFLHSAFSGGQTIITGVGDDKQRIMVFAGARQDAFQRLQADFGGARFPLLFNFRSSPDLVAIQHIVARALDPNTVPTVAQTARQVDGDVAQVWSSQTIAAEAAHLAQWIANDIATRGRAPRDYALLVKQKSDDYERELAGAFAVHGLRIRNESHSLGKTSLQDLLSDDLSRLAIAIFRLGATRRAPAAWQLVSSSVQVLRAIGQEDDARAATVEAELTAFLAALRTDMAATAPSQQSALDFATRVFDYLDLDAIARTYAEYGVGEQLEIILEAFCIHFFACVNGAVTWTACLDAFEGVGQVPMMTVHKSKGLEYDTIIFVGLDDRAWWAHTPGDPEGVAAFFVALSRAKQRAIFAFCYQRGNRNNVAELYQLLTDAGVPEIAI

SEQ ID NO: 71674 - protein, 729 aa, Staphylococcus aureus; identical to SEQ ID NO: 62500

SEQ ID NO: 71675 - protein, 597 aa, Staphylococcus aureus; identical to SEQ ID NO: 62501

SEQ ID NO: 71676 - DNA, 1998 bp, Pseudomonas aeruginosa PAO1
atgctggcgctgcgcatcttcctactatcacctacgcgcttgaatcttcgcgacgtcacaattgcaaattggaccaagattgatctactggggagcgagtgggaagccggtgcggagcccaccgtcgatctggattcgctgcttccctcgctggatgtctggcttgacgttccgctccgcgagatccagcacgtcgtcgatatcctaccaacgttagattggtccggcgggctgctgggggttcgactagcgtttcgaataaaaaatctcgacaaactcaagagcgaatatatcgcgcaacgaactgcggcgcgggacgcggctatcgttgggccgaacggtgagtcgatcaagattgcagtctggccacgcaaccttacagactttctggagcgtcggctgcgagcacatcttgaactcctagcctatccccttgacccggctgctgttgttccgccgggaagaagcggcctcgcgacgccgcaaaggctccccgccagcgcacttgcgttcgagcatccaccattcaaaaaactcatcaagattgacgaaatcgccgcgcagcgcgacttcgccgacgctagcagcagtgacggcggtgaagacaagggggaggcgaacaatcgtcggttcaaacgtcgcctctcagaccagttacgctcctattatgatcgccatctcgacccgacgaagacgccatcggacaaggactatgaagcgctcggagcaattcaagcggctgagcgcagttttgacgcgcgacttgaggaaggcttttccgctgcctttcaagagctagaggatctgggttatccaggcatgagtaatcccaagctcaagatctcgacccttcttcggggaacggatgggctcaagcatggatcgtccgtgcagtaccaggttgcagacccttcaggggacggcagcaacaccctccaactaccagaggactattcggggctcgggtatcagaacctgattgccatggtgttcatgttgatgggcttccgcgacgagtggatgcgcgtagagaaagccggcattctcgagggggccgacgtgtcacacgagatacagccactgcacctcgtgctagtagaggaacccgaagcccatcttcatgcacaggtccagcaggtcttcattaacaaggcctatacactactccgaaagcacgccgatctgggtgtcgcggaaaactattgcactcaactgatcgtcagtacgcactcgagtcacgtcgcgcacgaagctgacttcgccaatttacgctattttcggcgccggccggcggccagcatgggggagacgccgaccactacggtggccaatctgtcctacatcttcggtgatggggacgagacaaagcgcttcgtgaaacgctacctcaaggcgacccactgcgatctcttcttcgcagacggcgtcatcttcgtcgagggacaggcggagcgcatcctggtgcctcacttcatccgccatcattttccagagctgtcgcggcgctacgttacgttgctcgaactcggcggaagtcacgtgcacagcttccgcaatttagtcgacgcgctcggcatcgcgacgctgatcattggcgatctggatgccacaacggcggttaagattatcgataaaaatatgcgagaaacaactcgttggaagtcggctcgccccgagcagggcaaagctcagcaaaccgcaaactcagttctcaaagattggcaccccgggaaaaagcttattgatgaactcgtcgcgctaccgcccgatggacacatttcaacggctggcggcgactatgagctgtatgtcgcctatcaaaagccagtcaacgtgaagggtgcttccgaagacagcgacctcatcattccgcgaacctttgaggacgccttgatcctggagaatttggcagtcgctggaaagatcgaaggttcgatcacctcggccaaggttcgcggcattgtcgctcaggatctgtccggagatgaggggcggtag

SEQ ID NO: 71677 - DNA, 705 bp, Pseudomonas aeruginosa PAO1
gtgatggcgcagctgcgcgcgacctcgccgcttctccagcgtgcagctatcgctcggctcgcgcacacggatgatccgttattaccgattcgcgccgctgtagaagcactgcttaccctggatactgacggccaggaaaccactttcctcgccgtgttggaatgcgtcgcaaaacatcgtttattcgagattcctgatgcgctacgcccatttgttgcgaatggagctgaagaaaacgatgtcgagctggccggcgatgagagcgcaccgggcgaagaagacgcgccggaagagaggtctcctgcgagcttggaggcctggcgagcattcctggaaacaccgtacaggcagtcgatcccattcgcggaatacgtcagtgataaagggcccctcggtacacatcagggtgtgaaaggcctggagtttgaacgtgtcctggtgatcctcgacgatagcgatgcacgcggctttctgttttcttacgacaaattattcgaagcgacaccagcgacaggagctagtcgtaaaactcctgctgacacggctgaagagggcaccgtgcgcacgcgtcgcctgttatatgtgacctgcactcgtgcccagaaaagcttggcgctggtggcctacacgaaggatcccgaagcgctcattgcggcggcgctgcgcaacaactggttcagggcggaagaaatcgagcgactatga

SEQ ID NO: 71678 - DNA, 1683 bp, Xanthomonas axonopodis pv. citri str. 306
gtggggggattaccgttggactcggacgatatccatcggccgaagacaggatcgcctagcggaagtatcgttttcaagtacatattccgaggcttgtgctccgacgatgaggctgacttcatgagtgccctgaagcctgccaaagacgggcagatggaggcgcatatcaccatcagcttctccgaggcagacaagacagggcgactcagagcgaagcgctggtgtggagaccatgacgatgtcggcttgacagcggacatgatggagaatcttcgaggggtctatcttcaacccctacgcgacgcatctcaagcccttaggcccggccgcatgagccagctgtcgcgactgtttcagcttctcgttgatgacaatggcaagatcgagatcaatggggcactaaagctcctggatgatgagctcaaaaagaaggcgccaattgtgagcacccacaaggcgataaccacccggcactcggagatgctgggtccgcagctttctcagctgcttgagctcggggttagcgtcagtgattttcaacgcctggcttcgcgcctctctcttaccgttgatctgttcgagcttgagcagaacgggctcggattcaacaatctaatcttcatggcggtcgtgctcagcgagctgaccaagaacccacaagccagctatcgaggcctgatcattgaggagcccgaggcacatctacatccccaattgcaggctgtgctcttgggctactttgagaccatcaaggcagtggacaaggagaagcctgtccaactgttcgttaccagccactcacccaactttgccagcatcgccaatctcgacagtttgacttgcctagtcgacaccggcatcaaggtggagacgttctttccgcgagacatcaagtttgctgtcggaaagcgcgaaaagcttgagcgctatttggacgtaactcgggctgagctcttttttgcacgccgcgccatcctggttgaaggcgctgcggagttggttcttgtcagcgtgctcgcagagaagtgcggccacgatctacgcaagcatggtgtcagcctcatcagcgttgaaggcctcaacttcgactcgttcattccactgttcggagagaatgctctgaagattccggtctccgtgcttaccgatgcggacccaacgggtccgagcgaagaggatgaagaggcggggagtgacggtagcgtagtagcggacgaccttgcgtcgacagatgacgcctctggtggaaagaagaaggcggctcctgtctacccttcgattggtgacaaggtgcagctgtctgcaaacaccctgagtatgatcaagttcgaagattcatatctcaaggtcttccatgggctgaagacgcttgagtatgacttggccttatacgcctgcaaccgcaagatgatgcttgcggcgcttagcgagcttcacccgaagatatctgcaagcctggcgaagaaggtcgacgccgctacgggagagacagagaaggctcgcgtactattcagcggaatgttcgagaggaagaacggaaacgtccagaaggggcgctttgcacaagctttggcgcaccttatcgctaaagcgaaagccgaagatttcattgtccccgggtacatcaagtctgcagttgaacacgcttgccagcctggcccgaagaagggcgaggacgaatga

SEQ ID NO: 71679 - DNA, 1830 bp, Xanthomonas axonopodis pv. citri str. 306
ttgccagcctggcccgaagaagggcgaggacgaatgagcacggatactccttcattagaacagggtgcgatcatcacggcaccattgcagccgatgtcggtcatcgcttgtgcgggaagtggtaagacattcacggctgtacgaagactcgctcacatacgtcgatgcctcggtgatcaccggggccgggttgcgctcctgtccttctcgaacatcgcagtcgagaccttcaggcgcgagtaccaagcacttgccgtgggatcgctcaagatcccgtcccaccagcgcgttgagatcgacacactggacgggttcattacgacaaacattctgcgacctcacgcccatcggacaatgggatgtaccacgaccccgttcttgctatcaggaagcgagtcgttcctgctaggaaaggactatcgcttttgggtggaatcgccgagaaccggtaactacccggtgccccaagcgcatatccatcgcgttgttataggcccttcaggggctggaacggacttcttctaccagaactccggcatgctgacgagaatcaacaatggccccaaggctgccgcagccttgggaaaactgggggcttacacccacgagctggcgcgctactgggccgacctcaccctccgcgaacaacccgagatcctgcgcgtactcgcgcgtcgctatccccacatcctcattgatgaagcgcaggatatcgggatcctgcaccagttgatcattgaaaggctcagccaagcaggctctcaaatctccctcattggcgatcccaatcagggcatctacgagttcatgggtgccaccggctcgttcctgtccagctaccacagcaaacccggtgttgctccggcagccctgacacgcaactatcggtccgtaccggccgtactcgatctagccaatgcaatctcagcgcgtacggacgaaccggataggcacgcgccacttacgctccacggagcctacttcgttccgtacacgactaccagtacgcagaatgtcctggcggccttccaggcgacactgatgtctgctggcttggaccctggacgttccgccgtactctgccgtgcacgaaagtgggccaacgagctggccgggagtgagggtgcccctggtgttggaacgacgaagatgcttgcccaagcggcgatggtgcgcgatatccactctgactactcaacagcattcagactcgtggcaactgccatcataggtttgaccgacaacgcacccaagggcatcgttgctcgcctaactcagccagccaggtacccagaagaacgagcgcttcgtcgcgctgtttgggctttcaccagagattcggtagcaggtctgcctagtgcgtcgctacccgccgtaagcgattggcagccgacattgttgcaacgtgtcagggtcctgatgacgaatctgagcacggctcatggacttaatcacacctcgtccaagctcggcagtcggctctcaaagaagagtttatccagttcgccgctaatgagcccgccggacctaggtgcagatcaacccctgcggatcagaattagcaccgtgcaccaagtcaaaggcgaaagcctggatgccgtcctctacatggcaacgaaggcgcatgtatctgcactcttagacgggggttccactgaggatgggcgaattggatacgtggctgtgacccgagcaagggatctgctgtggctgggtgttccggcgacagctttgaagatccttcgtgccgatcttgaagcgaaaggcttcaaggacgcaaccgctaagattgcggcccctcctgccgggcatggcataggtaccccctga

SEQ ID NO: 71680 - DNA, 1842 bp, Methanosarcina acetivorans C2A
atgcatgtcaaaaactttagatgtattaaagagattaatttagaacttaactcgggattaaatgtaattattggtgccaataattctggaaaaacttctatactggactcattgagattagctctaggcattggtagttacagtagaagcatttatgtttcaaatgaggatttttttgtagatgaatttggacagaaagcccaaactattgagatagaccttactttttctgaactgactccagaggataggggagtcttcattgagatgttaaaagttaatggtgatggaaaccatgaattagagtttcacgttaggtataaaattgagaaaaaaaacggaattgaaaaaattcgggttagatattggggaggagaaaaagaggcaaatactattccaatagaagttatggaactatttcacatcgtatatttggaggcattaagagattctgagaattatctaaagcctaatagaggaaacaaattaggccaactgtttctaaaattagttccagacgaaactgcacaagaaaaacacgcccagcaaatatacgaaagtattactgcaaacgaagattggaatgaactaataacggatgcaagaaaaaagattaatgaacacttagaaaatacgactcttgagcatgatactcttagcatagatattgattttgctccagtggattttacgaagattgcagaaagattgaaaatttatatacctatcttaaaaaagataaaaagagaaatgatagaaaatatttttgaagaagaaggatgggaaaaatactttgaatatccacattcagacgaactgatattaaagaaagacataaaagacttattgaaaaatgaagcaaactctgaacttaaattcaagatttcaaaattagaaaagttcattcagaagtttgagatatatcaaaatggattaggatataacaatttgatatacatagcaactataataggcgatttgattgagagagtaaataggaaaagtgagaattacatcgcacttttaatcgaagaaccagaggcgcacctccatcctcaactacaaaatatattgtttaattattttaagaatatagaatcaaaaaatattcaaatttttctcacttcacattcgcctacaattacagctaaaactgatatcgatacagttattttaatggaaaatagttttaatgtagacattttgcctttaaaagatattgaatttgaagatgaaacagataaaaaatatttgcagcgatttcttgacgtcacaaaatcacagttattttttgcaaatggagtaatatttgtagaaggaatctcagaagctatgcttctccatattttttcaaaaattttgggtattgatttagagaaaaacggaattgaagttgtaaacatcggtggagtagcttttaagccttttgcgaaattatttaattcagaacatatggataaaaaaataaaagtaagagctgctatactgtcagatgatgatgaatcagacggagaagtatctagcagagcaaggaatctggatgaacttaatagtgaaaatttgaaggtatttttaggtaaaaaaacttttgagtatgaactatttctcttaaatgaagaccttttaacaaatttatataaaaagttacaccctcgctttaatcctcatgaaaatactgaaaaaaatgcagatgatttagtaaaaaagttaaaatcaaacaaggacaagggtgaattttctcaattcttaatgatggaactaatcgagaaagaagatgtaagaaataaattcagagttccagaatatatagaagaatgtgtaaaatgggtggttgggtattga

SEQ ID NO: 71681 - DNA, 1257 bp, Methanosarcina acetivorans C2A
gtgatgaagttgctggaaaagtatccagacattgcaaaagctattgtatacagatttcctatatttcttatagatgaagctcaagatacttctgatgtccaaatgaaaatttttgaacttttgttggaaaatggattagaaaggcttatgctaataggggatccaaatcaagcaatatacgaatggagaacagcgaatccggaagtatttacaagaaaagaaatagaatgggaaacgctaaatctttatgaaaattggagaagttcaaaggagatttgtgcttttacagacaaaatagtctcaactgattatgtttcaaccgcttgtaatgaagaaatcaaagattttaattttaaaccagaaatttggggatatgacgtaaataaatccctgaacttagagacaaatagactaattgaagaattcataagaatctgtataattaaaggcatttcaattagtaaagaaaaagtagcgatcttggttagaggtaaagatattttaaccgaaattagaaatcaaggtgattttgttagaaaggaaccttggaaagaacaaataagaaataatggcaaacaagagatggatgtaaatagaattcactataggaatataagcaaaagcaaatatctgtttgataagaaagattataaagagtcttttagattacttgaaaaaactattttcgcgataaaaaacgggaaagagtatgtttcaaatgatgagctaaaggagttcattgagcaaattgattttaagaaatggcgaataggattatttgatcttcttgcaaggttaccaagtactgatgtaagtctgaaagagtgggtggatcttgcaaacgaggttattaggggtgactgttttttcggcataagtgattttgaaattaaaattaagaaaggtactaacgaaataaaatttgggcaaatcttcgtagataaagaagtggaaactgagaattatactttaggaacagttcattcggtaaaaggaagaacttttgaagctgttctcttgattttaaaagaaaaagcttacagaaataaaaaatatgttgatcttataaacgaaaatataaatgagaatgaagaaaaacgaattatatatgttggtaccacaagacctcaaaaaattctagtaattgcagttccagaaagcgataaaaaggtatgggaatgcaagttttacggaaacaatggatgcaagcaaaaacaattggatctttctgccttcacatgtgcaaacctaagctga

SEQ ID NO: 71682 - DNA, 2070 bp, Methanosarcina acetivorans C2A
atgtatcagatttttactaaagaggatgttttaatgtatatttccaaaatcaggatgcaaaattttagatgtttctgtgacacatctgtcgaattttatgagggcttaaatgtattcatcggagaaaataactctggtaaaaccactgttttaaaggctctccaactcatttttgataattctgtatctaaaaaattaagtattgacgacttttataaaggaatatcttcttttgacgaacctcctcaaatcacaattactatttctatccaggaaactgaatctgaaaaaatagaagacaaagctgttgttgcaacttggctaactaaattaaactctccttgtgaagcaactcttacctacaagtattttcttccagaaactgatctagaggagtataaaaaagagttaaatgaaagagatcagtcacttataagtgaatgggatattttagaacgttttcttcaaaggtacgtgtcaagaatctatgccggaaatccaatttcaaaaaatagagtagaatctgaatatttagaaaaatttgattgtacatttttagatgcattaaggaacgttgagaattctatctacaatggaaagaactctttactcaaaaacgtgttgaactatttccttgactataacttaaagagtagcataaagaaactggaacaagatctagaagatacagattcgaaggcaaaattggatgagtgcttaacaaaattggagtgttgtaggaatgagtttagaggacaatcaaaggatttattggattcaataagaggtagattggatacaggacatatattgagtttagttgagagtactggagcatctgtgtgtggaaagcctgatattgagggggagttaagcgaatctgatatactttctacattaaagcttattataaagagtaactcggggatgcagattccaattttcaacaacgggttaggttataacaatttaatttatatttccttagtgttatcaaatttagaaattattacatctgatcattttggagaaaacgcaaaaatctttcccattttattaattgaagaacccgaagcacacttgcatcctgcacttcaatataatttcttaaggttcctaaaagaagaaatcaaaaataaaaacattagcagacagatttttgtaacaacccattcgactcacataaccgctgctgtagggttagattcaataatttgcatggaatctcacaaagatcatatattagcgcgatatcctagtctagttttttcagataaaccagatgacattgagtctaaaaaatatatcgaaagatacttggatgcaacaaaatcaaacatgcttttttcaaaaggagtcatttttgtagagggtcttgcagagcagttgcttgtaccgcggttagctgagtatagaagcttaccactagataaatgtcatattgctgtagtaggcgtaggtggttctacatttaaacatttcataaaactctttggtgggggtattgatgagaataataagaattacaccttatcaaaaagggtttcttgtattgtcgacgtggatcctcaaaagattcctattgaaggtagaaacagaagatggaaaaaatgttggccttttgaggttggacaaaatttagattcttatgagtacaaacctatttccagcgtaataactaatcttgaggaagctcttagtaaatctaacactgaaaatgtaaaaatcttttataataaaactcaaaaaggtaagacattagagtacgacttagcatttgaaaataaagattcacctttattagtttctggttccgtagaaattagtaaagatgtgagtgctcttattgagtcttctagcttaactcctgaggacaaatctaaggctatttttgctgctttttatcttgaatccgtagaagatactaagggatccatggcttttgaattagctaataacttaattaataattttaatctcagtgaaggatcgttggaatttaatttgcctttgcacataaaaaatgctatttcatgggtctgtaggggagtttgcaatgaaccacagtaa

SEQ ID NO: 71683 - DNA, 1839 bp, Methanosarcina acetivorans C2A
atgaaccacagtaaatctattttgatttcttcaggagatgttttagataattttgatcatcattttagagtcattgcgggcccaggtgcgggaaaaacttactggttgactaatcatgttaagaatgtagttaaacactctagcaggttaaatccagtgtcaaaagtagcatgtatcacgtataccaacattgctgcggaacaagttttaaataatctaggagaatgtgtcgataaagttgaagtctcaacaattcacagttttttttataaaaatataataaaaccttacgcatctcatttatatgacgagcttggaaatcaattaatagcagtagaaaaaattgatggacatgaagagcataatccctcttttaagaaaattgaatcttggattggagaatataaccccgatcttaagtttttaatctatcaagaaaacgggaaaaaaatttcttctgcattgagtcatttaacgtgggaagttgaatcttctggtaagtgttttcttgatgtaccaaaagaataccgattgccaaaaaaattaaaaaaatcatattttgactataaaaaattatactggcaagaaggacgaattcatcatgaagatgttctatacttttcttatagaattttatgtgagaatcccatcttattgatatttttgagtgcaaaattcccatatatttttttggatgaatttcaagatacaaatcccatccaaactatgattgttaaaatgttagctaaatcaggctctaccattggcgtaattggtgaccccgctcaatctatttactcttttcaaggtgcaaaaagagaagattttttggatttctatattcaggacattgcttattatgagatacaagacaatagaaggagtacatctaagattataagactcttaaaccatatgaggaaaaaaggtccagtacaacaagattgcataagaaatgaggaaggagaatgtgttcgtgtaattatataccaaaaaattgacgacgttttcgataacttaactcctgaatctgacttttgtgtcttaactttgaaaaattcatttgttactaaattgaaaagcacgtctcaagataattgcctagagatatgggataagttcaaaaatctagactacaaccgtcagatattttattatcatctttcagttgcaattgcatacgctcgtcaacataggtatgaaaatgcactaaatgagtttttacatgtatttagaccgaatcatgatggagaattaagagagcctttaaaaggacaaattccttctccacttttaagcagaagtattgctatatctgttctagaacatgtactggatcttgagccttttaatttaagtctatatcgtgtcaacgaatctcttttctcatttttgtcggacaatggcaataaatatggaatttttttgaaaaaaatagcaaaaggaaattttaaaaagttctcggaatctgttttgtttagtaaccttgttagtggtgttaagcttggagaggatttgggttatattagaacgatacataaagcaaagggtgcagagtttaagactgtttttgtctacttacatgatgagtctcatttaaactgtgttttgaatccagatcttgagaatgaagatgatttacatagaatattttacgttgctttcagtagagcaatggataacctgtttattctaactccgtctctttcacctgaaaattgggaatctttgaaggggctaaatttagagattgagatatatgagagtatagaagctgaacatgaatatatacctaaaatcaataaccgtgtgaatagatctttattagattttttctga

SEQ ID NO: 71684 - DNA, 2004 bp, Pseudomonas putida KT2440
gtgccacctcctcaccattaccctcgtgagtcagtgcgagcgatcaggaggaaccgaaaggaatctcatcacatgaagctttgcagtctacggatcagcggttttcagtcgtttggacaggacatcactgacataaccttcgacggcgttacatatctcctagggccaaacggtgccgggaagactgcgacgttgcaggcattggcacgcatgtttggtttcgagcctggccttcgtcgcctgcgtcgatcagatttccatgtccctttgaacgagcaggaggtacccgctcagcgctcgctctggattgaggcggacttcacattcgacgaaacgctcgatgatgccgaagacgacacagtgccgccgttcttcacgcaaatgaccttgcaaacggctgacggggttccccgtattcgatatcgcttggaaggtattctccaccctgatggcgaggtagaggagcgtttacattacgtgacccggatggacgagcatgggcaacctacgacgctcaagcccgtggcgaagcgtgaacgagacgagatacatgttcattacctacctgctcgccgggatcccgctgatcatattgcctttggtgccagcgcccttctaggccgcctccttcgagccgtcaactggagtgatgaccgggactcaatcaagcagctcactgagcaaatcactgagtgcttgtcggagaacgagtcaatcaagaccttgagcgctggcctcagcggcgcatggcaacgtcttcacaaaggcgatttcttcgcgaatccatcccttaccttcgcgaactctgaaattgaggcaatcctgcggcacctctcgatttccttcacgcctggccatggtgaaagcaacgtggactacgcgaggttgagcgatggtcagaaatcaatgctgtacctctcgctcgttcttacatccctgaccataggccgcgaggtcagatcaggacagaacacttcgttcgaccccctcaaactgaagcctgctgcctatacgattctggcagtcgaagaacccgagaacagcctgtctccccattacctggggcgtatcgtgagctctctgaaatcatccgtgggcgtggacgcgcaagcattgatcgccacgcaggccccgtcgatgctcagacgagttgagcctgaccagatcaggtatctgcgtctgaattcaaagcgagaaacggatgtgtcgaccatcgtgcttccagacaagcacagcgacgcctacaagttcgttcgagaagccgtccaggcatttcccgagctctacttcgcacgcttggtggtacttggtgagggggatagtgaagaaatcgtgctacctcgaatccttcaagctaagggagctcccgttgacgaatacgcagtggcgatcgctccactaggggggcgccatgtcaatcacttctggcggctgctgaacgcgctgggtacacctcatatgaccctgctcgacctagacgtggggcgccatcaaggtggctgggggcgtgtgaactatgttcgtactcagcttgatgtattcgaccctacacgtagcatcccggatcactggacgcgccactcttgggatgatgctgagcgacctattcgaacacaccactggttcgacaatggcaacgaaacccagagcagcttgttccaggagttagaaagcagagatgtatttttctcggatccactggatctggatttcgcgatgctcaaagcgtttcccgatgcttttggtgccgagctttcagcccctacaccgcacgatcacgtaaccgtccttggcaagagccatttcaacccggggcagtacaatgctgaggaacagcaactcttcgcggcctaccacaagctgttcaagctcagcagtaaacctgcagctcacctggatgccttgggcaatctcactgacacggagctgctggcctcactaccaccatccctcaatcggctagcagaccgggtcaaagccaagcttgaggaatctcccgagtga

SEQ ID NO: 71685 - DNA, 1659 bp, Pseudomonas putida KT2440
gtgatttctcatgatcaatgggctccctcgctcggagtacgcctggagaaaaatgcatggagcgttgttcgcgagcttgatcgatcaatcttgctcaccgcggggccaggtgccggcaagaccgaggtactggcccaacgtgccgactaccttctgcgaaccaacagctgccgcttccccaagcgcatccttgcggtgtcgttcaagacagatgccagccgcaacctgaaggaaaggattcagctccgctgtggctggaacttcgcatcacgcttcgacagtgtgacgttccatggctttgcgaaacggatcatcgacaagttcctccccatccttgcggaggaaggcttgagcccggattacgcaatcggcgcagagaccatcccaggcaagcagatcaccttcaagcagcttctgcccctcgccatcaagatcatccagcgcagcgaggttgcacggaacgcaatccgcaaaacctacgcgcatgtgttcctggacgagttccaggattgcaccgctgaccagtacgagctcatcaagctgctcttcctcggtaccggcatccacctcaccgcggtcggagatcgcaagcaaatgatcatggggtgggcgggagcgctggagggcatcttcaagacgtatgcgactgacttcgatgccctacccctccacctgtacgcaaatttcagatcgaagtccaatctgctacgtgttcagaatgaaatcatccgtgaaattgacccctcagcagtgacgccagcagaactgatctcgggtgatgagggagaggtcttggcagttcatttccagcactcttcacaagaagcgaccgtgcttgctgacagcattttccattggatcgaagcgggagttccaccacgggaaatcgcagtattgatgcctcgtcaggtagatgactatggctcggccctgatggcggagcttggcaaccggggaattgcttcaaggaacgacagcgatcttcaagacctgctgaaagagccggcagcccggcttgtaattgactacctcacctgcctgtatggaaaaggccagtctgatgcctgggcgcgcctgatggacttgttcaccccctatgaagaggccagtcgtgaccatcttcacagattgtttgaaacgacataccgagcacatgtgcgccaggtaaaggtcgctagcaaaactccctccccttatgaggactggtggaagctcacaagcagcttcatccgtgatgtaggttatccaatcctgactgcgctctcaggtgactacgagtcgaaactacgcttgcacgaagtcgttcgtgaggtcagagatcgagttggagcgctgctcagcagcgaaaagaccattcccggtgcccttgcccggctttcagacgatcaggccgtacgctttctcacaatccacaaaagcaaggggcttgagtttcacacggtcatcattctcggggtcgaaacccaagctttctggggcaagctcgccgaggagcgctgcgtctatttcgtgggtgtttcgcgggcaaaggaacgacttttgatcacaacagcagagtaccgacccaagcctaagaacgcgggccgctggacggaacaccgcaccccgcacggagagttcgtttcccaagtgacaaggcatctcacgggtcgcctatag

SEQ ID NO: 71686 - DNA, 1986 bp, Pseudomonas syringae pv. tomato str. DC3000
gtgctaatcgaatctgccgtcctatctggtttccgttgctttgcgccccgtcctatcagcgtaacaatctcgccaaagatcacgaccatcgtcggccccaacgcggcagggaaaactgcgcttctacacgcgttggcgaagctgtttggagtgactcgggcacaacgcaccgtacgtcgctcggactttcacttgggacctgatgacgatcccaccagtcttgaatcaaagcacctctacattgaggttttgatcgcccttcccgaactgattgatggaactgcaacgccagaaacgatcgcaccttcatttcggcatatgctaatcgagcgaccagacgatgctcccgtctgtcgtcttcggcttgacgctcagtgggaggacgatggaaccgtggaaggcgaggtttcgcaaaccctgcactgggtcgacacgctcgacgatgcaccgccagaagacaagtgccaccccgtctccgtagccgatcggggattaattcagttgtattacacaccggcaagcagagacgctgctgctcagacccgggcgactgccggagcattggcggctcgtttgttacgcgcgatcgagtggtcgtccgataccgaagaggcggttcatgacgctaccgaaaatcttgcctctgccttcgaggaagaagcggcaattgccgcaatcacagaagctctacagacgcggtggtcggcacttcatgatgacgtcgtcgacactaatccgcgcctgagtctggtaagtcgcaggttcgaggaggtcgtcaacaaaattgcagtcatgttcgagcagggacctgacggtcaggagcgcggtatcgaggcgctcagcgacggtcaacaatcgctcttttacttcgctctggctgcggccgtcttcgacctagagcgtgaggttgtagcgggatcaattgagggcttccgaagtgacgctctgcggatacctgcgttgacgatcttcgctttggaggaaccagagaaccacctttcgccatatttccttgctcgcatcatccgccaagtccgatcactcacaaccgatggcagcgcgcaagccattgtcaccagtcactcacccgcagtacttagccgcgtcaatccgacggaagttcgatactgtagatgcgaccccaaaacgcgcgtgtctacggtcaagcggattaagcttccagtcaacgacgtggaggctagcaagtttgtaaggggtgcgatgttggcctacccagagctttattttgcgcggtttgttttgctggttgagggagattcggaaagaattgttttaccgcgactcgcagaggcgctgaatttgctgatcgatccagcctttgtcgctattgtcccattgggtggacgtcatgttcagcatttttggcgcttgcttaaacatctgggtattcctcacgccacgctgttggatcttgacctagggcgcgatggaggcggttttggacgagtcaaaacggcgatcgaaaagctgatcgagttcggtgcaccgaaagccgaagtgctgagaattacaactggcatcttatccgatgccgacttagcgaacatgcataattggcctgattcggtcgatcatagcggcctcctgtcatggatcaacaacaacctaaaagctcatggagtgtatttctcctcaccgctggatttagatctagcaatgctggaagcattccctgccgcctatgcagccatcgtccccgagcgcgggggttctcgcatggccgctgacaaagccgccgaagtggtattgggaacggcaggtcccggattaaaagcctacacagggccctttgttggttatccccctcaattcccgagttaccgctaccactttctcactaacagtaagcctgcaacccaccttgcagcgttgactcatatcacaaaggcgcaactggtagcgcacatgccagttgtgcttgcttcagtgctcaaacacatttccgcgtcgttgaggcgggactga

SEQ ID NO: 71687 - DNA, 1905 bp, Pseudomonas syringae pv. tomato str. DC3000
atgaccttatcgtcgcgaagagtcagctcagaaaactggaaaccggtaggggtaaaatctcttgaaaagcacgcgtttgaggtggtttgttcacacgtaaaccgatccgtcatcgcaggccccggcgcgggcaagactgaattactcgcgcagcgtgccgcctatttgttacaaaccggtgcagcacctgcgcctagacgtattcttgcgatcagtttcaaaagagatgctgcctccaacctcgccagccgcgtgcgaaagcgctgtcaccctgaccatgccggtcgtttggactccatgacgtttgatgcgtttgcaaagagcctggtcgatcgcttcggccaatcactgcccgagcgttggcgaccccgacccgattacgaaatcacaagctactacgagcgcgactacaaagacttcctctttcaagacgttggcttgcctccaacgacaattggcacaagggcggatctacgcgcagtcggaccgaaaatattcgagcgcaactatgtactcggccaaccgctcccgattgatggatggctgtgtccgaccgtcggccaatgggctgcggatttattctggcgggcatccctccacggtggtgaaaaaagtgtcttgtctttccccatgataggcagactcgcagagcttttactgcgagttaattccatggcacgtgacgcgcttcggctgacttactctcatcttttcatggacgagttccaagacacgacgcaggtccaatacgatcttgtgagtaccattttccgaggtactgacaccgtattaaccgccgtcggtgataacaaacagcaaatcatgcgctgggctatggcaatggatgaccctttctccgaattcgacgcagatttttcggctaagcggacgtccctctacaacaactaccgctcctcgcctgacttggtacgtatccagcatattttggctcaggccttggacatcgcagcggttgaacccatttcacagacggcaggtacgattaacgaagaaagctgcacggttttcgacttccccagcccacatgcagaagcacacaatctagccgtatctgttgcgtcgaacatcgcgtcgggcaaactcacaccacgcgatttcgttctccttgttcgccagaaggcgggggaatatgccgaggtgctagagccggcttttacggctcagggactgagcttacgcaatgaggcagggctggtcggagcgattatgttgcaggagttgctcgtcgaggaggtctcggtacttctggtttcgctacttcgcctatccatgacactccgggcaggacgctactggtctgaatgccaaaaatggatggcatcgttgcggggagtcgagttcgacgatgaaatcgggcactccaaactcacacgcgaactggacgcctgcgcgatttggcttggtgcgaaccggtcaagtttaccgactacgctgaaagccgcacgatcactagttgatgaggtcatgggctttgttggacttggccacctcaagagccgacaccctgcttacgcacaaggagaatggctcgaaaaggtgctcgacgctgctgcaacacatctatttaactgtgcaatcaaatgtgcagattggccttcggcactcgacacctatgaaggcgtcaatgccattccactgatgaccattcacaaaagcaaagggctggagtatcacactgtcatctttgttggcttggacgacggagcatggtggagtttttccaacgatgagattgaagcaaccgccggattttttgtcgccttcacccgagccaagcagcgcgtgattttcacatattgtgccaaacgcgggggccgcacgaaaattgccacgttgtaccacctgctccagacagcaggcgttcagataacacaaatatcctga

SEQ ID NO: 71688 - DNA, 1737 bp, Lactobacillus johnsonii NCC 533
atgctcatatatagagtaaatattaaaggatttcgtaattatgaagatgtagacgtgtatttaaactctagttcgttgataattggatcaaataatgttggaaaaaccaattttatttatgccttgagactattgtttgatcgaaatctgagtgaaaatgatttagatttattagatagtgattttaatgcatattcacattccgataaggtagaaattactgcatatttaaaagatattaatgaggaatgtcttctaagtgaatttaaggggaatataaatgaaggaaaattgattctaaaatatactaaagaaaagaatcaagattacattctacaggctggtttttcagaagatacaatgcaggaattaaaatcccgaagttatctaagaagattaagtatgcagtatgtagatacaaatagaaatttatataaatacttgagaaaagagagacaaaatttattattgaattctcaagaattattatctgaggaacaaaaaaatgatgacaaaacaaaaacaatagaaatacagaaaaacttaaatagtataaatgaaaagataagttcgttaaactatatcaaaaatgcgcttgaaaatgtaaataaagaactatcctctttatcagttgaaaatgaagatcaaaatattcaatttgttgccggacataatgatgctgaaaagatgttgtcagatgtggctttgtcatattcaagtgaagaaggtcctttaacgttgggtggggatggacgaaacaatcaaatttatttagcaacatggagagctaggcaagaattaaaagctggaccagatcatgtaacattttatgctatcgaagaaccagaagctcatttacatcctcatcaacaaagaaaattggcacaatatttgactaagagtttgaagggacaggtaattgtaacgtcacattctccacagattgcagaaatatttaaggctgaaaatatagtaagattatattttcataacaagtatactgaggctgcttctggacctaatgatgcacaaattaagaattcttttaatgcatttaattatcgacttaatacattgtcggctgaagtatttttttcttacggtgtttttctagttgaaggagtttcagaagttatattctataaagcactagcaaaagaaaacggtattgatcttgatagattaaatatttctatattagctgtggaaggtattggttttaaaccttacattaatatttgtaacgccttgagcataccgtgggtattaagaacagataatgatatatttaagaatagagaagaaaaatactatgctggaattaaacgagcagtaggtattattaaagagtgtaagttagattataaaaaaccatcggaatgtgataaggcctgtgaaaaatggcattgtgatacaataccgaatgatattaagaacaataatgaagcaatgagaaaatcattaaagaatatagggatttatatggcgaaagtagacttagagaacgatatagctaatagcaatctaagtgaagcgctatatgcacattattgtatttttgacaaagacttaaaaagtttagtctctaagatgcagaaaagcaaagctaaaaatatgtttgactttgtagaagaaatgcatagtaagttacaaatgttaaatgatgatgaattaatcgaaccaattgatagtattgtaactaaagtaaagagtcaggtacagtataatggaaagtag

SEQ ID NO: 71689 - DNA, 1596 bp, Lactobacillus johnsonii NCC 533
atggaaagtagcgatgaacaaaaagaaataattaaagataagaataatttagttatcattgcaagacctggctcaggaaaaacgtatacaattgttgaaaaaatacaactaattttagaagatttgtataattaccaggggattattgcaatatcttttacaaataaagcaagtgaagagctaagaaaaagatgcattgataaaggattagcattaaataaatcatttttcggaaccattgataaattttgtttttccgaaataatagttcctttttgtagccatttaagtggtagaaatcaagaacttaagattaagagcttagaagagaatacccgactaagaaatttagataaaaagaactgtaaacatgtgggaaaaattatagaagaatatttgaagcaggacacggtttttctcgagtttttggttgaaacagccttgtatatcttaaaaagagtcccagatgctactaaatacttgcgcgcaagatatagagaaatatttatagatgaatatcaagattgtggtttgaatgaaaataaaatgtttttatatcttgtaaagcaagggattacaggaatggctgtcggtgatattcatcaggcaatttatgcattttctggaaaaaaatctgtctatctagaaaatttgatcaaaaatcctaattttcattattataaactttcagaaaatttcagatgtcatccaagtatatatcaatatgcattaagtttatatggaaattccgaagaagcagctgaggatgataaaagagtttttagagtaaaaattgatggaaatgaaaagaatattgctcaaaaaatcgaagaaaatattcccaatataaagcgccgatataatctaaagtcaactagtggatttgctattttatgtcgaaacaactcaacagttgatatattaaataaaagcctaacaattcctcataaagtatatacgaagacaaaattagatgatgatcaatcagacgtagctcacttatttgtgcaattgattagaggatattttgatgaaaatatatatgcatttgatattactgaacaatatttttcggaaagaaataaaaataataaatatcgaagtttgttgaacgcaacacaaaaattatttgcatgtcccattaataaattggctgaaaatatcactttattctcccatattgctcaaattatttatccagacatagggattgaagatatgtcagaagcattaagtagacttaaagatgtacttaatgataaacatgattatgagaactatataccaccaaaagaagacgaaattagtgtaatgaccattcataaatctaaaggattagaatttaacgtgatttttcagatggacatgtatgattatatctttccgaaagagagttggcagcaaggaggatcggcagaatcatggaaacaagatttaaatttgcattatgtcgcaattactagagcaaaagttgcatgttacttgatggaaggctcacaaagatataataggaaaggaatccaaaaatctgctaagccatctccattttatgatttacccggtttaaaaaagaggagattggacatgaagtggtaa

SEQ ID NO: 71690 - DNA, 2040 bp, Lactobacillus salivarius UCC118
atgtatttaaatgaagttaaagtgaaaaactatagaagtctaaaagatgtaaaattagtactagataaggaaaagggaacccctaatttgtcattaataattggtaaaaataatagtgggaagacttcattccttaagattatgaagaaaatgatagctgaagacaggaaattatcatgggatgattttaatattcaatatagaagagaaatacataatattttagtatctaaagaagaggggaacgaagaagatattgaaggaattatattggatttatatatggagtatgatgataatgacgacttgaataatatactaccattgatgttggacttaaacatggaaaacaatatagttgtgttagagtttaagtgtcaaccaattattcataaaattgaagagttacgaaatctagtcaatgatacagaattgaaagagtatcgtaaatttagtgattttatgcaagaaaatctaaataaatactttgagactaatgtttatgcacgaggatatgattatgaaagtcatgagttaacagatgctattgaaaaattagacagtagcatagtaaagaagataataaatattactggaatttctgctaaaagagatacttctaacaatgaaaaagaccgtacattatcccaaattgctgcaaaatattatgaaaatttttctgacgaggaggataagatacgtagcttaagggaagaagttagtaaaacagatggaattttaaataaggaatataataaactttttaaagacgtaatagacgactttagaaactttggtaattttcctaatggtgaagaggatgtaaatatccattccaaaatggatgtgagcaagctattaaaagggaatactgtatttagttatcaatatgataaagaagatttgccagaaaattataatggattgggatatatgaatttattaggtattattttcgaagtaaaagcatgttttcaaaagtttagacaagatagtaatagatcaaaaattaatattttatatatagaagagccggaagcacatactcatcctcagctccaatatgtttttataaaaaatattgggaaactaatagagaatgaaaaagataatttaaatgttcaaactataattacaacacattcctctcatatagtatcgcaatgtaaatttgaagatactaatttctttattaaagaaaaggacaatgctcaaataaagtcatatgcagaccttgaaaatttatataagaatgaaaaagaagtatttgaatttgtaaaaaaatatataactctaagtagagcagaaatattttttgctgataagttaattttaatagaaggagatacagaaagaatattattgcccactatgatggagagagtagacaataataaaaataatggaaaagatgtaccaccgttattatcacaaaatatttcggttttagtaataggaaatcatgcccatgtattatcgaaattaataagtttccttaatttaaaaactttagttataactgatatagatgctaaaggaataaaaggtgggaaaataaaaaatccagcagaagggaaaataactactaatggttctttgaaaaaattttttaaaggtaagagttttaaggacctcagaaatttagggaaagataagaaaatacttagtatagaagtgaaaacagaagatagaggtaaagaaaatgtggagtataaagaagatcctaatggaaatttgagaattgcatatcagattaaagaaaaaaatagtaaggaagaaagttaccaagcaacaagctttgaagattcgtttatacacttaaatttggaatttgtacagaaattagcagatgaacatggtagaaatgctggattgaaattggttaaaaaattaaaggaaacaaaatttacgccatacgaattatctagtaattgtatcgattcaaaaacaaattttgcaatagggatactcatgtatggtaataatagatggcaaatccctaaatatatagaggagggattagaatggatacgaaaatag

SEQ ID NO: 71691 - DNA, 1692 bp, Lactobacillus salivarius UCC118
atggatacgaaaatagagccagaagttcaaagagctattgaatgtataaggagtaaaacaaattttatcatggaaggtggagctggaagtgggaaaacaaggtcattaagtgaagttataggagaaattggtcagagatatccagatcgcagaattttatgtataacttatacgaataatgcagtcaatgagattataaacagggtaaatgtaaaaaatatagttgttagtacaatccataaatttctctggaatttaattaagcaatttcaagatgagataaaatgggcattaaatgaacttatcaaagaagaattaattaataagaatattcctgaaaattttgatgcaagaaaattagaaaaaataacttatgatgattatgtaagttggaatcggggagtaatttcacataatgaagtattaagcattgcaaaaaaattatttgatacaaaacctaaattaagtaaaattgtagaaggtatatacagttatatttttatagatgagtatcaagatacagataaaaatgttgttgaaatgtttctaaaaaatttaaataatgaaaaagtagtaataggtttttttggagattctatgcaagcgatttatgacagaggtataggtgatttaaatgattataatctagatagaatagaaaagaaaaagaattggcgtaatccaaatgctgtaataaaagtcggaaataatcttaggatagataagatgcaacaagaatctggaaaaacaaataacatagaaggaaaagcattatttttttatggtaagtcagaagagttgttaaagcagcatccacgttatcaggagttaaaattaagtgatgacgattttaaaagattacaattaactaaaaagagtatagctagtgcagtaggatttccaaatttatatgagttatataatatcgatatggttatcaacttaataaaagatgttaaggaaaaaaatgaaaatgtagaggataaaactcttaaggaagttgttaaaatttattgtaaaaaaagagatagttggaaatttaaaaaggaatcatataaaagatttgagcataagaattttaaagagttaattaatcaaaaaattaatagagattcattattatcttttgatgggaatctttctaattccaaccctaatagagatgaaattctaaaatatttagatagaatatatgaaattattactctatatgaagatggcaaaataggcgaattcttaacgaaaagtaaaatgaaaattggtagcatttcggataaaaacaaaataagtgagagtatgagaaaattattggatggagttaacgatgataacatctgtataggaagtgttgttgaacttgcaaaagaggaactggagataaagacaggagataattttgataagtttataaaagaggaaggacagtatttatgggaaagaataaaagaaataccatttaaagaatataaaaaatcaattgaatatttggaaaagaaaaccccatatgcaacgcaacatagtgtgaaaggtagtgaatatgataatgtgtttgtgatgttggagtctagttggcaaaagtatagctttgatggaatgatgttagaagatggggaagagccatcgaaaagagcattaaaacttttctatgtgtgttgtaccagagctcaaaaaaattggttgtataatatttag

SEQ ID NO: 71692 - DNA, 1971 bp, Ralstonia eutropha H16
atgcatattgaaagcgtcacgatagccggtttccgctgcttcggccctaacccgacagccatccccttcagccagggactcaccgcgatcgtggggccgaatgcatcaggtaagacagcggtgctgcaggctctgatgcgacttttcggggtgacgcgcgctcagcgcacgatcgtcccctccgattttcatgtcacaccgaccgagaccgaacgcctcaaatcgcggacgctgacaatcgatgtacgcctgagcctgccggaactggtggacggcagcgcgaccgctgccacggtcgcaccggtgtttcgccatgtccgcatcgagcgccccggcggcacgcctctatgccgcctgcggcttcgcgcacgctgggacgacgatggcactgcggaaggcgccgtcagtcaggacctgaactggattaacacagctgatgacgtcgtacgtgacgatcaagcctccccggtagccccgggagatcgcggtctgatccagctcttctacacaccggccagccgcgacgctggcactcagatccgagccacgacgggggcgttggcagctcgcctgctcagggccatcgaatggtcggcgggcactcaggcgaccgtccacgcggctacagagcagttgctgaatgcctttggaagcgagaacgccattcaggccatcagcgagtcgctatccaagcggtgggagaaattgcacgacggtgacatcgactgcaaccccgaactgagcctgatgagccggcggttcgaggaagtcgtcgcacgcatcggcgtgatgttcaagcgcggaccggccggagaagaccgtggactcgacgcgctgagcgacggccagcagtcactcttctacttcgcgctggcagccgcggtcttcgacgtggagcgggctgcagtggcgggccgcatccagggattcaggaccgaggaactcaacgtaccagccctcaccttgttcgcggtcgaggagcccgagaaccacctggcgccctactacctctcgcgtatcctgcagcagatccgcacgctcgtcgagacaggcgccggccaggccatcgtgtccagccattccccctcggtgctggggcgcgtcccgcccgacgacgtgcgctactgccggcgcaaccaagcgactggcgtgtcaacggtgctgcccatcccgatgccgaccagcgacgtcgaggccatcaagttcgtgcgcaacgccttccttgcattccccgaactgtactttgcgcgttttgtgctgttggttgagggcgattcagagcgtatcgtgctgccgcggctggcggaggcgctcaacctgctcgtcgacccgtcgttcgttgcgatcgtgcctctcggaggccgccacgttaatcatttctggcggctgctccatggcctgggcattccttacgcgaccctgctcgacctagatctgggtcgcgacggtggtggctatggccgactcaagaatgccttgcagcaaatgctcgcacttggcgttcctcgcgaaaaaattctggaactctccgatgggacgcatctcagcgataagcggcttgcagaaatggagacatttgacgcagccaatctcgaggggtggttgagctacctagagcgctcttcctcggtgttcttctcttggccacttgaccttgacctggcgatgctggccgccttccccgctgcatacgcagccacgatcgacggagctgggccgcgtatgactaacgaaagcgctgccgaggtagtgcttggaacggcaggtcccgggctgatcagttacaccggcaacgcgcagatgttccgtgaccacatggctgcataccgctaccacttcctcacgcacagcaagcctgccacacacctgcgcgcactcacgcacattgacttgcccgcattaaaagccggcatgcctgcgcctctccagcgtgtgctgctgcatatctctgctcaggtatcaaggttgtga

SEQ ID NO: 71693 - DNA, 1902 bp, Ralstonia eutropha H16
atgtcgttgccgccaagacgcgttccccccggcgactggcagccggtcggcgtgcacagcctggagccgaatgcattgaccgtcgttcggtcggccgagcaccgctcggtgcttgccggacccggcgccggcaagactgaactgctcgcgcaacgcgctgcgttcctcctacaaacaggcgcgtcccctgctccgcagcgtattctagccatcagcttcaagcgcgatgccgcacgaaacctcgcgcgccgtgtgcgtcagcgttgccaccccgaccatgcgagccgcttcgactcgctgaccttcgatgcgttcgccaagagcctcgtggatcggttcggacaggcactgccaaaccgttggcggcctacggctgactatggcattttgttccccaagcgggcgcattgggccgacttcctgcagcgtgcgtcccttgctctggacaaccccttcgggcaagcggccgtgcaaggactctcggtcaattacttcgagcgccgtcatgtgctcgctgagcgcttaccagaggccggctggacgtcgggaaatgcaggcctctgggctggacagcggttctgggacgaacagcttcgaggcgccacgcgcagccacctcaccttccccatgctcagccgactggcggaactgctggtccgcgttaatgcgtccgtacgtaacgccttggcgctgacctactctcatgtgttcatggatgagttccaggacacgactgaggcccagttcgacctagtccaaacaatcttcctgggcatgccaacgatcctgacagctgtgggtgacaacaagcagcagatcatgcgcttcgcactagcgatggacgatcctttcggcgcattcgaacagactttcggcgcgcaacgcatccctctgctcagcaactaccgctcctcgcccgagctcgtgcgcatccaacacgtactggcgcaagcgctcgacacgtctgccgcgcacccacagtcaaaagccgccgccagtatttccgatgcttgctgtgccatctgggacttctccagcgtgaacactgaagcccaggctcttgcccggtacgtcgcgtcgcagatgcgcgagcatcaattacagcccaacgacttcgtgctgttggtacggcagaaggcggaagactatgcccgggtcctagcccccgcctttgcgaccgcgggtatccccctgcgcaacgaagccgcctatgttggcgcccagatgctgcaagagctgctcaccgaacccctgtcggaactagtgctgttaatccttcgcttggcctgcgcccctcgaggcggattgacctggatcgaagcccagcacgcattagcaaacttgcggggcatcgcgcctaccgacgaccgtgcacgtcgcgtccttgctcaggatctagacgcctttgcgcgtcggtttatccagcagcatccccaaccgccggagactgaggcgatggcccgcgctgtcatccaggaggtggaggctttcctgggccgtgatgccctcatcgcggcccatacgccctatggacaaggggggtggctcgcggaagtcgagaatagtctggccttgcatctgcagtcgagcgccgtccaggcaactgactgggctgcgacactcgatgcctacgaaggaacaaaagccctaccgctcatgacgctgcacaagagcaaggggctggagtaccacaccgtgatcttcatcggcctcgacgactcggcatggtggagctttgtacaggacaccgtcgacgcgacggcaggtttcttcgtggcgttcacacgcgcgaagcaacgggtgatctttacctatacgccacagcgtggtgcacgagtcaacatcgcaccgctgtatggccttctggcgacggcaggcgtccaaaccatcactgtcgcttaa

SEQ ID NO: 71694 - DNA, 1827 bp, Mesorhizobium loti MAFF303099
atgcacatttccaagatcactattcggaacttccgatctttcgcacatctagacgttcgcatcgctgaaaacacgacgtgcataatcggcgagaataacactggcaaaacgaacctcttgcaggctttgaggctctgtctcgatgtcaatcttgcttcgagttatcgatctctactgccgtctgatatccactcggccgttgatttgtcccatccctcccaggtggtcattgcgatagagatcgaccaatgggccggtaaagtgaatgaggaggcgttggtcggggggtggcaagttgcgcccgaccgagcacgcctgatctaccgtttcaggccgaaactcaaagtccgtgacgaccttgccgacgagacaatcgagccgggcgacctgacaattgatgactatcagtgggagatcacaggcggtggtgatccaagacacgatgtcgcgactgtcgattgggatcaagatatcggcgttgggatacgattttctgacctccagtccttccttgtggtgcacctacccgcgcttcgtgatgttgagagtgaccttaggcaaacccgaagctcaccactcactcggcttatcgccgcctctgagattgatcacgcggagaaggacgctctggtacaggcgctccgagacgcgaaccaaacaatcgcggagtcgccgacgatcgaggccctggccgaagccattgatgcatcgttcacaaaggtcagcggcccagccttcgatatgggtgtcggcctagggctagccgaaccatcatttcaggcgatcgtcaaagcgcttcgcattctgctgaccaatgctgccgtcactgattttgatcccgcgcaaaacgggctgggcctcaataatattctctatgtctcaatctggattgagtacttcaacaagcgcctcgctcaggagaagtccgctggccagataattttgttcgaagaacccgaggcacatttgcacccgcaactgcaactggcgttgttcggagcactcaaagcgcttccattccagtcgatattgaccacgcacagcacgcacataacgtcccaagctgacctcagctcttttgttgtgctgaccaacgtcggcgtagccggaactgcgtctggagtgccggcagagaacaaagaccttgagcagaatgatatcgcagaccttgagcggttcttggatgccacaaagtcgaacatgctatttgctcgtaaggtcatcctggttgagggaccggccgagctctttctcattccacccctcgtcaaggaggtgatggagatagaccttgatcgtgaagggatcgcggtgatcccaatctatggcgttcacttcgacgtctacgccaagctgttcacagagggcagcttgccgaagcgatgtgccatagttgccgacggtgatttgaagccaagcgatgccattgaggaggatggggatgacgaacttccagacccccctgacctcgatgcccttgaaaacgactacgtgaaggtcttcaggtgcccaacaacgttcgagcgtgcgattacgatatccggtaccctcgaaatgttcgcaaaggcggcggacgagattggtgcaccgagagtagccacgcggctccgccgcggagtccgagcgctggagcaagaaggccttacagcggatcagcgccgcgaattattggacccgctgcgtgccgccgtgttgagtactgcaaaaaggttcgggaaagcgcgctttgcgcaactagcgtccagctatgtgtcagacgctacagctttgcctccctacataaagaatgccgtgaaatggctacgcgacgatgaagctgacgagtga

SEQ ID NO: 71695 - DNA, 1770 bp, Mesorhizobium loti MAFF303099
atgaagctgacgagtgagcagaaactggcagtggactgcccagatgatttgatgctgaccgcgtgtcccggcagcggaaaaacccgagtcatcatctcgaagctgagccgagctgtggatgcgatccgtggtacacctcgcgtcgctgggtgtattacctacacaaacacagccgtgcatgaaattgagacgcgcctgcggcagcactcccaggttggtgatgaagaaaactatgacgtttgcaccattcattctttctgcctaaaccacatttttcggccgttttgtcaccggatcgaaggatatgaaaatgggtttgaggtaatcacgcccgatagcgagcaattcaacgaatacgcttccgcagctagcgcggacttcaatcgctataatctcaccttccgagaatttgaggagttttcgctgcttcaaatcagcgaagcaggcgaacctttcggctcggttctcgacacaggaacgatccgaagggaggaagcgttgcgcttttggcagcggcttaggaacgacggccgcgccgacttctcactcattctttatcactcgctttcactgatgcgcgatcatccagagattgtcgaattcgtagcgtcccgtttttcacacattcttatagatgaattccaagacaccaccgaattgcagatcgcgattcttgggttgattgctgaacggggaagaacaaacttctttatggtcggcgatccaaaccagtccatcttcgggtttgcgggtgcgcggcctgacctcgccgatattttcgcagacgaagtcggagcccgaactgatttggtgctgacgggcaattttcgttcaagcgagccaattatcgaacacgccgagaggataatcgcccgcaatccaccgatgactgccgtcgggccagcgcgattgtttacagaggttccggagtacgagaacggcgccacagcattcgctgtcattaccgaaaccttcttgccacgacttcagggactcggaattcctatcggaaacgcagccatcctcgccccaagctggtttacgctttttcctcttggacgtcggctccgagaatttggggttagcattgtcggtcccggagcgcgaccgtatcggcgaaaccggctctttgcacctctcgccgagcaaatatgtgggcatttgatgaatccgactgccgagagcatcatcgggatcgaacgtagcctgttcaatctctttctcgatgccacaggcaagcgccgctacgacgtcttcacctacgaagggcgtgtccttgtattccgcctcgtggcggaagcgagcaggctgcaggaaattcacatgggggcgatggactggcttacacaagccgccaccgtatttagtggaattctcattgagctgagcttcttcggtacggctcaccgagacttgcttagcgattccgtcaccgagatggaggccgatatgcgaaatactcgggtagacgttgctaacctcactgttgacgagttgggcgtctattcaaacggtgacgcagccctcaaactctcgtcgttgcataactctaaagggcgtgaatacgacgctgttgcaatgattgatcttcatcagggcaagattcccaattaccgcgctaacacccctgaagcgatcgcggaggctcgaagacttttctatgtcggcatcacgcgtgcgcgccattatctactttactcgactgaccgtgccgaccggcggaacatccccacgcagtttctaagagcggatggcgtgcgaatggtctga

SEQ ID NO: 71696 - DNA, 2190 bp, Staphylococcus aureus subsp. aureus Mu50
atgtttatatctactcttcaaattcgaaattttagaaattatgaatccgaaatctttcgattcgataatgagacaaatactattataggtgagaatgattcagggaaaaccaatgctcttactgcattgagaatcttattagatgatagttattactatagtagtaaaacactaaaagaatcagatttttttcatggaattcaaaatgggtggcaagggcattggattattatctctgcgacatttgaaggaatcagcgaagaagaatttgacaatgagatttgtgcttccatttctttaaattctgaaagtcaaacaatcttagaagaattgatttcaaatgcagataaaggtgtaggtagtatttctctatttattagacctaacaaagctattagaaagcaattatttgatatttccactgaattagactctcatcaatttaacgaatttagaaattctattcgtctatccgactatgaattttactacacatctaaatcaaatctaaatttctgtatcaatgaaaattatgataaattggtaggaagactcaatgacaatatagctagtaatcctgaagaagacgatgaagctctgttgggctcaagaattgacatgtcagatattttcaagcatatttcggttgtttatgttgacgctcttcgagatgttcttagagaaatgaaaaacaatcgaaacccagtcaaaagaatcatggaaacaattgaatcaaaaatatcatcagataatgttgagtcattaaaaacaattatacagcaattaaatgagactattaccagtgttcctgaaattaggaaaattggcgaaaatattaatcggcaactaaatagcataattggttcagtgtattctcctaatcttcttctttcctcaactatgtcagatgatatgggttctttagcaaaatttctttcaatgaagccagaacaaaatatcgacttagacttactagggttaggacatctaaatatgatttatttagctttgaaaatagtcgaatttgaagcgtgtcgttcaagagaactacttaatattatgttgattgaagaaccagaagctcatattcatcatcatattcaaaaaactctgttcgaaggattaaatcttcaaaaaaactatactcagattctcatgaccacacattctgtacatttagctgaagtgtctgaaatatctcggatgaatgtattaaaatcgtttaatggcaaatctatcgttatgaatccagcaaataatctgaactcatttgctaaagaaaagttaaaaaagaacaatctaaatctaataaacgcagtagagagatatttagatgttaaaagaaatggattgcttttttctaaaggtgttatcttagttgaaggagatgctgaagaaatacttattcctcaaatagtaaaaaaattatttggtataaacttagacgaacttggaataggtttgattaatgttggtagtacttcgtttgaatatatcgctagcttgtttgacgatgatagaatacagagaaagtgtgctattgtaactgatttagatgaacaggcaatcccatcagaacatcgattgtataaaagcactgcacaagagaaaggtcaagcaagaaaagaaaaattatcctccctttttaatgaaaacaattgggttaattgtttttatgctaatacaacatttgaaattgagtttttagatgtgaataaagaaaatattctaacttatgtcagtccaattatagatgacgcattcaaagataaaaaaacaataactgcttataaagaagaaatacaaagtgaacaatatttagaaagaaatttagcgatgttaaaactagccaatcatgttggtaaggggtggtttgcaattgagttaggtgaaaaaattgactttttaatcaaaattcctaagtatattcttaatgctattgcttttgcatgtcaggaaatagtagatctctcaatttataaaaaaattctactccatacaatcgacttgtacgaggaaactacagaattgtcagctttatcagctagtttaaaaacaagtgatacagctgatttgaatatagcaataatttctttattagagtactttggtaaagatgaggatgttgtgtatctaatcaatcagatagaaaattacacaaaaatactttatgctgaggtttcaaaatga

SEQ ID NO: 71697 - DNA, 1794 bp, Staphylococcus aureus subsp. aureus Mu50
atgacaaatatcttcgaaaaaatcgtaaatgatttaaatttagaacaaaaagatgttgtggaaagtgaagataacctttatgtaaatgcatgtcctgggagtgggaaaacaagggtacttacaaggaaaattgcttaccaagcaattaaacacgatggatcactaaaaagaataattgctatcacatacactaatagagctgctgaagaaattaaggaacgcctaagtttacttagtatagatgatgatattaatatttgggtggggacaatacatcagttttgtcttgaatttattatttatccttttaaaatgaatctctcaagagtatcaaaaggatttacaattattgatgattatactcaaagagcttacgtcagccaaattaataatatgctgaatttaaatctcaaaacgtatgaactgaacaaaattgatttgtcactttctcatgattttaaaattaatgaagttcagtatactcaagtttctgaaatgtatcacactatgttggaaaaaaataaagaaattgattttgatatgattttactagtagcgtataaaattttaactgtaaacagtaacgttgcacgtaatattgctagtaatataagggcgatttatgtggatgaatttcaagatactagagaattacaatacaatgtaatagctaaattacttcaaaacaaccctcaaattcagtcaatgtttgttggagatattgaccaagcaatttatggatcattagatggtatagctaaatcagttgaagaactagaaatgctaactagtcacacttttcaatcaaagacgctacatggctgttacaggtctaatcagagattagtagacttctactctaattttcagagttgtccttacgagattgaaagcagagggaataataaaaacgaccgtggttttataagttatgattgcaaagttactaaggaggatttacccaacataataaaaaatataataaaggaaaagattgaaagcggcattcatgaaaaagatatttgtgtacttgctcctcaacactatcctctgttttcactgggtgagtatttaaagaaagaattaccgtattgcaattttgatgctataaatatatcaccaattaaggtaaataatcatagtttatttttcaagttagcaattttgtactttactgaatcaggtgaaaaggttcgaagaagaaagctaattgcaaacgatattttaattatattaaaaaatgaatttggaatagaagttaaagattattttattgacttagatttattacagctaataaacagtgtgaaaagaatgtatagtggagacgacaacggtgttgatttatacaaatttgttaccaaacatatatttgttaatcttaatattgacgagaaaaattacccgtctatttttaagcactatctattttttattaacgaagtagaagatcggataaaaaataattcattatctagtagtgtatctagttttaagaagatgtttaaatctcgagatggtatcacacttactacagcacataaagttaaaggaaatgagtatgatactgttatcgctattaatcttctaaacgggaaaattcctcattggaatgaaatttttaatgtttctgataaaggaattagttcagcgagaaaactactatacgtaatttgttcaagagcaaaaaataatttatttcttttctcagaggtgggttattttacgagtaaaggagacttgctttatcccactcaattattagataaaatagaatttgattataatatttaa

SEQ ID NO: 71698 - DNA, 990 bp, Klebsiella pneumoniae subsp. pneumoniae NTUH-K2044
gtgaaagattatggtcgtaatgagctgtgccaagttattatttcttcccattcatcttccattttaagccgaatcgagcccgagcaaatacgtcactttagattggatcagatatcaaaaagcacggtagtaagcgcattaacgctaccggaaaaagaagacgagctttctaagtttattaaagaggcagttaaatcataccctgaaatctatttttctaaactggtgatatttggcgaaggggatagtgaggaaattataattccaaaggtgcttgagctgtattcgacggagattgatagccattctatctctgttgttcctcttggtggacgtcatgtgaatcatttttggcgtctgttgaagtcattacagattccctttatcactttactggatttcgatatcgatagaaatggcggtgggttcggccgacttagatatgctattgagcaactgtctattttctgtggtggaaaatatggcaagacaaaagaaaaaatacctgcatgggatgacgaacgagatccaacaacatttaaacttccgcgtactgacggtgattcatataatgttgtggctgcgttggagaatcataatatttatttttcatcgcctctagatatcgattacgcaatgattgaagcattccctgatattttctgtgaaaaagatgtggtctatggggaaagagggcctaaaaatattgaacaggaagaacaggaagaacaaaaaaaagagctgataaatgcagtattgaaaaaaggcaactccggcgtccgttacgaattttctgttgattatctaaaatatttcctgtggtatcgctatcgctttttatccaataaaagtaagccagcctctcatgttagaatgttttctaaaattgaagaaaaatatacgccggatgaaatcagagaaaaattgcctccagtgttaattcgggtagctgacaagactgtatcgttattggcggaggttattgaatga

SEQ ID NO: 71699 - DNA, 1674 bp, Klebsiella pneumoniae subsp. pneumoniae NTUH-K2044
atgaccagtcaatggctaccttctgagggcattgagccgacacaggagttaatggatattatattctgtgatcaatccgtttctgtacttgctggcgcgggggcgggtaaaacggagcttttagctcagaaatctaattacttgttgcagacaggaaagtgcatgtggcctaaacgcatattatgcctttcatataaaaaagaggcgcaagagaatatcaaaacacgtgtgatgaaaagatgtggacaaagaggtgagcgctttgattcgtatactttcgatgctttttgcaagagtattgttgaccgttttaaagatgttttgcctgagaataaaagacccttaaacaattatgatttagtgtttaatcagaaagccaataatggcaaggataagatatcatttgatctaataaggagtttggcattagatattttaacaattagaacggatattgttgatcttttttcgttgacgtattcacatgtttttatcgatgagtttcaagatacccgctctgatcagtatgaaatgattaagcttctttttaaagacaaaggaacgcaattgctagcggtgggcgatatcaaccaaagcattatgttgtgggctggtgccaagaaaacagtgtttgaagattgtgaaaaagagtttaatacaaccaaaaaactattggtgcataattttagagctagtgaggaaattcaagaggtcttaagatgctttattcattttgtacaaaatgatgctaactttacgccaataatcaaaagtatcgataattgcactattcactattatgataatgagctttctgaagcggatgatattgctgataaaatcgcaagattcatcacttctggcattgaagaaaaagagatttgtgtactggttaaacagcagtcagagcaatatacggaaaaacttcgagataagttaacgactaaagggattagaaatcttgatttatcggaattgcaagatgtgttaaaagaaccattagggcaaatatttgctgcgctcttcaaggtttatacatcacgctcatcatcaagctataccgagctttgtgatttatatcttgagttgcatcgagtctcccgcggcgatgaaaaagaagatgcattaattaaagtattgtcggataacatagcggaaaataagaaaaatttaggcgatgagcctagccccgattcattgataacctgcattaaggatattataactctatttggtgtgaaaagaatggtggggcgatggaatcagtataagtccgctgattattgggataagatctggcgtaatcttgagcaacatttgcgctacacaatagacgcaacacactctcttaacgaggcggcgttgatgtttcaggcggaaaattccgttcaggtgatgaacgtgcataaatgcaagggactggaatataaagtggttatttttcttggcttagaggaccaagctttttgggcttataaaaacgcaaaatttgaaaatgattgcgctctctatgttgctttatccagggctaaagaaagtataataataacttctacaaaatgtagagagcatagaatcactaattggcgagatgatagaacctctacctataaaaatattggtcctatatattcgttcttaacgaaacattgcaagtttagggaggtgagataa

SEQ ID NO: 71700 - DNA, 2127 bp, Desulfitobacterium hafniense Y51
atgtgtgtcgaattaagagaaaataggaaaagccttctgatgaagaaatccacgtttattgctactattattgtagatacatatgcaaatcggcttgaagaggggagatatcgcatgtacatttcgagattgaaaattcagaactataggtgttttcaggatgttgagatagagtttagtgaaggtcttaatgtaattattggtgaaaacaattgcggcaagacaactatattgaaagctcttcagtgctttttcaaaggctcaaacacaggtagcgctatgggtattgacgattttaataagggtattactatcggagaaaagcctccagagataacatttgtattaacaattcaatcttcaaagcacgagaaagcacaagataaggcagttgtagctagctggttgacaaaactggtttcaccatgggaagctactttgacatataaattctttttaccagaagctgaccagaagagatatgtagcagatatcaggtgcatacaggatgatgacgaccggaacagtaaaaaatgggctgtacttgagaggcatctgaaaaaatatacaccgagaatctatggcggaaattatgaaagtaagaaccgagcagaccaagagtatttagataagttccattgtgaagtactcgatgcactccgagatgtagagagtaaaatgttcacagggcgaaatgctctcctcaagcaagtcttaaacttttttgttgactcggatttgattgaaaaggaagaaactgaaagagaaacgctacaagtacagcgtaatcagacgtttgagtcaacatcaagtagtcttgttgctaatatgattgaacgtgtatctgttagcaaaatctttgaacttacagagaagacgggtgctgctgttggtggacaacctacattaggtgggcaacttgatgagagtgatgtactttctgttctgaagctaatgatcaaaaaggaaacaggtattgaagtacctatcgtgaataacggtatggggtacaacaacctaatctacatatcattgttactctcgaagtttaaaatgctggtatcctctgaaatgggtgaaaacgcgaaagtatttcctatgctcttaattgaggagcctgaagctcatcttcatccggcattgcaatatagctttctgcgttttttgaaagatgaaatggataaacaagaaataagtcgtcaaattttcataactacacattcgacacacataacggctgcagtaggattagaccctattatttgtatgaatattaatgcactcgggaacgtggtgccagcttatccaggtaaagtattctccgacacagccgatgatcaagcttcaaagaaatatatcgctagatatctggatgcaacaaagtctactatgctattttcaaaggctgtattgttcggggaagggcttgcagaacaaattcttttaccgattttagctgagtacgatggtagaagtctcgacaggagtcacgtatcaatggttcgagttgatgccttaacattcaaacattttatcaagatctttggatcaggcattcaagaggatcgaaaaaagtatgctgtaagtagaagagttgcttgcattattgatagtgacccgtcaagaatattacatgaagctcctgctgggaagcaaagaagatggaaaaaatgttatccgttcgagcttgatgtagagccagaattatttgaatataaaggagtttctggtgcagtaactaacttgctggcttcgttgcaaggttgtgataatgtgaaagtttattataatagtacgggcaaaggaaagacattcgagtacgatttggcttttgagaatagtgaatctggtttaattttcgatggagcatttgagataactgacgttgatggtcttgatacctcaacatgggaggcagaagagaaagagaaggcaaaaaaagcagcgtcctacttatcctatgttgaagaaggaaagggggaaccagcattcaatcttgctgaaaagttaaaggagaacataaaagcccaacctcggctggtctttaatttaccaccacatattaaagacgctttaaagtgggtttgctacgatacagaagaggaggaagtgtgcgatgcacaatga

SEQ ID NO: 71701 - DNA, 1785 bp, Desulfitobacterium hafniense Y51
atgcacaatgaagaaattgaaattatcacttctgaccatctgttgtcggatgtcgatcacccttttaaagtgttcgcaggcccaggagcaggaaagacattttggctgattaacaatattaaaaatatacttaagaattcaacaagattgttctctgcttcaaagatttcttgcataacatatacaaatgttgcggttgaagaaattcaaacacgacttgatatgacaggggatcgtgttgaggtttctacaattcacagtttcttatacaattgtttggtcaagccttatgttaatctcctgaaatatgaagatggaagttaccttgtaaatatagagcaactagatggacatgatgatcatataccgagtgtaggtagaatcttaggaaataagcagatgagtgcaactgttttgaagaatagaatcgatcataaggaattacaaggcgttttgtcatcgcttgattggtatctaaatggggatgacttaattctacaaccccgaaatgattggcaaagaaaaaagtataaaaaattagtaactgcaggtttttttaatgcttataaagccatgttttgggacgatggcaccatccatcacgaagatgtattattcttttcgcatgagatattaaaaaaccatccattgatacgtgaatttatagccgcaaaatatccttacatccttattgatgaatttcaagatactcacccagtccaaacaaagatattaaagtggatatcggaagcaggggctattattggagtaattggagatccggcacaatcaatttttaaatttcaaggagcttcaagggctgactttcttgaattcaagctgcctgggcagaaaaactatgcgataaagtataatagaaggagcaccaggaacattgttaatattctaaatcatatcagaggaacggatgaagttgttcaggaatgctatagagaaatagatggtagcgaagtttgtattattgttaataaaagtgtcgaaggaataattgagaagtttaattcagaaagagcacgtttggggatgactggggatagctgcattgttactcgtcgaaatgattctgttgttaagctaaagaattgtgctggtaattgtaatatgtctatttggagtgacttttcagaagcagatagtaaacgacaacggtttattgaagtcattttatcagcacaagaatatgcagataattcgatgcatgaaacggcagttaaacaagttatgaaggtatttaagacggacaaggagggggcactaaaagatccatttacagcgtgttcttttgaaattgataatctatccaaaagaagtatggcggtttcattgttggaatacttaacaagtaatagggatgagaatatgacaaaaaatgttcttgcattctacaatgatttaatcggcttctttaacggaatcggagttgccctaaaaagggtcggtgctggaggctttaagacgtttgcacaggctgccaatgtgaatgagttggttctcagcctaaagttaggagaagaaaagtatagcaacattcgtactattcataagtcaaagggagctgaatttcaatctatccttgtgtattttgaggacaataaggatattcaacatttgctcaaccctgatgcaaagcacgaagaagatgactgcagactatattacgtcgcattgagccgtgctgaagattatttatgtattgctacagacgagttatctcaggaaataattgatgctttagcgaaactgaatttgaagatgattggataa

SEQ ID NO: 71702 - DNA, 2190 bp, Staphylococcus aureus subsp. aureus Mu3; identical to SEQ ID NO: 71696

SEQ ID NO: 71703 - DNA, 1794 bp, Staphylococcus aureus subsp. aureus Mu3; identical to SEQ ID NO: 71697

SEQ ID NO: 71704 - DNA, 2091 bp, Lactobacillus rhamnosus GG
gtgtttctaaaaactgttaaactgtatgattttcgaaaatttgtttctcaggtgaatggggaacctggattgatagtaaaatttcatccgggcttgaatatcattgtcggtgaaaatgattcagggaaaactgcagttatcgatgcaattaaagtgttgcttggaacagttagcgatgatcgaaccagtattcaagacgaggatttctattttgacgggaccgagttttcaaatgattttaagattgaggctgtattttgtagtctcaacaagtacgaggctggaacttttctagagtggctgtcgtttgacgataataatgaatatgagttacatgtaaaactaacagttgagcgcaaaacgagtgaagctggacgtcaatatttagatcgaaatctagttgcaggagatgaaggtgcagaatcttcgttagcaagtggggcacgagtatacttacgtgttacatacttaaaagctctgagaaatgcaacagatgaattaactcctggctttcgctcacatctgccacaattacttgcagcacactcggagtttcgaaatcacccagaacataaattaaaacttgtccaagcgttggaggaagccaacgcaataatagagggatatctctcagatggctttccaagtgaatcgaatccacctaaagataacgatcatctttctgataataatttggaaaaacaatcaattaataaagaacttcattcggtattgaggcagttatttgatagtcaagatcaggataaaagtgacacgcgctttcaactaacacaagttacacttgatcaaatattcaaacagctaagtttaagttcagaaagcgtcaatttgggattggggaacttgaacctgttgtacatttcgaccgagttagcgctgctaaaggatcattcaagttcagtggtttatggtccaaacattatgcttatagaggaattagaggcgcacttgcacgtgcaggctcagatacgactaattaaatacatcgagcgctatattcttagcacagaggataattcatctcagcagtttatattgacttcacatagtgttgcactgaccgcatcgatagatcaaagatcgctgatatatatgaacgctaataaagcctattcgatggcacctgaggacaccatgcttgaggaagctgattatgattttttgaatcgatttttagatgcaacaaagagtaacctattctttgcaaaaggaattattttggtggagggatatgcggaaaatattttattaccagccctggcagatttaataaatttaccgttacatcgttctggtatctcaattgtaaacgttggcgggacaagctttaatcaatatattaaactgttttctcaaaaagaaaaatcagaaaaaattggtatccctatctctataattacagattcagatattaatccgactgtgtatggtatcgattcagagagcgctgaaaaaatccaggagttgattagtggccctagcgatttgaatgttgacttgttcggagaggagtatgcgacttttgctgaattagtagctgcttttaaactaagatttgaaaatactaaaattaagaatttaattattcaagtaaaaaaattccgatctgattctgactgggccagtaagacagcagaaaggcaagagtgtctcaatcaaaaatacgaagaatttagttccaatagtaaagtattcatgtcgccattatggactttggagtacagtcttttgcgtagctctttgcgtcatcttacgattcaagcgatagctgaaacacaattcgttagagaaaatcatcgggaaaaacttattaaaaaatttgaagaagattataaaacaagtccgaataaggctgcatacaatgcgtatgcagccttgaacaaaggctcggtttcaaaaacacaggttagtgaacaattagcaaaactaattatgggtcttagtcaagatgaaaaggaagagctgaaaaataaaattattggcgatacaacacattcacaaaatgaagaatgcaagtatttaattaatgcgattaagtttgcaagtgggcaggaggttgaacaagattga

SEQ ID NO: 71705 - DNA, 1788 bp, Lactobacillus rhamnosus GG
ttgaacttgatgcaaattgaaagcatattgttgcacggtgcgcattttacagcggaacagcgagaagttattcaagcaataggacgaattgacgtcgtagctggacctggatcaggtaaaacaaccgtattagcagcgaaggtgttaaggttattgaccactcgcaactacgaagataaaggcatctgctgtattacacataccaatgttgctgtaaaagagattttagcacggttgaagcttgctggtgtggatgaaattgaatatccaaattttgtaggaactattcaaagtttcatggataaatttttaggtaaaactgcatttgccacggtcctacccggtgtgacgcttaagcttttagatgatgaaaagttctatgaaaagtatgataaaaattttaggagaattgttaaggactatcgttcagattggaacgtacctaagccgtccaaaaatgggtgcaagctagtaattttagatgacggatcattttattacactaacagacaccagaatcagcgttgtcaatatgccattaatcgtgcatgcgaatggctgttaagggatggctatgtttcatattctgatctcaaatcattgtcttattggtatctaagtaaacatagagacgagttgagcgtggcatttgagaaacgattttcatacttaatgatcgatgaagctcaagataccgattggattcagtttgccattataaatggtctggctaatggcaaacagttgaatgtacaaagatttggagatccgtatcaagcattatatactatctatggatccgagacagaggactcttggaacccgagacccgataacgaattctaccagactaaagaaatctctgaaactacaaggtttggcagtttaattgctgctgtagttaaacatgtttgtgttcaggaatatgaacaattccattcgaatcaagaactaaatttctttccgaagtattttatgacatatgaaactggagacgaactcaaggaaaagcatactcggctgatcgaagacgctgccagttcaaatccaaattttcgtatattgcagaaaccagatgctattgtcggaataatgcacagtgacattataaaagttgaacccaaatattccaaagaaggttcagagcaacgagctcatgaaagaagtgtcagtgaaatttatgcattggttatcaaattattggccaatgcgaatggcgtttcttttatggaagaatcagtactaatccgtaataatcatgatagcaaccttgaattagcagatgtcatccagaaactcgcaaaacaaaatatttcattgaacgaggtacaatatcatttgtacagtctaattggttcagaaactatttcagaagcttatttgcaaagagaatgcaagcatctgcttcaagacgttagcaacctagaaggtgaacctgaaagaatgaatttatcgacagtccaccgagaatttgcaacaattcacggagttaaaggtgaaacacatcgatcgacactgcttttactaacttcatgtgtacacatgaagtttaatgaagaagacaaaatcaataagttcttcaaaactatctttccttatttactaggagaccgaccagatttttcatcggatccagaaatagaacagttacagcgggattgtcttaaactagcatatgtagcattaagtcgtccaaagtacttattagcagttgcaattcccagtcaagatcttgctgatgaaaaaaaaacgagcttattgacacacggttgggtagaggcaaaatag

SEQ ID NO: 71706 - DNA, 2247 bp, Colwellia psychrerythraea 34H
atgaagattagctttattgatatacaaaatttcagaaagttacaaagctgtagaattaacttatcagataaagaaactcttcttgtcggggctaataacagtggtaaaacatcagcaacggatgtattgattacatttttagaccagaaagttaaaagacctttttcggtaactgattttacacttagcaattggaaacccctcaatgaatatgcaatgtcatggactaaagatattgacagtattcaaggcacttctatagaagaatggcaaaagttgtgcccatctattgatatctggcttgatgctagtattaatgaggtagaaaaggtagcgcatctaatacctacactaaaatggagtggtgaaccgttgggtgtgcgtttagttttacagcctaaaaatttagatgagctaaaagctcattttgtcagtgagtatacagcagcaaataatattaagagtatttcccctaagggtacactgtcactctggccaagagatattaaggattatttaagtaagggaaaattaaatactcaatttgaagttaaagcctacattttagaccctgagaaaagtaattcgccacaaaaactaagaaaagaacagtcttcaatggaattctacccatttgatggaatatttaaagttgatgtcatagaagcgcaaagggggttttccgatcctaattcgtcggaaatcaaacaaagtaatggtggtttatcaggacaattaaaccaatattacaatcgtcatttaaatcctacagatttgccagatgtagctgatttagaagccttagaaacaatagataatgccaaagaactatttgatatcaggctaaacaaatcctttaaagaagctttaggtgaaataaaaaccttgggatatccaggatttaatgatccagatattaagctttcgagtcgaattaaccccattgatagtttagatcatgatgcagctattatttttgatactcaaaaacgtggctttactggtttagataacttttctctacctgaaaaatataatggcttagggtataaaaaccttatttttattgtatttaaattaatttcatttagagatcaatggcttcgaaaaggaaaagcccaaaaaagacgaaatgcagacgatattgcaatagagcctattcatttagtacttatagaagaaccagaagcgcatttacatgcacaagtacaacaagtttttatacgtaaagcatatgacgttttacgtttggacgttagtaataaattaactactcaaatgattgttagcagccattcaagctatatcgcgcatgaagcgggatttgagaaattaagatactttaaaagaaagcctgcactaggtttagatcaagtagctactgctgaagttgttgacttatcaactgtatttaaaagtaattccaataaaacagatgatgtaactgtcacagcaaaatttgtagctagatatttaaaaacaattcattgtgatttgttttttgcaaatggcatcattatggttgaaggggcggcagaacgaatgttgatcccacactttattcgaacacactataatgattcattaaatcaaaattacatttccatacttgaagtcggtggagctcatgcgcaaaggcttagacctctgattgatgctttatcattacctactctagttatcaccgatactgatgctaccaaatcaaaagatagcaatgaaaaaattagacctgaaaaaggcaaaaattacggttttggtagcgacacattgaaggagtggtttgatttaaaatccaaaactttagatgaagtagtagagcttgatgaaaagcataaagttcaaggtatggctagagcagcttatcagtgtggtattgctgttaattatggagaaggtgctaaagtagctgaagtaataccttatacatttgaagatgctctcgtgctctctaatattgagttgtttaaaagtttatcaaattcaacaggtatggtgaaaaaaatgcacctagcattgggtaaaccaaccttagatgaatgctgtgatcagctgtacacagagctgaaaggaattaaagctcaaatggcattggatttactttttgatgttgaacctaaagaattatgtatccctgaatacattaaagaaggttttgaatggcttgaaaaagaactgaaaaacaatgcgctagatttcatcgaggctaaagttaacactgctgtagaagataaggcagtaggttga

SEQ ID NO: 71707 - DNA, 1869 bp, Colwellia psychrerythraea 34H
atgagaaatccaaatattgaattagttggtgtcgataaagaaatttatagttatcttaatttatataatccaaagagttttttgttgtttgctggagctggctcagggaaaactcgaacattagttaatgtattacaagaaattaaaaataataatttacaaactttaattgaaaatggccaaaaagttgcagttattacatatacaaatgctgcatcaaacgaaatacaacatcgccttgagtatgaccccatatttacagtatcaacaatacatagttttatctgggaattaataaagccgttcacttctgatattaaagattttattaaagttaaattaagaagtgatatagatgttttaacaactaaaattagtaaagctagggataagaatggtaaaacagcattagcgaatgcacgtagcctaaagtccaaacaaaagcggttagacgggttagcagaggtggagagttttacttatagcccaactagtaacaaaaccagcaaagggacacttaatcattcagaagtaattattataggttctatttttatagctgatcaaaaattaatgcaatcggtccttattaatagatatccaattttattaatagatgaaagtcaagatacgaataaagtactattagaagcttttatttcagtgcaggaaaataacaagaacaagttctcgctcggcctctttggcgatatgatgcaacgtatttatagcggagggaaaaatgacttaactacttcgcttccacccgattgggaaacaccggcaaaaataattaattatcgatgcccgaaaagagttatcactttaattaacaatattcgtaaaggtgatgaccaaaatgtacaagtgccaaaagaagatgctattgacggttttgttaggctgtttatcgtagattccaacacaacggataaactggagttagaaaataaaattcgtttccaaatggctatgcttacacatgatgaagattggaatattgcagaagaagttaaaacactaacgcttgaacatgatatggctgccagcagagggggatttgacgagtttttgctacctttgtcttcagttagtagtttaagagacgcagcactaaatggtacgagcaagaatataaacttcattacttcaaccttactaccatttattgatgcagtagaaaaagatgattcctttgaagttgctcgaataatcaaaagtggttcattattaataagtgattccaatcaatctttcttattaaatcctataggaactttaaaagatattgattcaaatgttgttgaatttaagaaaattttagtaaatggaaaagttacgctacataatgttttatctacaattcagaagtttgaattactttctttacctgacgaattacttgtctacttaagtgatattgaacaaggtgaacctaatgagcctgaaagcgatactaagttgctttcagatgttgataaagcttggggtttagcgcttaattctagcattggtcatgtgaaaaactatgctaaatacgttaatgaaacattgggatacgcaacccatcaaggagttaaggggctagaatacaaaagggtaatggccgttttagatgataaattcaaaggttttctatttgattatgaaaaattatttggagcaaaagacttaactaaaaaagacattgaaaatgaggatttaggtaaagattctgctttatctcgaactcgtagattgttctacgttatttgtagtcgtgcagaacaaagcttagctgtagttgcatactctaatgatcctattgctatagaaaaaactgcaattgaatcagagtggtttagtaaagacgaaatagtattaatctga

SEQ ID NO: 71708 - DNA, 2355 bp, Burkholderia thailandensis E264
atgcatatcgaattcgtcgagatcgcgaatttcaggaagctcttgtcggcccgcgtggatctgtcgctcaagacaacgctgttcgtcggcgcgaacaacagcggcaagacgtcagctatgttggccctacggcgcttcctaacgcctcgtcgctgtccgtttgacatccacgacttcacgttgtgccacttgccagcgctcgtggacattggcgaaacgtggcttcaggcgaacctggagggtgtcgcgactgacctcaccctggatccctgggtgcaagcgctgccggccttggatctgtggctgcaggtcaaggaggacgaggtccaccgggtccgagatttggtcccgctcatggactggaccggcgggcggctgggagtgcgactgcgctacgagcccaaagacatgaaggcgctgtttaaagagttcattaccgcggtcaccgaagccaatgccatgcgcgcagcagctgcggctgccgtagctgccaaggctgccggcgcggcgccctcacccaagttgacagtctggcccgaaaccttggtcgacttcctctccaagcggctaacctcgatgttcacgatccgggcttatccgctggatccagcgctacttgccaaccctgaaaagcttcgggccttgccgcagtcgcttccggcatcggcattgccgatcgagggcgatcctctcagtggcctgattaaggtgcatgacatccctgcgcaacgcggctttggcgagatccagaatgggggcgaagacgaaggcgagcttcaaacctcggcgggtggtacacgactctctgaacaactcagaagctactacgccaagcatctggatccagcaaaggggccggatcccacggacctagaggccttgcaagccatggaggcggctgaggatgcatttgacctgaagctgatggaaagcttcaatgaatgctttaccgaggtggcgggcctgggctatccgggggtcagtgacccgcgtccgcgcgtatcgacacgcttgcgtgcgatcgacggattgaaccacagcgcggcggtcaatttcgaggtcgatgtggttccggatgcgggcgcggttacgcccatcctgctgttgccggagggcagcaacgggctgggttaccagaacctcatttcgatgatcttccggctgatgagctttcgcgatgcctggatgcgcgtcggcaaagcgtcaaagagttccgaggctgcgagcattgaaccacttcacctggttctcgtggaggagcctgaagctcacttgcatgcgcaggtgcagcaagtctttatcaagaaggcgtacgaggtgctgcgtaggcgcccagagctgggggaaagcgacgcactgcgtacgcaacttatcgtcagcacgcattcgagtcacgttgcgcatgagacgccctttgcaagcctgcggtatttccgcagactgcctgctggtatggtggccaaggtgccggtgtcgacggtggtcaacctgtcgcaggtcttcggggagggcacggagaccgagcgcttcgtcacccgatatttgcgtgcacagcacgccgacctgttctttgccgacgcagcgatcctcgtcgagggaccggctgagcgcatgctcatccccaacttcattcgggcccactacaaggtgctgcatcagagctacgtcaccttgctggagattggtggtagccacgcccatcgtctgcgcccgctgatcgatcatctgggcttactgacgctgatcgtcaccgacctggacagtctgacagcgacggggggctcgtcagttcaacccgctttgggcgcaggccagaaaaccaacaacgccactctaaagacctgggtgccagctctggacgacgtcgacgcccttgtcagtgcgacgcaggcggccaagacgatcacggatgctggcgacacgctgttcgcagtgcgcgcggcctaccaaacacctgttgaggtcacgatgccgggctccaccgccaaggagaccgcctacccctacacctttgaggacgctctcgtgttcgagaacgtgaccttcttcgctgcgtttgccggcccgggattgaacgccaagttccgagcagccatcgccaagggtggcggtgcaaccgcggttggtgccagcatgtacaccgcgctcaaagatggcaagaaggccgaattcgctctcgatgtcttgatggcggatgacttcaacaaactgaatgtgccgcagtacatcgccgagggtctggagtggctgctgaaacagatggagaagaagcaggtggaaatcttgacgacggcgccggccacggccgtttcagttgctaccgccgcgagtcctgggccgggagcgaagccatga

SEQ ID NO: 71709 - DNA, 1920 bp, Burkholderia thailandensis E264
atgacggtcgccgacgatcaattcgatgccgaggccgacgcaacgatcatcgcatgtcttgacctgagcaagcccagaagctttttcctgtacgcaggtgctggatcagggaagacgcgatcactggtcagcgccgtcagaaagacgatcgatggcgagcacgggcggcaacttaccctgaccggcaagaaggttggtgtcatcacctacaccaacgccgcttgcgacgaaatcaagcaacgccttgaattcgattctcgcgttgaggtcatgacgatccatgccttctcatggtcgctgatcgagggcttcaacgccgacatccgtcagtgggtcgccaagaaccttgaagaggagattgcagagcttgaggagcagcacaagaaggggcgccccaacacgaaagcgggcgttgaacggcttcgatccatggagagcaaacgtcgccgcctggcgcgtctggattccgtcgttaagttcatctacagcccgaccagcgacaaccgaacacgcgactctctgaaccactcggaggttatcgccatgacggcggccttcctgaccagcaaacctggactgcggcggatgttggtcagcaggtgtccggtcttgctcattgatgaaagccaggacacgaacaaggcgctcatggacgccttcctgcatcttgaggaagagttccatggtcggttcagcctcgggcttttcggggacttgatgcagcgcatctactcggacggaaaagagcggcttgacaaggccatcccggccaggtgggctatgcctcgcaagcggatgaaccaccggtgcccatcccgcgtcgtcgaggttatcaacagcatccgccgcgatgtcgatggcgaggaacaggtcccccgcagcgacgctgaaaagggtgtggtccgggtcttcatcgcgccccaagcgggcgccgaccccttcgccattgaagcggccgtacgccagcgtatggcgacgattgctggtgacccggcctggcagaactctgacacggtgaagacgctcgcccttgagcacctgatgtctgccaggcgattcggtttcgcggaattcttcgagccgctttgggcgatcgacaacctccggacgagcctgcttcaaggcgccggagcaggtcttgggttcttcatcagggacgtgttgccgctggtcaatgcacttcgtgccaacgaccgcttcgcggctactgcgatcgtcaaggcgtcgtcgccccttctggatcgcgcagcgcttcaagaggctggatcgaatcaggtcgcgcagctcggtaaggctaaggcggcgtgcgacgggcttcttgcgctgatcacggaacagcctgagatcaatgctcaggcagtgctcgagtttgttgcgcagacgggtctgttttccatcccggacacgcttgctcccttcgtttccggtgacgccaaggcggtagcggccgaggacaacgcagggcagggcgatcagatggagcgcaccgaggacggagaagccgaagacaccagtcctgagctgagcgcatggagcaaagcccttgaggcgccactgagccagatcgagcgttacgacttgtacgcgcgaggacagtcgcaattcgcgacgcatcagggcgtcaaggggcttgagttcccgcgcgtattggtcgtgatcaatgacgacgaggcgcgaggttttctttttgcctacgacaaattcttcggtaccaaggagaagtcaaaggcggaccttgaaaacgaagccgccggccgagagaccggttcggaccgcactcgccgcttgttctatgtgacctgcagccgggcagagaagagcttggccatcgtctactactcgccggatccagcgctggctcgcagtgcgatcctacagtacggatggttcgtacaagacgaggtcgaactgatcaactga

SEQ ID NO: 71710 - DNA, 1938 bp, Dechloromonas aromatica RCB
gtgaaactcacacaactacggatcaacaattttcaatctttcggcccgacctcgaccattattgatttgtcagcgatgagtttcctactgggccccaacgggactggcaagacagcggtgcttcaagcgctctcacgtctattcggtttcgatccggcactgcggcgggtgcgcagaagcgactttcacgttaccccggcggaccttgccaagagcgatatcggaccactgacactgtggatcgaagcacaattcgagtttcccgaactcaagaagtccaaaggcaaacatgccactatcccggggcacttcgcccacatgcagttggagtccgtcgacggtgtcccccgggtacggtttcgcctgaacgctgaattggacgatgatggcgacatagaagagaccctgcactatgtgatccaggtcgacaccgacggagagccggtcaagatggtggcggtgcaaaagcacgaccgcaatgcgatccaggtgcactacctccccgctcgacgcgaccctagcgaccatatttcctatgcagccaactccttgctggggcgcgccttgcgtgccgccgattggcaggccgaacgcgacgaaattgccggcctgacccagaacatcagcgaggctttggcagaaaacgtagcggtgggcggcatcggcgcacagttgtccgcgcactggagcaccttgcacaaaggaagctactacactaaacccagtgtttcgttcgagcgcaacgaaatcgacaacctcctccgtcacctgacagtcggtttcacgcccggacatggtgagcagatcgtcgacttctcgcgcttgagcgacggtcagcagtccctgctctacgtgtcactggttctgtccatccaggcaatcggtcgcgaagtcctggacggcaaactcgacgcattcgatgtggacaagctgagacctgccgtgttcaccctagtcgcgatggaagagcctgagaacagtctgtcgccccattatctgggccgggtgatcaaggcgctgaccaccttctccgagcatcatgacgcccaagccgtcgtcgccactcatgcgccatcactactcaagcgcgttgcgccggagaacatccgctaccttcgcctgaatggggaccgccagactgtagtcaagtcgatcatcatgccggacgccgcagacgaagcccacaaatttgtccgggaagcggtgcaagccttccctgagttgtatttttctcggctggtcgtcctcggcgaaggtgacagcgaagagatcgtcctgccccgcatgctgcgggccaaggggcttgccgatgacgacacttcgatttcggtcgcgccgctgggcggccgccacgttaaccatttctggcgactccttgatgggttggacattccctacgtgacgctattggatctcgatctcgggcgctatcagggcggatggggtcgcgtgcgctatgccgccaagcagatccttgcgctgggcaaaccgatcaaaggcctatcaaagacaaccatcgaagccctccccgagtggaacggcaccgatcaagtgatgacatccgagtctggaaaacaatggttgagttggctcgaaacacaatcaatttttttctcatccccccttgacctcgactttgcgatgctgcgtcggtacagcgcggcgtacaagttggctgctgcagaacttgctgcacccgagacatctacgctgactgcagtgctgggcaagaaacaccatggcgtagagcaatacaacgctgaacaccagaagcattttgctgcttatcaccagcggttcaaacttggcagcaagccggctgcacacctcgcggccatggccgaactcagtgacaaagacttggtcgaccacatgccgccacggatcgcccggctaattgatgcggtcgaggcacgcctcaagggactcccggagtga

SEQ ID NO: 71711 - DNA, 1662 bp, Dechloromonas aromatica RCB
gtgatcaaagctgatcgctggcaaccatctgacggcctgaaactggaacccaatgcgctggccgcagcacgtgaatcccagcgcagcctggcactgacggccggccccggggccggcaagaccgagatgctcgcgcagcgtgcggactttctgctgcgtaccggcatctgtcgctatccgcagcgcatcctcgccatctcattcaaggtcgacgccagtcgcaatctcaaggatcgagtacgtcggcgctgtggctttgaacttgctgcgcgtttggacagccatacttttcacgcatttgccaaacgactgatcgatcgttttcgccccgtgctgaccggtcggaatgcgctggatccggactactcgatcggctcaccacgagtccaaggacgtcagatcgacttcgaggacatggtgcccctggcggtgcaaatcctgcagagcagcgaagtggcgcgcaatgccgttcgacagacctacagccatgtcttcctcgacgaatttcaggactgtaccgatccgcaataccaactcatccgaatcgcctttctcggtactggcattccgttgactgctgtcggcgacaccaaacaacgcatcatgggctgggctggcgcgctcgaaggcgtattccaggcattcgccgaagactttcaggccctccccctcaacctttatcagaacttccgttctcagccacgtctgcgtcgcatgcagaatgcgatggtcaaaataatggaccccaaggctgctgtaccggatagcgagttggcaggcaaaggcggctcggtcgatgtcctggcattcgccgatagccaaacggaagccgaggcgctggccgacctgatccaagcgtggatcgccgacgaaggcatgcccccctctgaaatcgccgtgctggtgtccaaactccccgacctctacgctgaccgactgatggcggagttggcgagccgccacctaccgttccgtaacgaacaaaatctgcaggatttgtccgtcgagccggcggcacggctcatcgtcgacttcctgtccgtcgtggcgggcgagcgagagccggatgcctatggtcgcttgatggacgtgctcctcgccacaggagtggacgaggacaccgcctacgaactgcgagcacgctggaatcgccatatcgatggcgcacgcaatcaggttcgcgaagagggtcccgtcgcgcacaacgccgcagccttactcaaacttgctgacagtttcctcgcacttctgggacgggaagccttagcagcactatcggcagactacgagcgaggcaaccgtctggatgaagttatcgcacaaaccttgaatcggatcaccgaccttcttgccctcgatacggatacagcgggggccctgtcacgattctcggaggatagcgctgtgcgaattatgaccattcacaaaagcaaagggctggaattcgatagcgtgatcatgctgggcattgaagaacaaactttctttggcaagcgtgccgatgagcgctcggcatttttcgtcggaatttcacgagccaaacgccggctctatctgaccgtcgctaatcatcgggaaaggccggaaggatatcggcgccgttgggatgaagcccgatctcctctcgtggagtttctggaatacgccacgaatacgacgtaa

SEQ ID NO: 71712 - DNA, 2148 bp, Escherichia coli UTI89
atggaggccttaggacatttcctcgttgatgcctcgcggtttagcgtaaatgatttgacactttgcaattgggcaaaaataaaagatatcactgaacaatggttaactgaggaaaatatagatcttgataaatcacaggaagctttatcagatctctttcctttcatggatatttggatcgaagcgaaagaaaatgagctccaatatgttaaccatatactaccaacgttagagtggaatggaggtttaattggagtaagactgagatatgaacccaagaaatttgatgttttctttgaggatttcatatcttcccgccaaaattcattagatatacacgaccgaatttctgagcggattgataaagaaaattacacaatagcattgtggcctaaagatatttatgaatatctttcaagaaagttgaattcactgtttacaatcaagtgttatagcttagatccttcaaaactagaattatctgataatgggatagccaaaccccaaagaatagacagtaagcaaacattacttgatggcatacctctcaaagatctaataagaattgatgagatcaatgcacaacgtggctttggaagcccctccgctgccgacaaagagaatagcaaattaaacacacagttaagagattattattctaaacatctcaacccaatagaaagccctgaattatcagatattgaagctctacaagccattcgtgatgctcaggatacatttgatgaaagattaaaaaactgtttctcccaagccataaaagaagttgaaggcctcaactatccaggagtaactgatcctaaattaaaaatctccacaaaaatagaaccaattgatggcttaaatcacgattcagcagttcaatatgagttaactaatgctttaagcaatgtatctttagactatctaagattgccagagagttataatgggctaggttatcaaaacttaatctcaattgcatttagactaatggggttcagagatagttggatgaaagttggcaaagctacaaataaaaaattagcagacgacaatcaagaggattttccagctcccctgcatttggttttgattgaggaacctgaagctcacttgcatgcacaagtgcaacaaatcttcattaggaaagcatatgatatattgaggaatcataacaatttaggcgataaagaagagcttcatacacaactcattataagcacacattcgagccatattgcccacgagtgtaaattttcttctttacgatactttagaagaattcctgcttgtaaagaacatgagatccctgtatcaacagtaatcaatctttccaatgtttttggtgtaaatgatgatacagaaaaatttgtaataagatacctaaaggcaacacattgtgatttattctttgcagatgctgtaattcttgttgaaggtcctgccgagaggattttagttcctcacttaattagaagacactaccctttcttaaatcaaagctacattaccttattagagattggtggtagccatgcacatcggctaaagaatctgattgttagtttgaatcttttaactctaattattacggatttagaccctaaggattcacaagatggcaaggttaaaccctctaagaaaggcagcggtttcgttacaagtaatacaacacttgcaagttgggttccagaagttaccggtgtcgatgaattgtataaactcacggaagataagaaagaaaagaaatataatgaattcttttatgtttactcagcttttcagattcctgttttggctgaattcaaaggtgttaaccaagagtttttaccaaacactttcgaagactctttagtctacaataatctagattttttcagtaatcttactggtaatggtttagtgaagaaatttaaagcatcaattactaattgcaaaaatgcagaggaatttggagaggaatcattttcacatttatctaaaggtaataaagctgaatttgcattagatatactttaccatgacgaaagcgataaattaaacacacctaattatataagtaatggtctaaagtggctcgaagaaaagataaaaataaaacaattagagcttgtttctgatttagccagtgatggagaaaccaaatga

SEQ ID NO: 71713 - DNA, 1839 bp, Escherichia coli UTI89
atgactatcaagcaaactgaggaaatattagattctaatatatataattatttaacgggcactcaaaagcatagtttcctcctttatgctggagctggctctggtaaaaccagaactttagttaatgttctggaaatgattttgaagagtcactcagaagagttcaggctaagaggaaaaagaatagccgtgataacatacaccaatgcggcttgtgatgaaataaaaagaagagttaaattcaacaaattaatagatgtgtctacaattcatagtttcctatgggagctaattagatatcactccagtgatataaaatcttggttaatggaaaacatttctgcggagatagctgatttaagggacaaacaaagcagaacaactagagtttctcaagcttctttagaaagagaaagaaaaatagtttccaaagaaaaacgtctgcaaaacttatcagacgtatataaattcacatataaccctaccggagataatagaactaaagactctctaaatcattcagaagtcattaaactcggatcttattttctagataaaaaatatactatgcagaaaatattggttaatcgccatccaattcttttaattgatgaaagccaagatactaacaaactgctaatgaatgcattactcgaagttgagaaaaataacagagatacattctcggtgggtctgttaggggacatgatgcaaaggatatactctgatggtaaaagtgatttagaggcatgccttgacgaacactggaaaaaacctgaaaaaagcattaactatcgttctccaaaaagagtggtcgctttaattaatttaattagaagccaagtggataatcataagcaaaaggccaaagaagatgccgaggaaggatatgtaagaatttttataaaagaatgtcattctgataataaagatagagatgaatcttttgtaaagcaaagaatgagagaaattactttagatgatgattgggaaaaccatgattcattagtaaacaccctaatattagaacatcatatggccgcaacacgtatgggctttatagacatgttcactcctctctatcaaattgagcgattaaaaactgggcttttagagggctctctgggtaatataaatttcatttgtggaattgtttcccccttaatatccgcctgcattaaaaatgatacttttactatcactaacattttacgaacaaatgcccccttattaaaaagagaacatcttttaaaaaatacaaataatacctcaccacttacacagatcagaagctctcttgatatgttaaagagttttatttctaaaaaccctgaactcatcacaattaatttactgcataagataaatgaaataaaattacttgacgtcccagattctatacaagaaatactagaaagtaatgataactcacaagatgatatcattgaagcttggcagaaatcttttagctctcctttatgtcaatttgataaatattataattatgtcaaagggaagacaaacatcgatactcatcaaggagttaaaggtctagaatttcctcgtgttctagttttaattgatgattctgaggctaaaggttttatgtttagttatgacaaacttttcggtattaaagaaaaaaccaaaactgatttagataatgagaaagaaggtaaagatactagtgaagacagaactagaagactattttacgtcacatgtagccgagcacaaaaaagcctcgccattcttgcttatacagataatacagaaatgctaagaaaaaacctattacataaaggatggtttgattcgagtgaaatagaaataatttaa

SEQ ID NO: 71714 - DNA, 1848 bp, Anaeromyxobacter dehalogenans 2CP-C
atgtacctgtcgagcttgcagctgacgcgattccggtcgttccgcgacgggaccgtgtacttcgacgaaacactgacggtgctcgccggtgaaaacaattccggcaagacgaatgtactcgaagcgcttcgtcttctgactccgcccagcgatggacgcgtagtgaggtggcccgagccacgcgacattacgagaggcttcgagtcattctcgattcgaggtacctactctgcgcttgatgatcggcagcgcggctcgtttctcacatgcctgcgtggcccaacgtcggactcagcctcgctcggcctccaatatgcggaagtgcctgggaagcgaaggggggagcggagtcgggtggtggggcctctcgatgcaccggagatcgagccgaaagctagggaactcgtccgacacgtacacctgcccgcgctccgagacgcgtcacgcgaactggcctcgagcgcgcctgggaggattgaacacctcctgcgccggactgctacggacgagcagcgagaagcacttgtcgcgaaggcgaggcaggcgctagagctgctcaaggcagacccagtcattggggccgcagaagcgcaggtgcaggagggggtgcgcgcactcacggcgggggttcacccgcatgaagcgcatctcgggttcgcggacccgactctgactgacctcgcgcgcgacctgcggctccggctcggactcgctggaatgcctgcagcggatctgtacgagtcgggtcttggttacgcgaacgtgctgttccttgcgctcgttgtcgtcgaacttgcgaatacggcggatgcggacctcacgctcttcctcgtagaggaaccggaagcacacctgcaccctcagcttcaggctgtgatgcttgagtatctgcgggataaggcggaggaatcgcagcggagagcgaggagtcccggggaatacgcggggcgtatccaagtcatcgtatcaacgcactcacctcacctcacgtcggcagtgggatccaagaaggtggtgatccttaggacgcaagctgggcccgacgtttcgcccgaggtggcgcccgctggtgctgcgggcaggggcggggaggcggcgtcagcgtcctcgttctcggcagcagtatcgctcgcgcagatccggttgcgagaagacgagcgcgagaagatagaccgctacctcgacgttacccgctctgcgatgcttttttcgcgccgggtactattggtcgagggcatttctgaggcgctgctaatccccgcattcgggaaggttctctacagaggaaagtctactgaactcgcgcgcctgaccgcctcaacgatcgtgccgatcagcggcgtcgatttcgagccttacgttcgtctcctgctcactcctgatcctgggagcggcaaacgcgtcgcagacctcgtggtcgtcctcaccgacgaagaccccgcatccgagacagcgaaacaggaaatcgatcttgaaggcgcgggcggcgttcagcgccggcgagcactgaaggaagtctccgaaagccttgaggccgcggaccggctctcggtccagctttcgccgatcaccttcgaggcggccttgctcggcaatccacccagcgtgcaaatggagcaagtgctgcgtgactcgttccttgcactcaggccgaggtccgcgttgctgtgggaccgtgatgtagcgagttctccccctggacaccgaggtgcctgcctagtgcggcgactcaaggactctggaattgggaagggcgactacgctcaagagatcgcacgccgcataacgccacaggtgccggtgccgtcgtcggtcgaggcggtcttgagtgcgctcgtcacgttatga

SEQ ID NO: 71715 - DNA, 1776 bp, Anaeromyxobacter dehalogenans 2CP-C
atgacgttcgctgcccttacggcagaacaggaagccgtcgtcctaagcgacaagacggtgttcgttacggcatgccccggagcaggaaagacgagggtgatcgtcgaagctttccttcgtgagggagggcgggctcaggcagctcatggggtgctggtcctatctttcagccgatgtgctgccgacgaaattcggaagcgctgcgtgcgcgaagggcgcgccagtgcattcgagtatccgcacttcgtagataccttcgatgcgttcgtcagccgattcctcgtggcgccgttcaggaacagatggtgtcccggcaggccggtcacgtacctggattcttgggatcggcttggagtgaaggttcatcttcgtctgaagaacgcgccgccgccgattcctctgagcgcgttcgagctcaaggacgtcgacgccgtcgccctccagccccgaaacgtggagtacgcgtttcggaaggccgcagcgcagcatctggacgcgctcaacgcagaggccaacgccctcagagggaagttgttggctcggggctacatgacgtgcgcggacggacgggcgctcgctctgagtcgcgtgcgagaggcgcgcgggcagcccgttctcaaggcgattgcagctcggttccccgtcgcgattgtcgatgaggtgcaggactgtaatagcgccgatctcgagatactagagcggctgatggctgcgggtgttcggactctcgcggtcggagatccgaatcaggacatctaccgatttcgtggggctgacggacggcgcgcagcgaggctcttcgtaagcgcaagccagctttcgttgactgggaatcataggagtaccgagaacatctgcaggttcgcatccagtgtaaagctcgccgctgggtcagacacggctgtcggtagatacggggctgaggtttcgccggttgtcgtccttggttacgagccgcccctcgacgccggtctcggcgacgccttcgttgtgcggctgcgagccctcagaatcagcgccgaggatggggcggtgttggcgtaccaggaggcagacgccctcgcagcggtcggaagaaccaaggacgctggagcctcacgcgtagcgaagctcgcctctgcgatcgaggtgttcagatcggcagcgcccagacctgcggacttgctcgcagcgactgagcacgccgaaagccttctactggcgaagcacgggctcaagtgcagctcggccctaccgaaggaggtcgcgcaacggaacggcatcgattcagttgccctacggacagaagccttgcgcatcctgtgctcgctagcgaaggagtccattgggatcggcgacgcatcctggctcgaacgtgctcggtgtgcgcttgaccgtgcggacatgctgctgccaacgggcaccacgtgcgcctccgggcaagtgctgaagaaggcaggtaaggagtggcgggtgcctgaggcgccgtgcgaatttcgcggcaccgcgaccaccgttcacgcggcgaagggacgcgagtacccaggtgtcatggtcgtgctgccgcccgggaagcgcacgaagcaactgttggacgagtgggagacccgccaagactcggaggggagagcggttctttacgttgccgcgacgagggcgcagcggttacttgtgctcgcggcaccgaatgaatacgcgtctcgcgtctattccctcgcttcacgagacggcgcccattgcgtactcgaccccatcgcgcgccaaggcgttgaggaagccgttctagtggaggcgtag

SEQ ID NO: 71716 - DNA, 1911 bp, Syntrophus aciditrophicus SB
atgcagatctcacgtctcataataaagaacttccgtggtattcagaatgcgagcattatcctatcaaagcactctgtattaatcggcgacaataacacaggcaaaaccacaatacttgaagccattgacctggcgctcgggccggaccgtctaaaccgagtgcccccggttgacgtgcatgacttctatcagggcaaatacatctctgacgcatctgctgatgaggtgcctacgagtactaaagctgaacaaggcgttaaagctgagggtgccgttgatgcagtagctaataatgcagatgtccaggttgatggtgatgttaccgctgaagcaccgcagattgagatcgaggttaccgttgcagacttgaccgaagagcagaagggtaggttcggcgattacaccgagttctgggatacggcgaccgacaccttctatgaccagcccaatcccgccggcgttgatgctgtctcgatcagtgaagcgctacgggtgagtttcatcggctggtacgacccggaagaagatgacttcaaggggaagacctacttcacccgcagtctctccgaaggtgacaaccctgtggtgttctccaagaaggacaagcagatttgtggtttcctatatcttcgctccctacgtacgggttcacgcgcgcttagcttggagcgaggcagcctgctcgacatcattctgcgcctgaaagaggtcaggccacagatgtgggagtacacgataagcaaattggattcgtactcggttgcgagtgacccggaattgggcatttccggcgtgctggaaagcatcaacgcggcgctccaaaaatatgtaccgaaagaatgggggatcgaaccccatctaaaggtgtcgaacctgacccgcgagcatttgcggaaggtaattaccgcttttatcgccacaggcgagggccgccacgctgcgccgttctatcggcagggtactgggacaataaacatgctcgtactggcgatgctatctcaaatcgccgaagacaagcaaaacgtaatcttcgcaatggaagaaccggaaacggccattccaccctatgcgcaaaagcggattgtgcacgaaatccgcacgctcgcttcgcagaccattttcacctcgcactcgccttacgtgcttgaggagttcacattggaggagactgttgtcctcgctcgggacgcgcaaggcgcgcttcgtcggtccgcgatcaccctgcctgatagtgtgaaactaaagcgctatcgacaggagtttcgtacccgtttctgtgaaggtctgctgacccgccgcatcttggtcgccgaaggggcgacggaagctgcgtcatttccagttgtgtgtcggcgtttggcggagttgaagcctgccacgtattcctccttggaagcgttgggtatctgcacaatcgatgccggtggggagacgaacatctccgatttggccaaactttatcgtgaccttggcaagcggactcttgccatctgtgataagcagactgatgaggaaaaggcactgattgaagcacaggttgatactctattcatgcacgacgaaaagggtttcgaagacctcgtcctcaaaaacaccaccgaagacgccttgaagcgctttaccaaattgatcgtctggccccaacaccttcagcagaaatacccagaccctgaagcccaagcgcaggctgcgttgagcgactatttctgtggaaaaaaggccgattggggcgtatctgatttcctcgcgcagtgcactgaggacgaaataccagaatggctacgggacacctgcttatccttgaaagcaatttgcgaacctgtccacgttggtgatgccgacggcggcgcgctcaacgcacccgaagctccagattctgaacagggagtagacgtggatgcaactaactga

SEQ ID NO: 71717 - DNA, 1821 bp, Syntrophus aciditrophicus SB
atgcaactaactgagaaacagacaaagatcatggacgccgaagggcacgtcctcgtcacgggaggacctggctccggtaagactactatttctattctcaaggcagcgcaaatcgctggatgcggtctacgtccagatcagaaaattctgtttctcagttttgcccgtgcgaccgtttcaagggttgttgaagccattgaatatgagcaacagattccgcacgagcagaagaaacggatcgatgtcgagacgtatcattcgtttttttggcgtattctcaaagcgcatggttatctagtcggcttaccgaggcagctctccatcctcacaccaccaagcgaagctatagagctttcgacgattcggagtggttatgcgccagcgtccaaactgaataatgctgagaaagccgagaagcgtgcaagggaagacgcggaacgtctgagactcgcacggattgagggttgcgtctgctttgaccttttcgcgcagtatactggggatatcctgcaggggagcaagcgcatccgtaagctgatcgccaccatgtatccagtcatcatccttgacgaatttcaggacacaaatgtcgagcagtggcgcgtcgtgcaggcgcttggtgagcacagcatattactcgccctcgctgatcctgagcagcgcatatatgactggatcggggctgaccctaaacgcttaagccacttcaaagacgcattcgcgccaaccgaggtggacctcagcactgataatcaccgcagtgccggcatcgatatcgttgcgttcggcaatgacattcttacgggcaagttccgggaagagccctacaggggagtgcaaatcgatgtctatactccaaatttcaatcaggctttttctgctctagttactaccacttacaaagccagaaaacgtctcatcaatagtggtcgagaggattgttctttagccatcctcgtgcctacgaaaaagatgactcgccttgtctcggatagctttcggtcaccccttgcaggtatgaccaagattcctcatgcggccgccatcgagacggaggccgccatcttgggagccgagataatcgccttcctgatgcagcccgatatggacggcagccacttcaagcactttatcgacctgttgcgcaactattttcatggtaaggggggcgacaacccaacaaaggccgacctcaaggaggccgagaatatccagaaggcatataatgactggcgctcccggcaagcggccggaaaggacatcaacaagagaagcatccttatcgccattatcgctgtttatggtacgacgcgcaagatagtgctcacaggggatcctgacaaagattggcgtgcagttaggaacattttggaagagggcgcctgccctcgtcttaaaagagttgcggaagaagtccgaaatatccgccttctggaacgcggcacacagttaagacaagagctttcacaagactggcgcgacaagggtgcctatgacaatgctctcaggatcacccaacaggcttttgtacgggaacatttttccactaacgccaatcctgaatctggtgttgtggtaatgaacatgcacaaggctaagggcaagcagttcgacgaggtgattatctttgaaggttggccgattaaacggaagggacaacctccatacaatgccgaccgtattgttcggtacaactcacgaaagcatgatagcgaccaatctcgtcagaatcttcgagttagcataacgagaggaaagtttcatgccacgatcttaactcctaagggtgacccttgtatccttcttattggtgagggttga

SEQ ID NO: 71718 - DNA, 1818 bp, Janthinobacterium sp. Marseille
ttgcatttagcggaattaaacataaccaattttcgcaagctgcgcgatgcaaaactgcgattccaagctggattgaacgttctggttggagccaacaatgtcggcaagagtgctgttgtggacgcgcttcgtgcgttactcgccggacaggaagagccttacccgcgactagacgtcgctgatcggcatcgccccgctgaaggtgaaccggaaggcgatattgattttcattatgtgtttcgtggcttagaccgagacgacgaagctgactttcttgcggctcttaaagcaggaggtgacggccagatggaaatacatattcatgtccgatattttgacgcagataaaactggccgtttccgcgtaaaacgatggtgtggtgatcatgaagatgttcctctgttgtcagatatgatggagaaccttcgtggggtctatctgcagccgcttcgcgatgcatcacaaagccttcggcctagtcgaaacagtcaattatcgcgtttactgcaccttctcactgacgacgcaggacgggacggtatcaacgcggctttacaaaaattggacgaagagcttaaacaacatgcgccgatgatcagcactcagagcgctattgcaactcgtcacggcgacatgctgggcgagcagctcaaacaagcattgactgtcgggcttagcgcaagcgattttcaacgtctctcctcacgcctatctctatcagtagaccagtttgagatcgaacagaatggtcttggcttcaataatttgattttcatggcggtagttctaagcgaattggccaagaatactgacgccacttatcgaggattgattgttgaagagcctgaagcccatctgcatccgcagttacaggctgtattgctgcgctatttggcgagtcttcaggcagtagcaggagagaaaccagtccaactgttcgttaccagccattccccaaactttgcgagcaacgctaatcttgattgtcttgcttgtttagttgagtcagaaggccatgtagaaacatttttccctcgcgatgtgacatttgaaaaaggtaagcgcgagaagcttgagcgctatctcgacgtcacacgcgcagagatattttttgcacggcgtgtaatttttgttgagggtgcagctgagcttatgctcatcgatgctctagcgacactcgccggttatgatctacgcggccacggtgtaagtctcatcagcgtcgaaggactgaactttgattcgttcttgccgctgtttggtgaaaacgccttgaagatacctgtcgctttgatcactgacgctgacccacagagagaattggaagaaggcgaaaatgacgatgataacgatgatgacgacgcagaagatgttgcgattgaagaagatggtgtgcaaccaaaacgaaagagagccaaagcagtgtatccagcactgggcgaagaaataaaagtatctgccaacacggcaaagatgaaagcattggaagaccgttatgtaaaagtatttcacggtgtaaaaacattggaatacgatttggctctacatgcaaatgctcgggaagcaatgctgacggccttggctgaccctcatccaaaaattgccaaatctttacggaaaatcgtagacgcggagaatgacaacactgacaaagctcgcgtactgtttcgcggcatgtttgaacggagccaaaacaatgtgcagaaaggacgctttggccaagctttggctcaagtgattagtgaaggtgtagtttgcgacgtgcctgcttatattaaaagcgcagttgagcacgtgtgcaaagaagaaccacactga

SEQ ID NO: 71719 - DNA, 1722 bp, Janthinobacterium sp. Marseille
atggacctatctgccgaacaacaggccatcatcaatgcgcccttagcacctcttgcagtcattgcttgcgctggtagtggaaaaacagcgactgcagtacgtcgcctcgttgagatgcgcaggctactggccgacagtcgcgcaagagtagctctgttatctttttcgaatgtcgctgtggataccttccggcaaagctaccagacactggcacaaacattaccgaatggtgctggccgaagtcgggtcgattttgaaacgctagatggctttattactagccacatacttcggccacatgcataccgcacaatgggttcgcaaagagccgcgtttttggtgacgggtacagagccattcctcagtggattcacatgtaggcgggacccattcccgcttccgattactgatatgaaagttggctttgagaacaacgagctgttcttttattacgacttccaaggaaatattaaacgtctagaccaaaacgcagcctctttggctgtgaggcgacttgggcgtaccggggcgtacacccatgacctaggtcggtattgggcttaccatacattgatcgaccaaccacttatattgcgagcattggtccgacgttatccgcacgttttagtcgatgaatcacaagatattggattgctacatcaagctatacttgagttactgatgcgcgcaggcgtacaggtctcccttatcggcgatcctaatcagagtatttacgagttcgcgggtgccaacggtatgtttctacgtgattaccatcgacgcgaagaggtcactgcattctcccttacacgcaactatcgttcccgaccatccatacaagcaatcgccaatcacatttctggccggaatgacgaacctcatcgaccgattgatcctggtacacatggtgtttatttcattggttacagcaatcctgagttgccaggtctgcttgatgctttccatgcggaagtagctaatctaggcatgcgcatagagaatgcagccattctttgtcgctcgtccaaattggcggatcaacttgccggagtcaacgagccgtctggccgaggaatagttaaacattttgtagaagctgctctccatcgcgacatgcatggccgttttcaagacgcgtataaagccgtagtacgaggaatcgttagtttgcttgacggcccgccacaaggcctgctggcaagtcttagtcatcctgctcatgaccgctcactgcaagatcttcgccgccggctatgggcattttcacgggaggttgaaaccgggctgccatcatccgaattgcctgcgatggatagctggcatcctttaatgctagcgcgcgtgcgcacactactacaagagattcatcaagacttcggtatggtgccaactgacaatctggggcataagcttgctcgaactggattaccagctgggccactcggtgcgggagctgaccttgctgctgagcgtggtccccgtattcgtgtcggaaccgtccatcatgtcaagggagaaagcattgacgctgtcttatatgtagcgacgcgtccccatttgcaagcaatgctggacggcgtggagactgagttgggccggataggatatgtggcagtgactcgtgcgtgcaatcttctttggttagccgttccatcggccgccttacgagaaatgcggccggctttattggccgcaggttttcaagaggccggagaccgctga

SEQ ID NO: 71720 - DNA, 1842 bp, Burkholderia xenovorans LB400
atgcgattgagtcggatcgttatcaagaacttcagaaacttcaagcacttcgatgtccggttgggtgagcatgccgttgttctcggcgagaacaaggtcggcaagaccaatctcctgttcgcgctgcgactgatccttgatcccgcgcttcccgattcatcgcgcagactgcgtattgatgacttctgggatggactggcgcgcccgctgaaggcggaggacgtcatcgaggtgtccgtcgaatttcgggacttcgaaaacaacgagaatctgcttgcagtattggcggaccatttggtgcggccagatccgatggtggcgcgcgtcacgtatcgctatcagccggtgcaggggctcgaaggagcgccgcggagcgaggcggactatgagttcattctcttcggtggaggtcggatcgaaaacgcgatcggttatgaactgaggcgatggatgccgatggatttgttcccggccctacgcgacgccgagtcggacctcgcgcgctggtcgagatcaccacttcgaccgctgttggaccgtgcagcaaagacggtagatgcgaaagcgctcagcgcgatcgctggcgaggtccatgcaacaacctcgaagattgcggcgctccctgagctgtccgatgtggtgagtcaagtcaacgatcagctcactgtcatggttggggataagcacgcagttaaaacagccttggggttcgcaccgaccgaaccggagcgcttgctgcgcgcattacaaatgatgatcgatagcggaaagcgcggcgtggccgaggccagcctcggttccgccaatgtgctttatcttgccctgaagcatcttgagcaccagtacttggtagatgaaggggaacgtcaacacaccttcttagccatagaagagcctgaggctcatctgcatccgcacctccaacggctcatttaccgaaactacctgcagacgcgcgacgaggttcaggccgatacagagccacgcagcattcttctcacaacgcactcacccaacgtagcaagtgtggcgccgctcgccaacgtggttgtcctacgccatgttgtcgatgcaggacataccgttgggcgttctctcaagggagtcaagctcaataccagcgatcgcgaggatctggagcgctacattgacgtcacgcgcggcgagctttttttctcgaagggtgtcatcctggttgagggcgatgcggagaagttcctattgcccacgctggccaagctgaatgacaaggctttggatttcgatgctatgggtatctccgtctgttccattgctggaaccaactttgcgccctatgttcaattgttgggccagaaaggacttgatattccgtttgtggtgctgacggatttcgatcccaagaatcaagcggtgagccaggaggacgcagaccctgacgacaatggtgtgggaaacagctatggcaaaaatcgtgtcgttaatcagatcatgcgtcatcttctggacgaggaagtctgggacaagagcagctatggagaggttctcgagctcgcgccgaagcatggcatcttcctgaacgagttcacgttcgagattgatctctttaaggcgggggctgaggattattttcatacagcgatcggttcgctaaccaccaacaagaaaatgcatgcgcgctttaagggcatgtccgcagaccccgactcgctcgatccctcgcagttcctcaaggacatcgattccatcggtaaaggaagagtggcacagcgccttgcagcggtcctcgtggaggagagcgtcgatgtatgcccaacgtacataaagaaggctctgaagtatttgaaagccaaactggcatga

SEQ ID NO: 71721 - DNA, 1563 bp, Burkholderia xenovorans LB400
ttgcgcgagaatgaagatcaatggtgcgcctaccaggcgacggggaactgtgtcattttggcaggccctggcagtggtaagacgaagacgatcaccattaagatcgcccgacttcttgctgaggacgtccgcagaccgcgccgcgtcgcgtgcatcacctacagcaatgcttgcgtcggtgaactgcgatcacggcttacgagactcggcgtgggcgacagcgatcgtctcgtgctttccactgttcactctttttgcctgacggagttggtgttcccttatgccaagatggcggggctccaaatgccggatccactggttgtggcttcaccagcacaggcaagagcgcttttcagcgatgcctatcgtgcgcagttgggcgggaacgcaccggcgtggttccgcatggcctgcgacaggctacggcgcacgattctggaccgaggaagtgacgaatggcgagcggggtcggcccgggaaacgatggtagtcgaggcctacgaaaatttgcttctacaaaacggcctgatcgacttcgacggattggtcctcgccggcctgcagcttgttgagaagaacgagtgggtccggcatgctattcgggccaagtatcccgtggtcgtgatcgacgaatatcaggatctcggcgtgcccctgcaccgcatcgtgttggcgctccttcaagcgggagttcggatcatcgctgtgggtgatcctgaccagtccatttacgggttcaccggtgcaaagccagacctgttgacagcgttggctggtctccagcagatggagtccgttacgctcaagttgaattaccggtgcgccgatagaatcatcgctgcctccagggcgctcttgcccgagccagcggagttccgttcccatgatggccggtccggcgaaatccatattcaccgtttggagtgcagcattcgcgagcaggcggactatgcgctcggtacgctggtgccagcgttgctcgaggcgaatccgtcgtgggcgccgggagatatagcggtgttataccgcacgcttaatgagggcgcgccgattgcggaggcggcagatgctcttggtctgcaatacttccgtcttgacaacggctcacccatcaagcgcacacgcgtgaccgagtggctcacggatgcggcacgatggtgttccgggggatggcagaccggggaaatctcgctctcccaactcctcaaagcatggcgacggatgtaccgctcggtcacgcacgagtccgagttgctggctacacggaagcgcttgatttcggcactgttctcgcttcgggatagtgcgctccctttacgccgatggctcttggcattgcgtcgcgacgtgctggatgaattacttgaacaagagcctggacttgccgatgagaaagacaaccttgaagaactgacagcggccgcgggggcaggcggccccctgcgggcattcacggtggagatcttcgggaatcagggtaagatgccgcgcgtcaaacaagatgagagcagcgcgtcaatctggatgagagtactggcgttgcggcagcggtggagggcgtag

SEQ ID NO: 71722 - DNA, 2349 bp, Burkholderia xenovorans LB400
atgcatttgaaaaagctggtcgtccgcaatttcaggcggctacgcaacgtcgtgatcgatcttgcatccgacatctcgattttcgtcggcgcgaacaacagcggcaagacatcagttgggcacgccctccagttgttcaccggaggcggtcgtttcaacatccacgacttcagcgccgagctttggcccgacatcgtcgcgttcggtgaggacgaaggcgaaggcgtaggcgaatcgtccttgcctcagatcgaaatcgacatctggctcgaaatcggcccggacgatgttcaccgtgtcatcgatcttctgcccagcctggcttgggagggcacgctggtggggatgcgtgtcgcctacgcgcccagaaatcctgcggagacgcgggcgcgctatgcggaagtgcgtcagcgcgcgctcgatgcagtcgcaaagaatgaagacggagcgccagtctttgacccatcgccacgtaacctgcgggagttcctccgcgacaggctgcacgacgaatatgagctatgtcatttcgtactggatcctgcacgtttcagcgcgaatatgatcccagaggatggctatgccccggccccgctaaccggtcgcgaccggagtgggcgtgagatcttgaacggtcttcttcatatcgacttcttgaacgcgcaacgccatctctcggacggccctggtggctcgcgcgccgaggatctctcccacgtgctcagtcgcttctatggacgcaacctcgaacagaaaggcgaagatatcgaggcgttgcgtgccctggcagcgtcagaggtctcgctcaatgagcatcttgagcgggtgttcgagccgacgcttaagagcttgtcgaagctaggttatccgggtctttcaaacccgcgcatgatgatccgctcggcgctcgacccggtcaagatcatgaacgggcgcgatggtgcgatcgtccactatgcactgggtggggatgacgggaatcccgacccgcccactttgcccgaccactataacggcttgggcttcaagaacctcattttcatggttgtcgaactgctcgatcttcacgcccagtggctggcgatcgaggggagccgtccgccggtccacctgatttttgtcgaggagcccgaggcgcaccttcacgcccagcttcaacaggccttcatccggaaagtgatggatatcctcgcgcttaaggacgaggaccgcacgcactatacgagccaagtcgtcgtcacgacccactcgactcacattctttacgaacgaggcttccggccgattcgctattttcgtcggagccgtttgcagaatgtaccgacctcggatgtcctcaacctatcgctcttctacgacagcactgacccggacattcggagctttcttgagcgctatttgaagcttgcgcactgcgatctcttttttgccgacggcgccgtgctggtcgaaggcaatgttgaacggctgctgttgccgcagatgatcgccaatgccgcgccgcgactgcaatcgacctatctcaccgtcctagagatcggcggggcgttcggcttccgattcaagacgctgatcgagtttctcggcctcacgacgcttattatcaccgaccttgacagcgtgtttggtccactggcgcaggacggcgaggacgctgcccatgttcagccagcacacgtggcgccgcctgctgagaatgcggtggctccggacgctgacgtcgaagacacggacgatgaagatgaggatgcgcctgcggcggcggagaagcccggtaaggcgtgcgtcgccggccaacccggcgcagcgacatccaatcagacgttggtccaatggctaccgaaatgtgcgacgatcgccgccctgtgggctgcgtcggctgagcagaagattcaggcacgggcgaacgacaatgacgctttggtacgggttgcctatcagtgccggactgatgtgacctggggcggagaaaccttggcgctcgccggtcgtacgctagaggaagcattcgcgctcgaaaatctggaatggtgccaacacaaagaccgcaagccgcttcagctccgcatcgctaaggctggcgaaaaggacctggttacgcttgcggagcgtatccacaagcgggtgcaggcaaagagcttcagcaagaccgacttcgcgctcgccttgctcgccgaggatccgggtaattggacggtcccggcctatatcgccgagggcctgtgctggctggagaccgagatcgcgccgctgtcgctagacgatggtgaagacggcgagcagcaagaagaaggcggtcttgagctggcgaacggggtggttgtcgctggcgatggggtggttgcgtga

SEQ ID NO: 71723 - DNA, 1878 bp, Burkholderia xenovorans LB400
gtgacgagccgcattggcagtcccaacacgcaagccgacctggacgttcgggcgtgtctcgatcggatgccgccgcgctcgttcgtcatggtcgccggcgcagggtcggggaagacgacctcgctggtcaaggctatcgcgcatctggccgagacacgcggtcccgctctgcgtcgggcggggcagcaaattgcctgcatcacatataccgaagtcgctgtcggtgaaattgtggccgacgttggcgtctcgccgctattccacatttcgacgatccacagtttcttgtggtcgatcatccggccgtttcatatcgatatcgcgacctgggtcgctacccgtatcgaggagaagatcgcggagcgacgcgaacattacgacaggccccggacgcaggagagaacgaaggcgcgtcttgcacaggagattgctgatctggaggccgagttggatgcaatcggtggagtcgggaagttcgtctacggcaatggcagcagttacgccgagggcattctcggccacgacgatatccttaagcttgctccagcgtgtgtcgcttcgcatccactgctgagacttcttgttgctaaacgctttccctacatcttcgtcgatgaaagccaggacaccaatccggaggtggtggaggcgctacgacaaatcgcgggggaccatcctgatctttgcgttggtttcttcggtgaccccatgcagaagatctatatgagcggagcaggcgctgtgccgttgaacgacggctgggcggaggtcacaaaacccgagaacttccgctgcccgacatcagtacttggggtcatcaatgcgatccgcgccggtggcgaccgcctagagcaggtgcgtggtcggacagtgaccgttgatggcatccagcaacccgtcgctggctcctctaatctgttcgtcctcccggcggacggtgaacggagcgcgcacctcgccgctgttcggcggtggttggcggtcgaaaccggggatgatctctggctaagcgatatgcgggagggcgatgtgcgcctgcttgtgctggtgcaccgcatggccgccacccggctcggctttcccaatctgtatgccgcgctcaatgaccgagccccaatgagcttgagtgagggtttgaccgatggaacagcctggcccctccgcccggttgcccagcacatactcccgcttgtcgtcgcggcgcgagcgggggatcagttcaccgtgatgtcggtcttgcgcagcgaaagcccgaaactcgagcccgagcggcttcgaggacaggcgacggcacctgttcttagagcgctgcaacaagcgctcgacgggcttgtggcgttattggcggaaggatcgcaggcgaccgtgcgagacgtcttgacacttgtgcgcgatagcgaactgttgcgcctcgacgatcgctttggcgtgcatctggttgccgagccggtagacgacggcagcagcggattcgagaacgttcaggcgtacctggcgtgcggtgtcgacgaactctgggcttaccggcgctacttcaccgaggaatcaccgttcgcgacccatcatggtgtgaaaggtgcgcagtttgagcgtgttctggtcgtgattgacgatgatgaagctggcttccggcaatattcctatggaaagtattttgggtacgtcccgctctcggaaagcgacgaagccaggattgcttcagatgaagaatccgtacttgatcgaacacgtcgcctcttttacgtgtgctgctcacgagcggtgaaggatttggcagtcgtggttttcgcccctgatgtcacggcggcccgcaccgcgatcgtcgggaagaatctatttcccgaggccgtaatacggggagtggagcatctggattga

SEQ ID NO: 71724 - DNA, 2001 bp, Saccharophagus degradans 2-40
atgaaagtagagcaaatatctatcaccaatttccgttgttttggccgggagactacaacttttacgcttcaggataattctaccgtttttattggctctaatggttcaggaaagacagcggcaattcaagcactctctaggttatttggtgttacaagtaagcagcgacaagtgcgaaaaacagattttcacatcgagcatgataaagacgaacttgcgagtggaagcaccttatctatcgacgtaatactctcattccctgggcatgatgagcctgacggggctgacacaatacctgagtttttccagcaaatggccgtggagacgcccggcggagaccttaaagcacgtataatattgaaggcaaaatggatcgatgacggaacgcctttgggttcagtagaggaagacattcgatgggcccctagacttacaaacaattttgactgggaaaaggattgcacgagggtgcaggcttcggaaagaagcagaattcagctaatttatattcctgcgcatagaaatatcagcgaacaggtgaccaaccttataaagagtcggttttggcaagcggccaaatggtctgatgagtttcgcaatcacgtcgaagcactttctaaaaatattcaagctagttatgccaatgaggcccccgcaaaattattgctcgaaaaattatcttcccgctggaagcaagttcacgacgcggatactgacactgatccacgattgaaattaatcgacagtcggttcgaacgtataatccaaaacgcagggtttacatttttcccaaacgaatttggtcaagagcgagatctggctgatctaagtgatgggcaaaaatccttgtttcacatcgcactgaccgccgccacactcgaagcagagctggcagctatagaaatgaattacgaagacagccccttcgatcatgacaagatgaggagagtatgtttaacacttctcgcaattgaggaaccggaaaattcgttatctccattttttctaagtcggattatcgagcaagcattggaaatcggcagtcttgacgccgctcaggtattgatttcgagtcactctgcttcaattatttcgagattggagcccgaaaatgttcgctattttcgacttgatagaagcaatcgtacttcatctgtgcaaaaaatacttctaccggaagacgatgaagaagcatcaaaatttattcgactggcagtcaaggcctatccagaaatttattttgctcggtgcgtcatactcggtgagggtgcttcagaagaaatcgttattcctcgcctagctgaggctatgggattcccactggatccttcctttgtacccgtagttccattaggaggacgctactgtgttcatttttggaaactactaagcgatttaaagatccccttcgttactctacttgatctggatgccggacggtctcatggcggtgcaaaattagttcaagggaccgccgatcggcttgatgaaatgggcatcgattggaacagtaattctgtcgtcgaagatagattacttgatcctgataaaattgatactctggaagatgcagatatttggtatgactttgatgataacgattggctcaatgtatttgaggctgaaggtgtttatttttctgatccactggatattgattttgcaatgcttctctcgtttcctgaagagtacaagattccaaacccgggcgggcgcggaccaaggaacaccccagagtcaattgaaaatgcgaaaatcgcaacgctaaaaacagacggtgacagcagtttgtacgaagaccaatacgacgacaccttcaggtggtatccatacctctttttaaataataaaagtaagccagaaactcatataaaagcactttccaaacttagcaaagagagactttctagagatgcaccaagggagcttaaagccttggtatccaaagtaataaatattgtgatgggaagtgaaaatggtcaccagaatcaacccctgtga

SEQ ID NO: 71725 - DNA, 1845 bp, Saccharophagus degradans 2-40
atggtcaccagaatcaacccctgtgaatggaagcctcaaggggtcgatgatcttgagcccaatgcgtgggaggggttaagagaaaacaagcaacatgcagccgttttggcaggagctggcgcgggtaaaacggaatttcttgctcagaaggctgcttatcttttgcaaacgggtatttgctcggaccctaatagaattctcgccattagctttaaaaatgatgcagcacgtgttttaaaagaacgtgtcaacctgcgctgtgctccagaacaatcaaggcgatttgaatcctttacttacgatggatttactaagttccttttggatcgctttcgtctggcgatacctgagccttacgcaccaccacccgattacaacatatactttccaaataaaggaacgtttcaagagttcttgaataaccaaaaaatacgcggcgtaaatgtctaccagcttcagaaagacatcgctaacctgcctcttccggcgggtcaacacaattatctggcccttaaatcatattggcagtgtcgtctgacatctgacgaagtggcattgtcttttcaaatgataaaccgtttgattgaataccttatacgctcaaacccaaatattaaacatgccttacgatccacttacccatttgtcttcttagacgaatttcaagatacaacatcgccgcaatatgaacttttaaaatttatttttctagaaagtaatagcctaattacagcggtcggtgatgataaacagcaaattatggggtgggcgggagcactaccagaagcttttaatgtatttaatcaagactttggagcgaagaatttcgacctcgtttctaactggagatcacatcctgaattggtgtcaatgcaacatgccatcgcacagatgattaccccgggtttgactcagcccgaggcaaagaatacgaaaaatatgaaaggggacgtagcggcgatatgggggtattccgaccgcaatgatgaaattcaaggtgtttcaaattggatatctgaacaaatcaactcagggaccaaagctcatgaattagcaatactcgtaagaacacacgcagacaaattggaggttgaaattgcaccacacttgttaaataaaggtatctccatcagaaatgttgcacggatagtggacggaatcgcaatccaagatatcttgacagaaaagctaaccacaattattttgccttttttatatctcggtgtactagaaaggagtccggaaaattggaatagagcactcataagcctttgtgctttggaaggtgttgatttcgtagatgaaagagcacatagccagcagcaagatcggctacaatatttttcaagattattaaggcaagaccttagcaacggtaattttcataaaggtcgaattaaccctaccatctcatcgattctcgcttttttaactgaagacgcgataagaagttctatttctgagtataagcaagacagagattacaacagggtactcaatggcattgttagcttgcttgaagagtgcgcggattgctcgtcatcctggctggaagcgcttgatagatttcaaggtgtcgatcaagttccgctgatgaccatacacaaaagtaaagggctagagtttcagaccatcatattttttgggcttgatgctaagacatggtggagtctgacacctgataacccagaagaattgcgatcattttttgtggcgtttacgcgagccaagcaaagtacttttttcacttcttgctctcaaacagggaatcccgttacctggattgaagaaatcttaacaagtgttggtgttaataaattggctggacctggttgcgaaaattaa

SEQ ID NO: 71726 - DNA, 1785 bp, Methanococcoides burtonii DSM 6242
atgagtattttaataaaaaccgttcgtattgcaggcttcagaggattggaaaatattgaagtcgaacttgagcaaaccacgattttgacaggcatgaacaatacgggaaaaacttcctttctcaaggctttgcaattggcattgggcaatcgtcaatttgtctcacaggatgatttttttattaagggtgattttgtatctaaagaaataattgtagacctattgattgttccaattaatggtgatggtgacgagcgtgatgacttttccccagattgggaaactttgttcacgattgaaagagtacgcaatgatgatgctggcaggtctttcgttccacttagaacagtcattacttttgatgaggtaaataacaattataagactcagcaatttattctaaaattctggcctgaactgataaagaaatttgatgttcccggcagtgaacaaaaagatattaattggtatgaggttaaagatattggtgatagcagtaagtctaattttcactttgatgaaattccgtttttttatatggatgcacagagagatattttagaggatattaaattaagattttctaatcttggcaagatgttatcaaaaattaaatattccgatgatgacattaatgaaattgaatcccaaattaaaacactgaatgaaaaagctgtaagcagcagtccaattttatccattcttaaaacaaatctaaaagaactggatactgcaatggattctcatggtgaagggattgaaattacaccttttactaaaaagattagagatttaaataaaggtttaacgatttattataacgatcaaaacgaatcatttcctatggaaaatcatggcatgggaacaagaagttggtcatctttgttggcattgaaggcatttgtttttctactttctaacaatgcaatggaaaagggaactaaattttttcctattcttacgattgaggaacctgaagcacatttacacccaaatgcacaaaaaaaactttatgagcagattgattccatagtaggccaaaaaatcatttcaacacattcgccttctattacctcagcagctaggttaagccaaatccgtaacttttataaaaatgaaaaagtgacgtgtggcaagattgaaactgataaactagaacctgaagatattagacaaataaatcgtcaagttaccaatacaagaggagaaatatttttctcaaaggtacttgtctttgttgaaggtgaaactgaagaacaggcactcccaatttttgcagaaaaatattttaaaaaatcccctgttgaaataggactagattttattggtgtaggtggccatccaaaatatctaccatttttacgttttgcagaggcattaaatattccttggcttattttaagtgatgcagaactttctacaaaagaaagtgttctttcacaattttcgaagtgtagttctaaaaagagtgatatcaattgtgtcgttttccttgatgatggaaatgattttgaaaaacagcttatcgctgataattttagtgttgagattaaaagtgccatttcttcttcatgtaattatatgaatggacaacataaaaaagcaaaagaaaaagaaatcgaaaagtatgatgacaaaaagttgtatacgatcataatgggtagtaaaacacaatatggtcctgttattgctgaaaagataatacaaaccgataaagatttacctcctaaagtaattaatctatttaggaagatagatgctattttaaaaaggaaggagatataa

SEQ ID NO: 71727 - DNA, 1764 bp, Methanococcoides burtonii DSM 6242
atgacaccccgagttgaattgtcaaaaaagcaggaagaaattgtctttgctgaaaatggtgccatctacgttaaagctagtgctgggagtggaaaaacacgtgttttaactgaaagggtacgatatctattagataaaaccaataaaaaagtacttgctctgacatttactaacaaggcgggggaagagattaaggaacgattaagcgacatatcagaaatagacaatcgtgtttttgtggggacttttcatagtttttgtcaatctatactggaaaaccatggtaatttgattggtcgggcgcaaatgccgcatatttttgaagatgaatcagacaggttagaattggttgaacaggcgattatgcaaaccccttcatatgcagaaatatacaaaaataaatctaaacaaaatcagattgattatcgatatagtgtattaagttttatctcaaaagttaaacgagaattaatctctgacagtgaacttggacaacatacaactgatgataatctagttttgatttatcataactatcgggagattttggataatcaaaatgccatcgatttcgatgatcttttgtttcttgcgcataacttgctggttaattatcccaaaacagctgctttgtaccgcaggagtttttttgcgatttgcatagatgaagcacaggacttgaataatgcccaatatcaacttttacttgctttggttaatggtgaatttaataatatcataatggtaggcgattcgaatcaatcaatttacaactttaatggttcatctccgaaatatatggatgaacagtttgtacatgattttgaccccgttgctgttataaaattgaatgaaaattatcgttcatcaaaagaagtattattagctgcaaaaaaaataattccggatgaatctgatatttcagaaacagttaaggaaggcatttttaaaatacattgtctgaaaaatgaacacgatgaagcccagtgggttgttgataagataaatgaactacttactgcaaaaacacatgatgatattgaaggtgaaattacccttgaaaaaatagcagttcttgcaagaaataaatatatctttaatcaattagaaaatctcttaacagagaacaatcttcctttttactacaaaatgactccaggaatgattcgttttgagtctgatttaatgaaaatatttgatctttcattaagagtaaggttaaacccattggacgatttacataagcaaaggttgctaaattatctaaatataaaaaattccgaaaatatgaacttggaaagtatgattccattagtgccagatgagttggttcaaaatcttatcttactagttacggaattacatgatgatggaagtaacataaagcagaaattggaaagtttcagagatacgctgactgtcaatgatgaaaacgaaaagaatatgattttcaatgacattacagaaatattaaaccattggcataattatgctaagaaaacagataacaaatcattgcatcaatttaaaaatgctatggctttaggaaaaactcatccactaacacaacatagcggtatcacactaagtaccgtgcatacaatgaaaggacaggagtttgatattgtctttattatcggcatggatgatgagacatttcctgattatcgtgctgttcgaagcgggggtatcgagctgatacaagaaaaaaataatttatatgttgcttttacccgagcaaagcgctttttatatgtaacctag

SEQ ID NO: 71728 - DNA, 1092 bp, Roseobacter denitrificans OCh 114
ttgctgtatatctctctggtactcgcaatgcgcgagatcggcgacaaggtgctcgccggtgaactagaagctttcgacatcgacaaactgcggcccgccatctttaccttaatcgcggtcgaagagccggagaacagcctttcaccgcactatctcgggcgcgtaatccgcgcgatttccgaatttgcaaacggtcagaatgcacagaccctggtggctacgcacgccccatcacttttgcgtcgcgtcgcccctgagactatccgctatctgcggttagacggcgatcgtcgaacggtcgtcgctcgggttgttctcccggaaaatgaggacgcggcaaaatatgtgcgtgaagccgtacacgccttccctgaattatactttgcccggttcgtcattctgggtgaaggcgacagcgaagaagtcgtcctgccgcggatgctcgctgcacgcggcgttctcacggatgatgcatcgatttcggttgtccctttgggcgggcgccacgtcaaccatttctggcggttactgcacgagctgggcatcccgcacgcgactttgcttgatctcgaccttgcccgctttcagggtggctggggcaggatcaagtacgctgcgacgcaacttctgaaatatagcgacgtggagaatgcgggcattgacgaagatgaaatagcagccatcccagcttggaatagcgaacaaggacttttgatcgatgacgatgattggttcgagtatttcaacgagcgcggcgtcttcttttcgtcgccgcttgatctcgactttatgatgatcgaggcgttcgccgaagtctatcgagttgaagatgacgagtgcgaagaaccagatgagacaacgctcaaggctgtcctcggcaaaaaacacgataccgtggcagggcaatatacagactaccagcttcagctgttcgatgcctaccaccatcgcttcaagttaggcagcaagccagcttggcatatccgggcaatggcagcgattgatgatgcagaaattgctgcggacatgcccgcggccatgaccgcgctaatcgactatgtcgaaaccgagctcgaaggcttacctgaatga

SEQ ID NO: 71729 - DNA, 1650 bp, Roseobacter denitrificans OCh 114
atgattgcagtggaacgatggtctcccgtggatggcttaacgcttgagccgaacgcgttggctgctgcaacagagattgcgcgcaatttggccctcaccgcgggtcccggcgctggcaagactgaaatgttggcgcaacgtgccgacttcctgcttcgcactggaacttgccgttaccctcgccggatcctcgccatatcgttcaagactgatgctagccaaaatctcaaggcacgcgtccggaaacgctgtggacctgggctggctgcgcgattcgatagctacaccttccatgccttcgctaaacggatcattgaccggtttcgcccggtgctgagcggacgcgatgcgctaaaccctgattattcgattggcccgcgccgtgtgcagcatcagtccatcacgttcgctgacatggtgccgctcgcttgcaagatcatcgaagacagcctagtcgcccgaaatgcggtgcgacagacctatagccatgtcttcctggatgagtttcaagactgcacggatgagcaatatcgcctgatactcgcaagtttcggcgacaccccgacaatcctgacggctgtcggcgataccaagcaaagcatcatgggctgggccggagcgctcgagggtatcttccataccttcgccgacgctttcgatgcgctgccgcgcaatctctatcagaatttccgttcagcgccggcgctccgtcggatgcagaatgcgatggtcaaagtgatggatccgccagcagcgctcgacgatgccgatatcattggcgacgagggtgagatttgcattcttcgatttgaagatgacgatgacgaagccagtggcttggctgagcgaatccgcgacctgatcgacgatggcatcgagccctccgagattgcgatcctagtcagcaaacaacaaagtctttattgtcggcttctcgtggctgcttttgaggcggaagagattccgtttcgggaagaagatacgaagcaggacttggcgtcggagccggtcgcctccctactcatcgattttcttctgatcgcaagtggctcgcgccaaccctccgcttatcgtcgtttgcttgatctggttgttttcaaccatggctatgacgaggaacgcgaatatcagctgcgatcacgctgggatcgcttcgtaaacgaaaccaagcagaagattgcggcgcataagctcgatcttcggcagatggacgatttgcaagctctcgcaatatcactggtagacaatgttgggcgtgatagtctcatctctttatcgccggactatgagcatggcgatcgcttcgatgagctcatcgcccaaactcttgagcatgcgcacatgctgctgcagagccaagcggactcatcaacagctctagcctcattttcgggtgacagcgctgttcgcattatgtcggtgcacaagagcaagggcctggagttcgatacggtagtcatccttggggtcgaaaaagaaaccttttggggcgagccgtcagcggaacacgcagcttacttcgtcgcgatctcgcgcgccaaacaacggcttctgctgaccacgtgcagccaacgccagcgaccgcaaggagcgaaacgctggtctattaaacgccatgagtacgacgaatttcttgcctacgtaccatga

SEQ ID NO: 71730 - DNA, 1848 bp, Chelativorans sp. BNC1
atgcgggtacgacgcctcaagatcacgaattttaggggcgtctcccaaggatgcatcgatttttccggccatacgcttcttgtcggcggcaacaacgtcggcaaatcgacagtatgcgaagccctcgacctcgtattggggccggaacgcctctttcgcaggccggtcgttgacgagcatgattttcactgcggacgatatttaactgaggatggagcgcccgtcgaaatacgcattgaggctattcttgtcgatctctccgaagaggcaacgcgtcggttcggcgggcatctgcggcggtgggacgatcaggccggcactttcatcgacgagcgggaaaatgggctcgaccaagccgacgcgcctggcgtggtctgggccctgcctttgctgttcgtcggccgctacgaccgggacgaggatgatttcgtcgggaataccttcttcgaccatccgaccaaggagctggatgcactcgacgaggagaccgagataaagctcggccagggacgcgtacctttcacgcgcgttcacaagcggctttgcggctttgtgtttttgcggaccctccggacggggtcccgagcgctgagccttcagcgggggtcgttactcgattcggtcctgaagctcggcgggtctggcgcagttgagatgtggcaggacactctgggccggctgcaagcgctcgaccccgcgattggtgagatcgagcaattgaagcagattcgtgccgaagtgcgttcgcgcatgggtcgcttcgtcaatcttgcgccaggcgataactcgacagcgttcttcgcgtcggacctgacgcgcgagcatctgcgcgaggtcgtgcgccttttcatcgcagcacagccggggcagcatctcgtgccgttcggccggcttggcactggctcgatcaatctgttggtctttgcgctgctgaccttcatcgctgagttgaaggacaagcagtctgtgatcttcgcgatggaggagccggagattgcgctgccaccgcatacgcagcgccgcgtcacacgcttcgtgctggccgagatggggcaatctatcgttacgtcgcattcgccctatgtgattgagcaattcgatgcatcgcagatcgtcatccttaaccgcgacgaaggtggggcgctgacaggcaagccaatcgacgctcaggcggttaagccaaagacctaccggacggaacggcgccagttcgccgaagcgatcctgagccgggcggtgctggtggttgagggctcgaccgaggcgtcgctgtttccggtcgcatcttcgatcatggaagattcgctgccggcggactcttacatgcatttcgatcttgccggcgtcagcgtcttcgacgccggcgcggacaatgcagtgccgcgtcatggcccgattttctcggctctaggcaagctcgccttcggcttttacgacaagccgaacgccgcgtttggtcaagattccctcgaaaagctgaagagctacacgcaggtctgggagtcacccgagaagggaatcgagaacgtccttgtcaagcagatgccgatcgcggtcgtgcggcgctttctcaacgaggtgaaagatcggtccgattatcccgctgtcggggcctatgatccggcggccggcgatgccgacgcagcggcgttggcgaccaaagtgcttaaggctcgcaagggcgaggcttatggctatgcggcgatgctgatcgcgcagtgccagaccgcggcggaactgcccgcgacgatccgcgagatcctggaggcgattcataagaccctcagcgccatgcccgaagagattgccgcacctgtgcccggcgatttcgaggacttgccgggatga

SEQ ID NO: 71731 - DNA, 1710 bp, Chelativorans sp. BNC1
atgaaactggagctgtgcgacaagcgaaaggcgatcatcgcgcagaccgggcacctgctggtgctcggtggaccgggctcaggcaagacgacgatcgcgcttttcaaggcacaaggccgcttcgcgacgctcaagcccggtcaggaagttctgttcctgagcttctctcgcgcggcgatccgtcaggtcctcctacgctgcaaagaaatcctgacgccgagccagcgccgggccgtcgtggtccagacctaccacgctttctgcatggagatgctggaagcacatgggcggctgttgcatgggcggtcggtgcgttttctttaccctggcgaggaacggcttcagaagtccgcgttcgacggggactggagtgtcgagcgcaagcgtcaggcagcagaaatggggctttattgctttgacctatttgcggcgggcacggccgatctgctcgaaggctgcgcggcgctacgcgggctagtcgctgatcggttcccaatgattatcgtcgatgagttccaggacaccgacgataatcagtggcggatcgtgcgggcgctcgcccaagtgaccgacgtattctgtctggcggatccggagcagcggatcttcgattatcgggacgacatcgatcctcgccggctggacattctgcgcgaggctgtcgcgatcgccgaattcgatctcggtggcgaaaaccacaggagtccgaacgccggcatcctccattttgccgatgcggtgttgcgtaatcaaggtccgctgccggtgacacctgacgtcaaacaggtgagctattgggggaacgctttctccgcgacggttcatgcggcggtaatctggactttcagtgcgttgcgaagaaaaggtgtcgagaagccgagtgtcgcggtgctgtcgcggagcaactcgctgatctctgacctttcggttatcctttccgagcctcacacctacaacaaccagctgctctccgtcattgagcatgatgtcgtgtgggatgcggagctatcggctgcggcggcaatcgtggtcgcatcgatcctggagtggccgacggggctggccgcggagagcttggcgcggacgcttctggcgatcgccggcttctacaagctgaagaacgcggaagagcaaaccaacacggcagccgagaacgctcgcaaatatgacgaggctgcggccaaggtggcgaagggtgaggaaccgcggatcaaagccgcgaaggcattggtcgccgctcatgcagccggtgtcgcgttgatcggcgagccggtggcggactggaaggtggcgcgtcgcctgcttcaggacatccctgcgctcagcgaattattccgcgaagtgcggcttgtccgcctcttcagggcgacggatgccctggcatcgggccttagtgaacgctggcttgcatcaggcagttaccggggtgcgagtgacctcgtgaagcgcatccttgaacaggagcggctcatcgctgccgagcgcgattcacagttcggctgcattctgatgaatatgcacaaggccaaaggcaaagagttcgatggcgtggtgcttgttgaaggtgccttcaagtcggggttctttgacgaaaggactgagcaacccccatttgagcgcagccgccggttattgcgagtgggtttgacgcgggcgcggacactggtgacgattgttcgacctcaaaatgcgaggcctttggtcgactag

SEQ ID NO: 71732 - DNA, 2073 bp, Granulibacter bethesdensis CGDNIH1
atgcgaatcaaaggggtcgaaatcgaaaatttccgccttctgcgagacgtagcggtgggcttggaagagcgcaccacgctgatcgtgggccgaaacaatagcggcaagacctcgattgcagagctgtttcgccggctccttggcgagaaagcaccctcattcagaatggaggatttttctctcggttgccatgagtgcttctggacggcgttcgaagccttccggactgaggcttcagagccagatgtcgtcgcgctcctcccatccatcaaggtcacgattgacatcacgtatgatgtcaacgctcccgaccttggcccgctgagcgactgcatcgtcgatctcgatccgaactgtagcgacacaaggctcatcctcacttacggccctcggccagccgcacccaccacacttttcgcagacctcacggtgggcgaggatgtggcggtcaaccgtgcaacccttttccgggcgctgggcagccgcatatcaggtgcctacacggcgtccctggaagcagtcgatcccaatgacgcgaccaatcgaaaagccctggagccgaaaaccctcacagcgctggttcggggcggtttcatcaacgcgcagcgcggtcttgatgatgacacgcaccgcgaacgggatgttctgggtaaggtcgtggaggtgctctttcagtcggcgctcaccgatcccgtcgatcccgcgaagcgtacaacggccgagcagctcaaggcggcggttgagcaaattcagggcgaccttcacgccggcttcaatgcgaaactcacttcgctcctgccgacgttcgatctgttcggttatcccggcctctccgatcctggcctcgtcaccgagaccagcttcgatgttgacaagctgctgaacgaccacacgaaagttcgctacgtcggtgtaaacggcatgaccttgcctgaaacctataatgggctcggcgtgcgcaatctggtctacatgctgcttcagttgctgcgattcttccgcgaatatcaggcggagccgactgcggccggcgtgcatttgattttcatcgaagaaccggaagcccacctgcatccccagatgcaggaggttttcatccggcagctggatcagatcaccagcgcctttgttgctcagcttaacgaaaacaagccctggccagtccagttcgtcgtaactacccactccccgcatatggcgaacgaagcgcggttcgaggccatgcgttatttcctctcgattccagatggcgaaggcatgcgccgttcagtcgtgaaggatttgcgcaggggtatggggggcgcacccgagcccgatcgcgaattcctgcatcagtatttgaccctgacgcgatgcgatctgttcttcgctgacaaggccgtcctgatcgagggtacggcggagcgcatcctgctcccggcgatgatccgcaagactgacagcgccgctgccggccagccgaagctcggcagccagtatcttagcgtgatggaggtcggcggcgcttatgcgcatcgcttcttcgatctcctgtcgtttctcgaattgcgcaccctcatcatcaccgacatcgacgcggtgaagccgaacgatggcgggaagcgcgtcgccgtgcctgtggcagagggtttgttcacgagcaatggatgcttgaaagccgcgttcggcaacgacgtctcaccgcagaccctgcttgggaaaaccgctgccgagaagatcaccggtattcggcgcattgcttttcagataccggaagcgccgggcggtccgtgtggccggagcttcgaggactcctttatcctggccaaccctgcacgtttccccctcgacgacgatgacaaggcgcttgcggcctacgagttggccagtgatcagaagaagtcggccttcgcgctaggtcacgcgatcgagcacacggattggaatgtgcccaagtatatcgccgaggggctgcgctggctggcggaaggcaatccggcccctgcggagccaaatccccccatcgcggtcgaaatcgttgcgggcgccgcgggcgtcgcggtgaacgtgaccggggttagcgcagatggctga

SEQ ID NO: 71733 - DNA, 1767 bp, Granulibacter bethesdensis CGDNIH1
atggctgaggaagtagaaaatccagccgacgccgccgggcgagttgcgcttgagcgaatgtttgcgtgtctcgacaatgggcacagcttccgtctggaggctggcgccggggctggcaaaacctactcgcttgacaaggctcttcgccgcctaatcgatcgccgaggtgccgagctgcttcgtcgcggccagcaagtcggctgcatcacttacaccaacgttgccaaggacgagatcatctctcgcatccaggcccatccggcggtgcggaccgagacgatccacggcttttgttggtctgtcctgcaggacttccaatcgacactgcgtgcgcttgtccccgcacttgaaagctgggcagagcgtctcgaacctgttggcggcattggtacccgccgtgtccactacgagctgggataccctagcgtcggcgaccatcaggtgacgcttcggcatgaagacgttctcgcgctgatgattcaagcgcttgcttatccgaaatttcgagcggttctgaccgcgcgctatcccatccttctcatcgacgaataccaggacaccgatgccgacttcgtcaatgcgatcaaggcccggttcttggacgcgggccaaggcccgcagctaggcttgttcggcgatcactggcagaagatctatggtgagggctgtggtctggtcgagcacgcgagtctggacgtgatcgacaagaatgcaaatttccgatccaccgacccgattgtccaagttctcaatcggatgcggccagctttgccgcaaatggtgcgagatcccaccttgccgggtgaggcgcgcgtgtttcacaccaacctttggccgggcgtcaggaggaccggacaaggtggtggccactggacgggcgatacaagccccgaggcggcgaaggcatattttgcgcatatcaagcataggctcgcggccgagggctgggacctcgcggtcggaaaaaccaagattctcatgctcagccatagcgttctcgcacgcgagcagggctattcgagcatcccgccgatctatggccagttcaacgatccttggctgaaaaaggacgatccacacatcaagtttctggccgaccagttggagcccgcttgcgccgccttcacggcgaagcgttacggcgaaatgttcgaatgcttcggtactgggacgcctaaaatccgtaagcatgcggacaaggttgcttggacggatgccatgaccacgttgatcgcgctacgcacgtcggggacgatcggcgaggttgtcgatttcattgcagcgcagccgcacatgcgtcttcctgggcaagtggaagatgcggagaagcgactggccgatgttggccccgacgcggtggaaggagagtcccgacgcgtgacccagcttcgaaagctgcgtgcggtcccatatgtcgaactgatcgcccttgaccgcttcatcgacgggtatacccccttcgccaccaagcatggcgtcaagggcgcggaatttgagaacgtcctggtgatcgttggccgcggatggaacaaatataatttcggccagatgctcgaatggatcgagcctgggccacccgctgacaaaaccgatttctttgagaacaaccgtaatctcttctacgttgcatgctctcggcctaaggtccgtctggccctcctgtttacgcaagtgctcagtgcaaatgcgatggcgcgactcacggcttggtttggagctgacaacattgtggccctgccagcagatcctggtggcgtgccggcatga

SEQ ID NO: 71734 - DNA, 2088 bp, Streptococcus suis 05ZYH33
atgaaattaacaaaagtaattattaataattttagatcattcggtgatagtcaagttattggatttaacgatcaaactgtactgattggaaataatagttcgggaaaaacaactgtattacaagcattgagtaagctgttttcggataaacaaaatgatagaataattcggaaaagtgattttcatttaccaaagggattaagacctggcgaaaatagtaggaccctttttatagaaactatttttgagtttgatgaactggatggaactgcttacagtccagccattccatcatttttcgaacactttacagtttctcaaggtgatgcaaaaacttttctacgaatcagattagaatcttcctgggaagatgatggaacagttgaaggaagtattgatactcaaatttattatatttcatctgccgaagatattattaaagatgaagataagcaccgtgctcctagaaaggatttggataaaattagggtactctatgtacccgcttcaagaacgcctgagaaggagttgggaaatgcttcaggtagtatgttaagtaggctagtaaatagtataaattggaccgacgatgagataaaagaaattacaaacaaaattgatgagttgaataatacctttttatctgaaagcggagcattaacccaaatcaaccaagaaatccagaaatcgtggaaactatatcatgaagacaaccgtttttctcaggcagagttgactattaattcttctgagatggcgggagcccttagacaaattgctttaaaattttcaccgacaaccacagaagaagcgtttacagtttcagatttaggagatgggctgagatctattttttatttttcacttgttgattcgatacttgatattgagttagaaattactaaagaccgtgaagaaaatcctgataatccaagatttaagctgataccaccaatactgactatcttagctatagaggagccggaaaatcatattgctccacatcatattggaaaactgataaaaaggtttaaacaattaggcaataatgacaactctcaagtaattttaacttcacattctccagctattgtaaaaagaattgacccagaagatttgaggtatttaagaattgaaaataatgacagtgttcttcaaactattgtttctgatatacagttacctcaatcgattgatgagtcttataaatacattaagggagcaattcaagcctatcctgaactatattttgcgaagttagtagtactgggtgaaggtgatagtgaggaactgctattaccaaagttttttgatttacttggaaaagagattgatagctctcagatttcaattgtccctctagggggcagacatgttaactatttttggaaattattgaattcactcaaaattccttatattaccttattggattttgataatgaaagatacgggggtggttggggaagaataaaatatgctatccaacagttactagaaataggtattgagcgtagtgatttagtgacaatggaagatggtagaatattgaatgatgaagacattgctagaattagttccaatcagatatctgatatcttcttaaaaccattgtcatcctggataaaccatttagaaaaattcaatgttttcttttctgcaccacttgatattgatttcctaatgttacagtattataaggactattacctggggactttatctaccaatgaaggacctgtggtttcttatactgatgaaaataatgacaagaaaaaaataagattaactaaaatggacagaacaaatgattatcaattaattggttttaaaaatcgcatcagtgaagctatacaagcaactctaaaagataagagtggacccggtgatagttttactgatgaagaaaaagaactaatgatttggtatcaatatttctttttaggtagaggaaagccgacaactcatatgcaatttttatcatcaattagtgatgatgaattaaagagaaacctacctcctgtgtttgaaaaaatagttagacgtgcggaagaattacttggagatattgactatggtgaagagtga

SEQ ID NO: 71735 - DNA, 1545 bp, Streptococcus suis 05ZYH33
gtgcggaagaattacttggagatattgactatggtgaagagtgacgattggtttcctaaaggagtcattaaattagaggatgctgctttagaagtagttaaagatgttactaacagtctagtcattgctggaccaggtgctggaaaaacagaattactggctcaaaagttagactatcttttttctacaaataaatgtatttctccaaaaaagattttagctttaagttttaaaacagatgctgctgcaaatttgaaagatagagttaaaaaacgttatggtgatgaatatgcttctcgttttacctcattaacctattcggcttttgaaaagagaattttagaccaatttagagatgttctacctgaggatatacgaccatcaagagattatttgattgaagattgggatactataaaagaactactctctatgaatggaattaatgttaatggatggaggatgtcagatataagaaattttgtcgaaaatattatacttaatgacgggaatactcacaaattaaaaaaggatttactaaaaggaacacaagataataagccggtcctcttgtataggcaaataacaaagttgagtactcaaataatagctactaacgaatacatccgtaaagcacttcaaatgacatacgattttgtatttctagatgaatttcaggatactacatatgcccagtataatttattaaaaacttgttttttaggttcgtcttgtaaattaacagcagttggagataataagcaagccattatgagatgggcaggtgcaaaacctgatatttttccagactatattcgagactttaattcaaatgaatatcaattgttgatgaatcaccgctctgtacctaaacttgtaaaatttcaaaaagaggttcatcagatattaaatagtaatcacagttctattcagccaaataattatccagaatttcaagagggtgaaataacattatttgaatttgaaaatgaaagtttagaagctgagttaattgcaaatgatatagaatcaaaaattcaaggaggtatacgaccatcagaaatctgtatcctagcaaaacagaaggttgatgattatagttcaaaattgataactacattaaacagtaaagggattaaagcaagaattgaaaatgaatatcaagagcttttaaaagaccctacttgtaacctattattagatttaatatcatgcagtcaaggaaaacgagatcctttaatttgggaaaatattagtaatttttatggaaatatcaatggaatagatgagtttactgatgaattaattttagcaaaatcctataaggagattgacaatatagttagtgatattacttacctaatttcaaattttattcccaatgaagaaagtatgctaaatttaattgattgtattattgaaaaaatagatgaaaaaagaattatttccaacttttcaacatacaatggaaaaagtgacctagatatcattgtcaagaatttttcaatgttattatacaaagaatattctcaaacacaagggtga

SEQ ID NO: 71736 - DNA, 1671 bp, Streptococcus suis 98HAH33
atgaaattaacaaaagtaattattaataattttagatcattcggtgatagtcaagttattggatttaacgatcaaactgtactgattggaaataatagttcgggaaaaacaactgtattacaagcattgagtaagctgttttcggataaacaaaatgatagaataattcggaaaagtgattttcatttaccaaagggattaagacctggcgaaaatagtaggaccctttttatagaaactatttttgagtttgatgaactggatggaactgcttacagtccagccattccatcatttttcgaacactttacagtttctcaaggtgatgcaaaaacttttctacgaatcagattagaatcttcctgggaagatgatggaacagttgaaggaagtattgatactcaaatttattatatttcatctgccgaagatattattaaagatgaagataagcaccgtgctcctagaaaggatttggataaaattagggtactctatgtacccgcttcaagaacgcctgagaaggagttgggaaatgcttcaggtagtatgttaagtaggctagtaaatagtataaattggaccgacgatgagataaaagaaattacaaacaaaattgatgagttgaataatacctttttatctgaaagcggagcattaacccaaatcaaccaagaaatccagaaatcgtggaaactatatcatgaagacaaccgtttttctcaggcagagttgactattaattcttctgagatggcgggagcccttagacaaattgctttaaaattttcaccgacaaccacagaagaagcgtttacagtttcagatttaggagatgggctgagatctattttttatttttcacttgttgattcgatacttgatattgagttagaaattactaaagaccgtgaagaaaatcctgataatccaagatttaagctgataccaccaatactgactatcttagctatagaggagccggaaaatcatattgctccacatcatattggaaaactgataaaaaggtttaaacaattaggcaataatgacaactctcaagtaattttaacttcacattctccagctattgtaaaaagaattgacccagaagatttgaggtatttaagaattgaaaataatgacagtgttcttcaaactattgtttctgatatacagttacctcaatcgattgatgagtcttataaatacattaagggagcaattcaagcctatcctgaactatattttgcgaagttagtagtactgggtgaaggtgatagtgaggaactgctattaccaaagttttttgatttacttggaaaagagattgatagctctcagatttcaattgtccctctagggggcagacatgttaactatttttggaaattattgaattcactcaaaattccttatattaccttattggattttgataatgaaagatacgggggtggttggggaagaataaaatatgctatccaacagttactagaaataggtattgagcgtagtgatttagtgacaatggaagatggtagaatattgaatgatgaagacattgctagaattagttccaatcagatatctgatatcttcttaaaaccattgtcatccctggataaaccatttagaaaaattcaatgttttcttttctgcaccacttga

SEQ ID NO: 71737 - DNA, 1833 bp, Streptococcus suis 98HAH33
ttggagatattgactatggtgaagagtgacgattggtttcctaaaggagtcattaaattagaggatgctgctttagaagtagttaaagatgttactaacagtctagtcattgctggaccaggtgctggaaaaacagaattactggctcaaaagttagactatcttttttctacaaataaatgtatttctccaaaaaagattttagctttaagttttaaaacagatgctgctgcaaatttgaaagatagagttaaaaaacgttatggtgatgaatatgcttctcgttttacctcattaacctattcggcttttgaaaagagaattttagaccaatttagagatgttctacctgaggatatacgaccatcaagagattatttgattgaagattgggatactataaaagaactactctctatgaatggaattaatgttaatggatggaggatgtcagatataagaaattttgtcgaaaatattatacttaatgacgggaatactcacaaattaaaaaaggatttactaaaaggaacacaagataataagccggtcctcttgtataggcaaataacaaagttgagtactcaaataatagctactaacgaatacatccgtaaagcacttcaaatgacatacgattttgtatttctagatgaatttcaggatactacatatgcccagtataatttattaaaaacttgttttttaggttcgtcttgtaaattaacagcagttggagataataagcaagccattatgagatgggcaggtgcaaaacctgatatttttccagactatattcgagactttaattcaaatgaatatcaattgttgatgaatcaccgctctgtacctaaacttgtaaaatttcaaaaagaggttcatcagatattaaatagtaatcacagttctattcagccaaataattatccagaatttcaagagggtgaaataacattatttgaatttgaaaatgaaagtttagaagctgagttaattgcaaatgatatagaatcaaaaattcaaggaggtatacgaccatcagaaatctgtatcctagcaaaacagaaggttgatgattatagttcaaaattgataactacattaaacagtaaagggattaaagcaagaattgaaaatgaatatcaagagcttttaaaagaccctacttgtaacctattattagatttaatatcatgcagtcaaggaaaacgagatcctttaatttgggaaaatattagtaatttttatggaaatatcaatggaatagatgagtttactgatgaattaattttagcaaaatcctataaggagattgacaatatagttagtgatattacttacctaatttcaaattttattcccaatgaagaaagtatgctaaatttaattgattgtattattgaaaaaatagatgaaaaaagaattatttccaacttttcaacatacaatggaaaaagtgacctagatatcattgtcaagaatttttcaatgttattatacaaagaatattctcaaacacaaggtgaatggctagatatagtatctagtttcaagggtgaaaactcaatttcaattatgactatccataagagtaaaggattagaatatgaggcagtctattttctaggcttggaggattctgcattctggaattttaataatcaacctgaagaagataaaagtgcgttcttcgttgcactttcacgagcaaaaagtcacctaatcttcacatactgtaaattgagaaataatagggcacaaaacaatagaaatattaatgagatatattcattgctaacccagtctaaactagtaaaggttggtaattaa

SEQ ID NO: 71738 - DNA, 2424 bp, Pseudomonas aeruginosa UCBPP-PA14
atgaagttacaggcatatcggctgcagaactaccgccggctgcgcgatgttgtcatcgagctcgatgacgaaatttctatctttgtcggtgccaacaacagcgggaagacatccgccgtccaaggcctgtactcaatgcttcgcggcgaagtgaagaagttcgagctctttgacttcagtgcggcgctgtgggccgagatcgatgcggtcggcaggacgccccctggcgatgaggatgcgcccaaaaggttaccgtccatactcttggatctctggttccgcgtcggtgaagacgacctcgccactgcgatgtcgctgctgccgagcactgagtgggacggcaagtgcgtcgggatccgggtagcgttcgagcctcgggatgcccacgagctcgtctggaagttccatgaactacatgagaaggccaacaacgcagctgtcgcgcttgcggccaagcgcaaggccgccggggagcaagctgtggaggcgggcgcggaagacgcggctgcggtggtggccgatgccggcgagtacaagccttggccagaaagcctgacgaagtacctcacaaaggaactgagcaaggaatacaccttccgctactacgtgctcgatgagcgggcttttgtcggctatcaggcaagggaggccgactacgagccgctacccctaggcaaggagccgggcggtgcagccattctcaagtcgctggtgagggtcgacttcctgcgcgcgcagcggcacctcgatgacccagatgccggtagctctgatcgcgcagagagcttgtcgcggcgtctgagcaggttctatcaccgcaacctggagaagcgtggcgacgaccatgcggctctcaaggcgctagatacctcggagaaggagctgaacttccacctgaaggaagtcttcaatgacaccctcacgcgcctggccaagctcggctatccgggcgtcaacaatccggagatcgtgattcgggcggccttggatccgaccactgtcttggggcaagacgccaaggttcactacgtgatcccgggcgtagcttccgcccaactgccagacagctacaatggcctggggttcaagaatctggtctacatggtggttgagctgctcgacttgcacgagcagtggaaagccgaggatgacaagcgagctccgcttcatttggtcttcattgaggagcctgaggcgcatctgcacgcgcagatccagcaggtcttcatcaggaacgttttgcgcctccttgaggatgctaacgatcacgcgactttgttccacacgcagctcgtcatcaccacgcactccccgcacatcctctatgaacgcggattctcgcccattcggtacttccgccgcgtcaacgaccagttgggccatcacacggatgtgcgcaatctgtcgctattcaaaacgggcgcgtccgacgctccagcgcgcgaattcctgcagcggtatctgaagctgacgcactgcgatctctttttttccgacgcggtgatattggtggaaggcaacgtcgagcgtctgctcctgcctgcaatgatcgagttggtggccaagcgcctgcgttcttccgccctaaccatccttgaagtcggtggtgcgttcgcgcatcggttccaggagctgatcgccttcgttgggctcacaacactggtcatcacggatctggacagcgtgacggtcaagacggacgccgagaaggccgccgcgcaaggcgcaggcgctgagggcgccgttgacggagatgacgaggacgaggacgacgacctgaagcccttcgagcttgaagacgacgacgaagcagaaccgagtggcaagaagaagtccaagaagcgtggcagcacctgccatgcacacgtggaaggtgccgtcacgtccaaccaaaccctcatcagctggatcccgaagaagcggtcgatggcagagctctgggaagtcacggcggagcaaaagacgctgtcgctggctgaggattccagcgctggggttcgggtagcttaccagaccaaggtttcggtgacggtgggtgcgacgacatcacagctctgcggccgcacacttgaggaggcctttggtcttgagaacgcggactggtgccaggctgaggcaaaccggtcggtcggcctcaagctcaagcgcgcaccgagcagccctgaagagctggctgagaagttacacgatagggtggtcggcaagaacttcgacaagacccgctttgcgctggaggtactcgcaagcgggccgctcaatggctggaaggttcccgcgtacatcgccgagggcttggcctggctcgaagccaaagtggcccacgagcttgaggcggatgctgccatcgccaccgaggtcgcgactattgagccgactacagccgatgttgtcgctatcattgttgacccggggcagacggcatga

SEQ ID NO: 71739 - DNA, 1932 bp, Pseudomonas aeruginosa UCBPP-PA14
atgagcagacgaattgatagcccagataccgacgccgaccgcgagatccacgcatgcattgtagcgacgcctccgcagcccttcgtggttcgtgctggcgcaggttccggcaagaccacctccctcatcaaggcgctggactgggtgatctcggagcacggcgccagcatgcgggcgaggaagcagaaggtcgcgtgcatcacgtataccgaccttgccaccaatgaaatcctggcggacgtcaacgatgacccgctggttcatgtctcgaccatccacagcttttactggtctattgcaaagacgttccaggccgacatcaaggtttggctgcagaacgacatccgcaggcggatctccgaacttgaagaagagttcgagaattacagctcgcgtgtccggcagaccacgcgcgacaggaacaaggccgaccaagagcgatatgtccgaagcctggaggctgtggccggcgtcaggacgttcaactacggcgtgggcagtgactacgccaagggcatacttggccacgaggacatccttcagctcgccgacttcctgctacaaaaccgcccgctgttccgacgggtcgtggcgctgagctacccgttcgtgtttatcgatgagagtcaggacacgttcccgggtgtagtgaagtctttcaaggaagtggaagcccagatgcagggcaagttctgccttggttttttcggcgacccgatgcagtcgatcttcatgagaggcgcaggggacatccagcttgaggatcattggcgggccatcacgaagccggagaactttcgctgcgccaagcagatccttgacgtcgccaatgccgtgcgcgcgcagggcgatggcatggagcaagtccgcgggctgcacgagagggtcgatgggaacctcaagctggtggaggggtcggcccggatgttcgtcttgccgaacacgctgaaccgaaccgaggctttggcaagagtccgagcgtggagctcggcgacgaacaacgacgagggttggacaaccccagacatcgcagtcaagattcttgtcatcgtgcaccgcatggccgcaaaccggcttggcttcggcggcatctactcggcgctgaacgacaagacgtcggatgccatgaagcaagggatgcaggacggcaccggttggcccgttcgacccttcctaagttttgcgctaccgatcgttgcagctgtgaaggccggcaatgagttcgcggcgatgagcctgctccgggaattcagcccgcgcctggcgcctgcggctctgaccggccgacgtgccgcggatgtattgcgagagctgcacgctgctgcgtcgaggcttgtcgccatgctggacgaggcagggaccaccattggtgacatagctctccatctctgtgacacgggtctttttgagttcgacgagcgctatgcgcgtgttcttgggtttgtcagggatattgctgacaccgctcaggagcccgaggctgctgatgcagttccggccgaaggattatccttggacgcgacaatggccaagttcttcaattgctctgcgcaagagctttggccctatgaacgctatgtctcagaaggctccccctatgccacgcagcacggcgtgaagggagcgcagttcgaacgcgtcatggtggtgatggacgaggaagaaagcgactaccgaacgtacaactacgagcgtgtcttcgcgagtgctgaggcccgcgctgcagatcgtgcacgagcactagacggtgatgaaaacacttggagccgaacgctgcgactgctttacgtctgctgcactcgtgcccagcgggggctggtactagcgttctttgtcgccgaccctgcgaccaccctggaaaacgtcgtggcgagcgggatcttgccgcgaagcgcagtctttacgcaggaagtgttagttggatggccatag

SEQ ID NO: 71740 - DNA, 2112 bp, Pelobacter propionicus DSM 2379
atgcatatatcttgtttatcaattcggaacttcaggaacttcaaaagtgcccaactgcattttagaaaaggtatcaatactatcattggagaaaatggctctggcaaaacaaatctttttttctctttacggattttgattgataacaccctgccgagatatttcaaattttatcaaactgattttaatagggtgttggatagttgggccgggcattggattattatttcaataacatttgacggattagacacaagcgaagaagcccaggcattagcgatacagtcaagtggacatatggaaacagccacacaaggaagctattcggtatatttcaggccgaaataccaatttagaaaagaactttacgaatactctcaggttgaaggcaaggattcagcaggattgaaacttttgttggataagctggcaattgaagattatgaaaccgtctatttatgcaggagtacggcggatttcagcatagatgatatttataaaaagtacgttggtgattttgacaagattgaattcccagaccctgatgataaagaagaattgatattcgggacatggttacccaaagaaatcaatatccacaacgaattgtcctgcacattcattaaagcacttagagacgttgaaagcgatttacgttcctattcaagtaacccactaataagccttttaagaggaaaagaaaagaccgttgaaattactaaacagcacgagattatagagagtattgaccagctgaacgaacaaatcagttcgctcgatgaagtgatggaagtaaagaacggtattgataagagcattaaggaaacggttggtactacctatgcaccaaatatcgacataaagtccgaacttccaaatgaaatggagaaactgttccaatcgttaaaactatggattggcgacccagacgaagatggtcacaaagggagaatatcggaattgagtttgggaggtgctaacatcatttatctgtccttaaagttgttggaatatgaaaaagttaagaccgacaggattgcaaatttccttttggtcgaagaaccggaagcacacgttcacactcatattcaaaaaaccctttttaacaatctgaaagagaacaaaacccaagtcattgtatcaactcattccactcatatctcgtcagtaagcaatataagccaagtcaatatattgagtcgtggtgacaaagaggctcaaatattttatccgtcaaaaggtctggacaaagacgaaattataagaattgagcgataccttgatgcagttagaagtaatttactatttgcgaaaggtgttgttttggttgaaggtgatgcggaacagatattgattccagagatgttcaaaaaagtctttgggctttctttggatgaaatcggtgtaagcttaataaatataggtagtaccggcttcgaaaacgtcgcgaggatttttcatcctgacagggtaaggaaaaactgttccattctcacggatgatgatacgtccatcgtgacacttcctgcagaccctaaaaccgacaccgagtaccaggctcattgtagagcatcagagaaaagtggaaaagaaaggaaacttcgacttacagatttttgcaaaggaaacacatatataaagccgatttatgcaaagtatacgtttgaagttgatttccttatgaactctaacagctatgaatttgccaattgcttggattcgatttataagcaaggcgctgcgattgataaggcaaaagaaaaacttgaaaacaagtcagtagagattgctggtgtcgaagttttaaggattgcgggcaagcatggtaaagggtggttggctttattggtagcggaacaacttgtatataacactttcattccaaaatatattcttgaagccatagcatttgctgctgcgcatattaatatatcctctaaagcaaaggcggtactgcatcgcattaaacatattcaggaacacgatggcaattcgcttcaggaaaaggccaaagactttgacgttaaggataaatcacatgaagagattgtttccgctttcattgctgatttcaaaaacgaccaacttacaacctttttagcattcctatga

SEQ ID NO: 71741 - DNA, 1776 bp, Pelobacter propionicus DSM 2379
atgattcttgctaaattaaaccacgagcagaagttggccgtgaagcaggaagggcatgtattattgacggcttgtcctggaagtgggaaaacacgagtattaatccataaacttgcctacaacctctcaaagcttcctgaaaacagcaaaaagcgaattgccgccgtaacgttcacagttagggcttcggaagaaatatttaggcgattaaatgggatagggattaacagcaataatatctggtctggcactcttcattccttttgctttgaatggataataaagccttattcatgttatctgccagaattgtcaaatgggtttgcaatagccgacgaagcattttgtgcggaattggttagcagccttaaagacaaatacaagctgaagcaaatagatccggtaaatttcagaattaatagagatggaagttatgttgaaaataaaagtattcaacagaagctaattgctgagtatcacagcatccttataagtaacaagctcatagattttgagctaattttgtattattcatacaaattgcttgtcacctacccgaatatccaaattacattatcaaatatatttgaactgatatgtgttgatgaataccaggatactcaggatttactttatgcaattatctcggtaattatcaaggcaggtaacggaaagacatctttattttttgtcggggatactgaccaagctatctacgcttcgctcggtggtgtggcaaaaagtttacaggaaattaaagccgaaatagacaatatgccaataactcacttgactcttaccggaaactatcggtcaagccaaagaattattgatttttactcaaattttcaaactcaaaagtatcagattcatgctgtcggaaaaaacgccaaggaagaagggcttataacgttcaattcagatattcatcattcaaatattgttgatgaaattgcgaaattgattcaattaagtttagacacaggcattccagaaaacgaaatttgtgttctcgttcctcaatggtggttaataacgattgttacgaagaaattgcgtgcatcattgccaggtgtgagttttgacgcatccgggttagcacccatgtcaaaaaacagagaaaatatttggtataaactatcacgtcttttgcttactgaaccaaatccgaaaatttattcttcaaggtacagatgggcaactgatttaattgatagtttccgtgttgacacaaatactgaattcaatgaactttataaaaatgaacgtgacctgttgaggcttattaattccataaagtcttctgaaatggaaggtattgattatttaaacgattgttttgaccaatttctgcaaatcataggcatcgaccagcttaaatatccacaacttgtagaacacaggaacctgttcttcgataatattgataaaagattgaatgacgatacctttaaggtgccaagtgatattcaatcattcaaaagtttttacagggaaatgacaggcgtaataatcaatacatgtgttggtgtaaaaggcgaagagtttgatacggtcatttcctatggactgttaaacggctacgtccctcattggaatgatattttttccggcagggcatctgatgcagcaaaaaaattgttatatgttatttgttcacgagccaagaagaatttacacctgataagtgaaattggcaggacaacgaaaagtgggtctgatttaggcattacgcccgagctaaaatgcatcaaattcgagtatgatgttgtctaa

SEQ ID NO: 71742 - DNA, 2319 bp, Shewanella sp. W3-18-1
gtgtatttagaaagtctaactataaaaaattaccgaaaatttagctctacagataatactatatgcttcgtaaagccgaagcccatcgataagagaactgaagaagaacaaccgaagccagtgatatcgccctctacaaccttaatcattggtaaaaataatgctggtaaaactacggtagttaatgcattaacaatgctatgtcagaataagcagccatcaacctcagattttaatctctcttatctaaacgaattattcaataaatacataagaaaatttgaagctgatgaaagcacaaaattcgaacacctagaaactcctaatttagaatttacattaattattaaaattgacttcaatgatcaagatctaatgactcatcttgcaccttttatatcaattagtgaaatagataatggtgaagcgattagcatacgtatcatggttaaaatatcacttgccgaagagtcaacatttaaagaagaagttagaaatatttttaaagcaaccgattcaaatggaaataagctgtcggataatcagcgtagagataaattctatgcgctactttcgaaagcgactagtgtgattaaaaatgaaggaaatctttacaaagttgattttattgattgcattggtaatgttgcagaaaagttttccattaatcatctgataagtgttaaagaaatcaaagccaaccgtcatcttaaagaaaatgtgttaagcactgtttttagtaagatagttgaatttcagttcaacaatgatgcaagttctcgctcaaatttggaggctagcgttcaagatataaatcaagttatatctaacaatgtaggttctaaaagtaccgaaatatctaaagtattaggtgaagttgaaagtcgtaacaaagttgatatggatctttcaggtaatgttacttattcgacgctaattaaaggactaattaaatataattttatggatggtgatgattacattcctgaagatcaatttggcttaggttatatcaatcttttaaatattatcggggagattatccacttcgttgatagttatgaagataaaagtcatttaagtcacattaatttactttttattgaagaaccagaagcatttatgcatcctcaaatgcaagaattcttcataaagcgtattgataatgcggtaatgaaagcacttgaaatcgcaaataaatcttcaaaattagcaaaaacattacaatgccagattgttatcactactcattcatctcatatcgtcaacagtaagatccacagtagcaatactttcaacaatcttaattacttaaccacaataaacaaatgtacaaaagctattaatcttacggataataccatagtaccttttgataatattgattcaacaaaagatcttaacttcataaaaaaacatataaaatataaagtttcagagttattcttctctgatgccattatatttgttgagggaattaccgaagagactttactaaattattttttggaaaagcatccaattcttagtaactattacatttcggtattcaacataaatggtgctcacggtaaattgtatctacctctggctgaaaagcttagtgttcccagcttaattgtgactgatttggatattaagcgcgaagagtgcgagaaaggcataaagcataaaaataataaatcatgtagtatatgtggtcaaagacctaaagatggcgataacccatatatagaaggaactgaaccaaagtacgttcaaattactaaccttaaagggcgcacaacaactaattcgacgattaaagagttaaactttaggcttaacggcatatcagaaaaagccgattttcttgatggcataaaatttatagaaggaactaatttttatgttgttttccaaaaagaccctattgaagaacagtacgcaactagtttagaagaagctttaatcttaaccaattatcaaaatgatatgatcaatgaagtaattagacaatgcaagccagaaatatatgctgatattataaatgatggaggaaatgaatcacgaaaaaatatactcaataactcttataaactacaaaataaactttcagacagtaaaagtgagttttccaataagttactttttagtttgctctcctcagaaaatagcgacctttcaccaaacttacccaagtacttaaatgatggtttagattggttagctactaagctacaaactaatgatagcgctttatctatgcctattaatgccaatgccgaagtactaagtggtataattgaggatctggaggcaattgatcatgacgcataa

SEQ ID NO: 71743 - DNA, 2136 bp, Shewanella sp. W3-18-1
atgacgcataatgaaattgctgagctagaggtacagaaagctataaataatagtattgataattttaaaagctttcgtttcaatgctggagctggagctggtaaaacttatgcactaatagaaactctgagatatgtcacaaccaataaaatagtgactaccaaaagcccacaaaaagtagcatgtattacctatactaatgtagcagtgaatgaaataaaaagtcgattgggaaattcagatattgtacaagtttcaactattcatgaaagattatgggatataataaaaaatgctcagcctgagctattgatatgtcataaagaaaaaatcatatctgttttagaccaacataataatgaattaaataacattaataacaaaaacacaaaaacctttgcaaaattaactaccgaagaaaaactagagttcatttcacttgcaataaaaactaaagacttgttctataaatcagaaaagttaaatgcgacagcatttagggattattacaaaaaaaatattgaagagaataaatacaaacttttagatatacatctaaaaaacatagaaaactttaaaaaaatcgtcaagattatttataaaattgaaaaattagaagcctgtttggaaagaatttccacaggtatagaaaatcgtgtaaattatgacagcaaggtaaacttggatagacttcattacatgaagtttagccatgatacacttcttgagtatggattaaagttaattaatacctaccctactttatgccgcatcattattgatacctatccttatatattcattgatgaatatcaggatacacattgtaatgtaattagtttttttaaaaccatcaatgaatatgctaataaaaaaaataaaaaatggatggtaggatattttggagatacagcacagaatatttataatgatggagttggtcgaaaaattgaagaacttcatagcgggctgattaatatccaaaaaatattcaatcgtcgttcgcatcagcagatcattgatattgccaataaaattcgtgccgacaatatagttcaaaaacctatctttgaaaaacgaaatgaaggctcagtaaaattttattaccatgactcagaaaacaagcagacaattgctcaacaattcttatctgagtatcaaactgatctttttaatgtcgatagtgaaacagaagtaataaatactgaaagtaaaaaaattcattgcttggtattaacaaacaaactgatggcaagttttaatggttttggtgatgtttatgatatatatcaaaattcatcaatttatttcgaaaatctaaatactcaagtgttatcccagcaattagaaaagttacatccaacaattttaacgatctactatctgattagtctttaccaagacttacagaagagaacggtatcctacttcgatatttttggatcatcaagtaaaaatctaactttcgcgaaggcaagtttgatcatacaagaattagaaacagataaactgacatcattaggtgactggatagatttgattactgatcggcttaaaaatagtacagctaaagagactctatctaaaatattaataaatcgagttcattatgaacaagataaggttacttcatctgatatattccgcgacacgttgatgagtaggattaatagtttaatgagtgatgattctgaggaagatgataaagcaaaagaaaaaatattaagtattttaaatctaccaatcaagtcattagtaaactgggttaattttatagatggtattgaagctgatgatattagttatcatacgtatcatggcactaagggggaagagtataataatgttgccatcatccttgaacatagctttggtaataagaatagagataagtttaaagattattttctagttttacagcaaagcacggaagaaacacaattcttatttacagaccctgttgaggaagaaaagcatattaatacgcaaaatttgctttatgttgcttgctctagagcaataaaaaatctcagagtactgtacttagatgatatatcggaaatacaagagggtattaagtctatttttggcgagttacaagcttggcccgtagttgaaaatcgaaaacctgcgtga

SEQ ID NO: 71744 - DNA, 2139 bp, Acidovorax citrulli AAC00-1
atgcacatctccaagctcagcctggtcaactacagaaactttgccaacaccaagctcctgtttcaaaagggcatcaacaccatcattggcgaaaacggatcaggtaaaacgaatctgttccgagcaatcaggctgctgcttgatgacaacatgattcgatccgcctaccgattggaatcaactgactttcatagaggtctaggaaggtggcaggggcattggatcatcatcagccttgagttcgaggagatctcggctgacgaagcagtccaggccttgtttaggcatgggacgggcggcatcgacgatgaggcaatcggcaaagccacctacaacctcatctttcgcccaaagaaagagatcaggcttcgcctctctcaattggacgatggcgatcacgctggtctcgctgcgatcctgaatcctgtcacgctggacgactacgaaaccatcttcacgggccgaagcgacgctgacttcaacgacgaggccttctacaaggaggtggtcggtgacttcgagaaggccaggttcaacgaagaaattgagtttcccgctatcggtgccaagattccgagcgtgctgtccgtgtccaaggagatttccttcaccttcgttcaggcacttcgagacgttgtatcggagtttcataacaacaggaccaatccacttttgtcgctgctcaagggaaagagcggcgatatagatccagtggcattccagctcatcaccgatggggtgaaggctttgaatgattcgatcgaggcattgccggacgtgcaggtcgtccggagcgatatcagcgacaccatcaaggatgcggcgggcgaggcgtactccccctcatccctgtcgattaagtccgatctgcctgacgaagctgacaaactgttccagtcgctcaagctctttgtcggcgagtcgggagaaggccacgaagggccgatccatgagttgagcctgggtggagcgaacctgatcttcctcaccttgaaactgctggaattcaagtatcagaaagccaagcagtcgatcgcaaacttcttgttgatcgaagagccagaggcccacatccatacacacattcagaagacgctgttcgaccggcttcagtacgacgacacccagatcatctattcgacccattcgacgcatatctcagaggtcagcaacgttcagaacgtaaatattcttggccgggagcgtgatcgatgcgaggcctaccaaccgtccacgggcctggggccagaagagatcggcaacatccaacgctacttggatgcagttcgcagcaacctgttgtttgccaagagtgtcattctggtagagggcgatgccgaagaaatcctgatcccgattctggtcaagaaggtgctgggcatcagtctggatgaactcggaatcagtttgatcaacatccgaagcactggcttccagaacgtagccgttcttttccacgatgaccgaatccgaaagcgatgcagcatcgtcaccgatctcgacaagtccatcattgacacaacgcccgcagcgggcgatcccgagggggtgcttcggcgcaagaagaagtaccgggcctctcaggaaagtggaatcgcgaggaaagcgcttctggatgagtcgttcaaagacaatccatgggtttcgccattctttgcaccgcacaccttcgaggttgatttcgttgctgctggaaatgcgaacaaagtggttggcatcctccctgatatctacaaggacgcgccaaccatcgcaatcgcaaaggcagagcttgagtcaccagacatcgccctgtacggccagcgcgtcctgaccatggcgggcaaccacggtaaagggtggttcgccatcttgctggggaagaagatcgatccacaaacagccatcccgtcgtacatccttgatgccatcgccttcgcgcatccagtagtcacaaaggaagtctggttcaatgtgctgagctatcgcgtcaactacatcgatgcggaggatctcttcactgcatcggcggtctttgatggattcagggctaaattgcaggccttcagaaagggagatatcgatttcgttggcatcaggaacgaaatgctggccaccttccccgacgatcgtatcaacgacgttctcaaggtcttctag

SEQ ID NO: 71745 - DNA, 1800 bp, Acidovorax citrulli AAC00-1
atgttcacgtgggacaaggaagatctgaatccggagcaggaggctgccattctggagcctggaagcgtttttctcatcgcatgccctggcagcggaaagacccgcacgctgacctacaagatcgcctatgagttgtccagactgaaatcgaacaagcagttcgttgttgcgatcacatatacgcaccgcgcggccgacgaaatccatgagcgcattgagggccttggagtggacacatcccgactatggataggcacgatccactcattctgtcttgaatggatactgaagccctacggcatctatcacgaggcattggagcggggctaccgcgtgatcgatcagcatgagcgcgagaagattttggaggctctgtgcaagccctaccagaagccaaagataactttctgggattgcgagttttatttcaccgaaactggctatgtgctttcctgtccacaagcgtggaaacacaccggcttgcacgccatattgggaaagtatttcgagaagctgcaggaaagccggcagatagactttgaactcattctctactatgcgtatcaactgatcgccagccgtcctgcgatcagcgtccttctagggcagctattttctttcgtgctgatcgacgagtatcaggacaccaagcgaattcagtactcgatcgtcacggccatcttgaaagctggccaaggtgccaccaaggccttcatcgtcggtgatccgaatcaggcaatttaccagtcgctcgggggatacccgattgccttcgaggatttcaagacgatggctggcattgacctgaagaagctcgaactgtcgaagaactaccgttcctctgagcgcatcatcgactatttcggaaattacaacgtccacgacacgtgcattgaagctgcatccgacgaaaaatcttatccgagtcttgtttcgttcgatgccacggtgaacaagacaggcttggaagccgagttgatccggctcatccgtttcaacatcgagactgtcggtatcgcgcctcacgaggtgtgcgtgcttgcacctcagtggacgcatcttgccagcatgacacgccgtctgtgcgcgagcatgcccgagtattcgttcgatggcccggggatggttccgtttgcgcgtgacactgagaatttttggtacaggctttccaagatcgcacttacccaggcatcgccgggaatgtatgtgcgcagacttcgttgggccggtgaaatccttactgacctggaggcggctggcgccagcgtatccaagctcactcgaaagtcgttgttgagagaatgcaatgcgatcaagatcgatgagacggatggactcacctacctcagcacattcttcgagaggctgttttcaagtttggccatcgattttcgactcttcaccacccttcgggagcatcacactgcgttcttcgacagttcgcaagcgcgggttgcccgattgaaaagtgagggaagcgaattcatcggagacatcggaaccttcaggaaggtttttcagagccggacgggcatcactatctcaacgatccacggcgtgaagggggcagagttcgatgtggtgatcgcctatgccttgctggaggacatggtgccgcacttcaacgatccgaacggccaagaaagtgccatgaaactcctttatgtcattggctcgcgagcgaggaagaacttgcacctgatctcggaacgaggtcgtattcgccagtattctggcgacgagtaccaagtgacgcgaaagctcgccgcatgtagttttggttacgatcaagttccatag

SEQ ID NO: 71746 - DNA, 1926 bp, Acidovorax citrulli AAC00-1
atgcaggtagcccgtatcgagatccacaactttcgcggaataagggaagccacgctggacctcgttcaacatgccgtgctgctaggcgacaacaacaccgggaagacaacggtattggaagcgatggacctcgttcttggaccggaccgacttaatcgcacgccgccagtagacgaacacgatttctttcttggccggtatctacctgagtcttcggtgggagccgaggaagacaaagctgatgaagaagtagttgaccaccctggagatatccaacaggttgcagagggacaggttccggaacagggcatcccggtcgcaggggagcaaactgagggtgcgggagcacctgccggcgaaccggaggtgccagcgccccaaatccgaattggagtcaccatcgctaacctgtcggaagaacagcaggggcgctttggcgactacatcgagttctgggacagcaaggagaagaagctgtatcaggacccggctcccgaaggtgttgacgcagcgaccgtctcgccggccttgcgcgtcacgttcatcgggcaatacgaccccgaggaggacgactttgagggcaagaccttctacacggtgaccctttctgatggcgcccccgtgcccttcacgaagaaggacaaacaggtgtgcggattgctatacctacgctcagtgcgaacgggctccaggacgttgagcctagagcgcggcagcttgttggacatcatcctccgcctcaaggaagttcggccccagatgtgggaggatgccatcggccgaatctcggcgatctccgtagccgaagaccccagcctgggcatctccggtgtgctggagagtatcaataccgcattgaagaaatacgtgcctaaggagtgggggatcgagccacatctgaaggtgtcgaacctcacgcgcgagcatctgcgtaaggtaatcacggcgttcatcgccaccggcgacggcacgcacgcagcccccttctaccgtcaaggcacagggacgataaacatgttggtattggcgatgctctcgcagatcgccgaagacaagcagaacgtcatctttgcgatggaggagcccgagacggcgatccctccttacgcacagaagcgcatcattcacgaggttcgcaagctcgcatcgcaaacgctattcacttcgcactcgccttatgtgctggaggagttctcgctgccggagaccatcatcttgtcgagagacggctccgggtcattgaagcaaagcggcgtcacgcttcccgacagcgtgaaacttaagcggtacagacaggagttcaggactcggttctgcgagggccttttggcgcgccgcattctgatcgcggagggtgcgaccgaggcttccgctttccccgcagcttgccgtcgcttggccgaactgaacccggccgtctatgcctcgctcgaatcgctgggcgtctgcgtcgtagacgccggcggcgaggggagcattccggacatggccaagatgtaccggagcatcggcaagcgcaccttcgcattgtgcgacctgcaatcacccgaagcccaagcgctgatcaaagcccaggtcgagcatatgttcatgcacggcgaaaagggcatcgaaaacctggtactcaagaacacatccaaggcggcgctggatcgtttctcggatctgcttgattggcctcaggacctgctggaaaagttcaaggatccgaaggctgacgtagtcaacgcattgatggcctactttgcgaaaaagaagggagacatggggatcgccgagttcatcgcccaatgtgatgaggccgaagtcccccagtggatcagggaagcctgcgtgcaccttaaggctctgtgccagccgacggctgcggcgcccgctgtagccactgtggtcgcggcacttgcggcggacccgggcgccgcttga

SEQ ID NO: 71747 - DNA, 1812 bp, Acidovorax citrulli AAC00-1
atgaaactcaccgataagcagaaggacgtcctcgagacctccggccacctgttggtgacgggcgggccgggctcggggaagacgacgatctcgattctgaaagctgccgaagtagccgtggccgcgcgaccgggacaggagatcctgtttctgagtttcgcccgcgcgaccatcagtcgcgtgatggaagccatcgagaacgagcacgacattcctcggcatatccgtgcccggatcacggtggagacgtatcactccttcttctggcgcatcctgaagacgcacggctatctattggggctaccccgaaagctgtccattctgacgcccgccaacgaagcgatcgcgctatcgacaatccgcagggaatacaagccggccagcaagctgacggatgaagaacgatcccaaaagaaaggacgagagagcaaagagcgcctaagactcgcgacggaagatggtcgggtgtgcttcgacctgttcgccagcttggtcgcccggcttctgtcgcgcagcgagcgactgcgtaagctcgttgccacgcgctatccgttcattatcttagatgaatttcaagataccaatagcgaccagtgggcagtagtgcaacaacttggtcgtaccagcacgttgctcgccctggcggatccggagcaacgcatctacgactggattggcgcggaccctgagcgactcaaccagttcctcggagtgttcaaggcgcaggagatcccgctggcgggggacaaccaccgcagttctggcacggacatcctgctgtttgcaaacgaagttctcacgggcaagttcagccggaaggccggcgggtatacgggtatcgaactgaaaggctaccctgcaaacgagaacgaagctgccgtcgccctcatcacgacgacctacgctgcccgaaaacgcttggtcgctttgaagaaggcagattggtcccttgcagtgctcgttccaacgaagaagatgacgcgtaacgtgtcggatcttttcaggcagccgccaagcaaacttactgcaatatctcataccgctgcggtcgaactcgacgctgccatcctggcggccgaagtcgtctcctacctgatgcagccgacaacgctgttccacttggacggcttcatcgatctactctgcaacttctaccaaggcaagggcggcgacgctcctgcaaaaggtgacttgcaggaggcggacaacatccgcaaggcatttgcgatgtcggcgcagagaaaggcagccggaaaggcgctgcccgccaatagcatcatggtaagactcttgaagacttacgagcaagcccgggttgtagctctatcaggtgatcctgatgcggattggcgcgccatcagacaagtgctcgatgcgagttcttgtccgcgttgcaaggaggttgggcttgaagtcaagaacatccgcctgcttgaacgcggcacccagctacgtcaggaactctcggaggactggcgaacctttggccactatgaaaacgctctggaaatcacgcgtcaggcgttcgttcgcgagcacttttctactcaagcgagccctccctcaggcgtcttcgtcatgaacatgcacaaggccaagggaaagcagttcgacgaagtcgtcattttcgaaggctggccgcgttactacaaaaagcagatcatcggaaacccggacaggatcattcgaggaaacgctaaagaaaatctggatgaacaggcccgacagaacctgcgggtgagcatcacccgtggcaagcttcgcacgaccatcttgatgcccgatgccgacccgtgcatcgtcttcaagtaa

SEQ ID NO: 71748 - DNA, 1914 bp, Polaromonas naphthalenivorans CJ2
atgcggggttggggaatacgccgtgtggcgtatgaagcatggcataagttgtcaaaacccctcaatttgtcatgcgagagagtcgcgaagttcaccactgacattttttcaaaagtaaacttatcatgttactcaaagcagaaaacagtaagaaataaaatcaatatgcatctttcaaagataaaactatggaatttccgaaaatatggcgacaactcaacatttatcttggaaaaaccaaatctttatctagacttcaactctggcctaaatgttttaataggtgaaaacgattctggaaaatctgcaatcatagatgcgattcgccttgtgatgaaaacgcatagttatgactggctacgaatcgatgatgacgattttcatgtaggacagaacagactaagaatcgagctaactttggcagatattaagccagaggagggtaaaaattttacagaatttttgtcttgggaaatactcgatggaattacagttccatccctacgactcatacttgatgtcaagaagaatctccttactaaccaagtttccccctatgaagtacgtgccggagctgatgccgatgggagacaacttagtccagaagcgaaagagtacctaaaagtaacgtacctcaagcctctcagagatgccaaagaggaattagttgcaagaaagaattctcgtctttctcaaattctcgttggacatgaggcattcaaaaatcgtggaactgaccatttactaatggggcaattagcaaactttaacgaatctatagagaattatttcaacggaacagatctgatgggtgtagaaattacggatcaatttggtaaaagtttaaaagatcaaattgatacatacgtacaagcactttatgagccagacaaaaaaactgaattagctgttacagaacgaggtcaactaaagaacctcctagaaaaactcgaactatctattcaaggagaaacccgaccaggattgggtaccctgaatagacttttcatggcatccgaacttctgcacttaaacaaaaataactggacaggaatacgccttggattagtagaagagcttgaagcccacttacatccacaagcacagatgcaagcaattgagacgtttcaaaaacatgatgaagtacaactaatacttactacacacagtcccaatattggctcaaaactagagctcaaaaatctgattatttgtagcggaggcaatgcattttctatgaatgccgaaaacacagaattaaacactgatgactacgtatttcttcaacgatttttagatgtaacaaaggcgaatctattcttttcaaaaggaactattcttgtggaaggatgggcagaagaattaatattaccagagtttgcaaaactaataaacttcaacctcaccgaaaagggtgtttccgttataaacgtagcaagtattgcctttattcactatgcaaatattttcaaaagaaaaaaaattccgcacctcatactaccagtagccattattactgatgtggatatcgctccaaacgacgaagatggaccaatcccaggcgacaaacagaagcttaccgaagcatgtagactgaaaaaagaaaaatacgatggccaatgtgtaaagtcatttattgcacctcaatggacactcgaatactgtctttctaagtcaagcaccttcagagaaaaatttgcagagatcacaaagactgtgcatagcaaaacagactggacagacttcgatgcaaaactagctgaaaagttaaaaaataaaagcttaaagaaaacagagattgcaagccggctggcacaagcaatttcaaagggcgaaattgacaaaaccaaaatagctgaagatatccatatcaaatacttagttgacgctatcaaatatgcttgtacaacttaa

SEQ ID NO: 71749 - DNA, 2010 bp, Polaromonas naphthalenivorans CJ2
atgcttgtacaacttaacgtctcagatgacgatattgcatatgccgaaagaatacttctacctcttggctgcatctttgatgaggagcgtagagaattcattcgaaattttgggacacttgatttacaagctgtacctggaagtggcaaaacaaccgccctacttgcgaaactactgattcttgaccgttatttgccatttagcgatggctctggcatcttggttatttcacacacaaacgctgctatagatgaaataaaaaataagataggttttgcatgcactaaccttttcaaatatcctaatcatgtagggacaattcagagcttcgttgacaagttcgttgcaattccgttttatatcgacaaatacaagaaagcacccctacgaattgatgatgacatttataatcaaaaattttcaaagccgccctacaacatcaaaaatcttactccacaagacagcaacaatgccaagcattggcttagagcaaatatcaaaagcatacgctggtcatttttgcaagggaaaaagactctaacggatggctattgtggaaaagagattgatttcaaaaagccgaagggaaagaccaagaactacatcgactggaattcgaccgaaaaaaagaatgttcgctcatggatatataaatttaaagcccaaattcttgatgctggatgtctttgttatgacgatgcatattttcttgcaagcgtttcactcgaaagaaatccagccattaaactttttcttcaaaagcgttttacatatgtttttgttgatgaaatgcaagaccttcaaaagcatcaacacaatcttttagaagaaattttttttgatgatggaacgagtaactccatctatcaaagaataggtgataaaaatcagtctatttatgatgcaaaagaagctgtctcacagccattttggaatgatcgccaaaccgtcttggaactaaatggtagttatcgactgagttcgatacttgccggagtcgttagcccattcgccatatctcccctgagaattgaaggacggaggaaaaatacggacgggagtgacgttcgcatcaaacctcacttaattatattttcagagaaaaacaaagaatatgtaattcctcgcttctcagaaattattaatttcctgataaatgacggaagcatttcggcaagtccacgtaacaaatataaagcaattgcatggacaactaaaaaggaagatggaaaattacgcctcgccgactatttcccagatttttccaggcaagaacaacagcgaactacagaatatctgacacttgagagctacatcacgaattacgataaggaagatagaacgctgttctccatcgagcgaaatatttgcaattcacttcttagaatcttgagagaggaagagattgttggtgctgataaatcacaatacacgaaatccaaaatgcgtgacttcctaaaagaagccaattccaactatttttctgcatttgaagcaaagctatacaaatggtgtttaagcgttattcaaggagaaagcgctgcagtattggtagacataaaaatcaatctacctgaattcatttctcaattcggaactcgaataaataatagcagcaattttataaacaaaacaggcaacacccctagttcagcaccaatcagcgctaataacaaaaccgcaaatgtttttcagtgcaacggcttcaaagtggaggtatcgacggtacatcgcgtgaagggagaaactcacacggcgaccttgtacatggaaacattttatgaaaaaaaaggtggtggtggaaattatgagtccgagcgtttgatagcttccctgaaaggtaatgccatagcagccaatgcgcacaatctgatcaaacagtcggcgaagatggtttatgttggattttccaggccaacacatctgctgtgcttcgcagtgcatgagtccagattcgcaaaattcgagatggacatcgatcatgatgtctgggaaatagttcgactatag

SEQ ID NO: 71750 - DNA, 1938 bp, Polaromonas naphthalenivorans CJ2
atgaaacttactcggctgcggatcagcaactttcaatctttcgggcccgtgccaacccccatcgatttcgaggcgatgaccttcctgctcggaccgaacggtgccggcaagaccgttgtgctccaggcgctggcgaggctcttcggattcgacccgtcgctgcgacgggtgcgccgttctgattttcacatctccccagcaaccttggctgcaggcaacgccggcaccctgaacttgtggatagaggcgcagtttgagttccccgaactgctggatgcgaacggccagcatgccaccatcccgggccacttctcgcacatgcagcttgactccgccgatggcgtacccagagtgcgttttcgcttgacagcgatcttggacgaggacggtgacatcgaggagaagatgcattacgtgatccatgtcgatgccaatgacgagcccgtcaatcccatggtggtgccaaagcacgatcgcaactcgatccaggtccactacctacccgcgcgtcgcgatccgaccgaccacatctcttacacggcaagctcgctgctcggacgcactttgcgcgcagccaactggcatgcggaacgcgccacagttgcaggcctcacacagggcatcagcgccgcgctcgcttccaatgcgggtgtccaaggcatcggcgagcagatggctgggcactggctgaagctacacaagggcagctactacgcgagtccttctgtttcgttcgaacacaatgagatcgacaacttgctcaggcatttgacgattggcttcacacctgggcacgaggcatcaatggtggatttttcccgcctaagcgatggtcagcagtcgctgctgtatgtctcgctcgtgctgtccattcagggcatcgggcggcgcgtgctcgccggtcaacttgatgccttcgacatcgacaggttgcggccagccgtcttcacgctgatggcgatggaagaaccggaaaacagcctctcgccgcattacctcggccgcgtcatcaaggccctcactgacttcgcaggccaccatgacgcgcaagcggtggtcgccacgcatgcgccatccctgctgcgaagggtgccgcccgaaagcatccgctacctgcggctcgatgctgcgcgatgcacgacggtcaagacaattgtcatgcctgcaaagaccgacgaagcccacaagttcgtcagggaggcggtgcaggcatttccggaactctacttctcgcgactggtgattcttggcgaaggcgacagcgaggagatcgtgctaccgcgcctgttccgagccatggggcttgccgacgacgacacatcaatcgtaatcgcaccgttgggcgggcgtcacgtcaaccacttttggcgcttattaagcggccttcagattccttacgtgaccctgctggacctggatgttggacgccatcaggctgggtggggccggattcgctacgcagccaagcagattttggcgctctggcagtcgactcctaacctgacactggaagccatcgaggcgctgcctgcatggaacgggcccgaccagattctgtcctcgtcgcaaggtgcgaaattgctgagttggcttgagaagcaaggggtgtttttctcgtcgccgctcgatctcgacttctcaatgattcaggcctttcctggggcctatggcgtatcacaggcggaactggtggcggcagacgacccgactgtcaagtccgtactcggcaaaagcggcctcggtcccgatcagtacagcactgaccagcaaagctacttttctgcctaccacgcgcggttcaagctcggaagcaagcctgcggcgcatctcgaggcgcttgccaaactcgatgatgcggccttgactgcaggcatgccgccgccgatcgcaagactgatcgccttggtcgagaaaaaacttgcggacctacctgagtga

SEQ ID NO: 71751 - DNA, 1665 bp, Polaromonas naphthalenivorans CJ2
gtgatcaaaccgcaagcctggcttccgtccgacggactgacactcgagcccaatgcgctgctggcagcccaggaggtcctgcgcagcttggccttgaccgccggcccgggagccggcaaaaccgagatgcttgcgcagcgcgccgactttctgctgcgaaccggaaccagtcggtatccacaacgcatcttggccatttccttcaaggtggacgccagccgcaatctcaaggaccgggtgcgcaagcgctgtggtgccgagctggcggcccgtctggacagccataccttccatgcctttgccaagcgcatcatcgaccgcttcaggcctattctgaccggcagggatgcactcaaccccgattacacgatcggggtcgggcgcgtgcagggtcaacagttggactttgggaacctggtgccgctggccgtgcaaatccttaaggcttgcccgatcgcctgcaatgccgtgcgtcaaacctacagccatgtgttcctcgacgagttccaggactgtaccgatgagcaataccaactcatcaaggtggcattcctcggctcgtcagcacgcctgacagcggtcggggacacaaagcagcgaatcatgggctgggctggcgcactggaaggcgtgtttttgaccttcgccaccgacttccaggcggtaccgctcaacctgtaccagaattttcgatcgaaaccgcgcttgcgccgtatgcaaaacgccatggttcgggtcatggaccctgcggctgcggtgccggacgacatgctgatgggtcctggcggctcagtggacgtgctgcactttagcgacagcgccgaagaagcgcgcgaaatcgccgacctggtgcagcactggatcggcattgaaagcattccaccatcggagatcgccgtactcctctccaggcaaccggatctttatgccgaattgttgatgaacgaatttaaacggcgcggtatcgcgtttcgtaacgaacagctcctgcaggacttgtcggtggaacctgctgcacggctgattgtcgacttcctgacagtcgttgccggcgagcgtcagtcggctgcgttcggtcggctgatggatgttctgattgcaacaggaattgacgaagaaacggcttatgaacagaggtctcgatggctgcgcttccttgagcagtcacgtcgggccatgcgcggcggccaagcccagccgctgaatgcgatttccttgcgggcgaatgcgatgacgttcttaaaaatgctcggccgggaagcggttgtggcgctctcatctgactacgagcgcggagaccggctgaccgaggttgtagcgcaaacttttgaccgactcacggaacttctcggaggcgaagccgatcctgtccgtgccttgtcgcacttctccgaggacagtgccgtacgcatcatgacgatccacaagtgcaaaggtctggagttcgatacggttgtgatactgggagtggaacagcagacgttttggggtgacagggatgaacaacgatccgcgtttttcgtgggcatctcgcgcgccaagagtcggctttacctgaccgtagccgaccagagacaacggcctacagaagcacagaatcgatgggatattgtgaggaggccccatgacgaatacatcgggtatgccacctcgtctgtcggctga

SEQ ID NO: 71752 - DNA, 2310 bp, Polaromonas naphthalenivorans CJ2
atgccagcagcgtccgccgcaacgccggtatccggagacatcacgcttcgattcctagagttctgtcagtttcgtcgactcggcaaggtccaactggatatcgacaagaagaccactatccttgtcggcgcgaataacagcgggaagacctcggtccttgctgctctacgccacttccttgcggatggctcagccttcggtgcgttcgatatcagcctctcgcagtggccaaagctgcgagcgcttggcaaagcgtgggaggctctgacggaagacccttcaacaatgacagggtccgaagaccaatggaaggagcagctcgagaccatcctttctgccatgccgacgttggacctctggttcgatgcaggggctggcatgtaccactacgtcgcaccgttcctctcaaagttcagctggaaaggtggagcagtcggtgttcgactgcgtctggaaccggccgtgagcattgacgagctgaagcagctggcctggacatatcacacggcgcggctaccagtgaaggacatgggtgcggattcgctggcctggcccattgaccttctcgacttttggctgcgcgagccatccaagctgggccaagtgcgcgcttataagctgaacgtcgataacaatccgctggaaggtttgaaggcctacgctactcagacgctgcctgcagacgccagcccaattgagcgtaagcatctgtcgaagctgatacgcgttgacttcgtcgcagcccagcgtggtcttggcagcgaggaagctgattcgcggtctgcctcaggagcgcatcgggtcggcatgttctccaaccaactcctcaagtttgcgcgacagcacttgaacattgcaagcacgggtcacggccatcgcgcagacctcataaaggcggtcgccgaggcgcagcaggaactggacaagaaaatacacgaggctatcgctccgtcggtcgaagaggtgaaagaactcggatacccaggtctgcacgacccccaagagattcgcttccgcacgcgcattcagacagctgacttgctcgaccatggaacggctgttcagtacagcatgcagaaggattcgctcgaagagctcctgccggaatactccatcggactgggctaccagaacctccagtcactcagttatcaactggtctcattcaaagcggcccggctcaagcccgagaaggggtctcctgcaccggttcacctggtgatgattgaggagcccgaggcgcacctccatgtccaggtgcaacgaatctttccagacaaggcgcacaagctcatcagcccgactgagaaggaggcatcagctctcaaaagccaattactcatcagtacccactccagccatcttgcccatgcggagaattttgaccggctccggtacgtccgccgcatcgcaaagagcgcggcgaatcccatgccgacgacagaggtggtcaatcttgggaaagtttttggcgaagacaagaagacccgccagttcgcggaacgctacttccgcgttcagcatactgacctcctgttcgctaatgccgccatcttcgttgagggtcttgcagagcgcatgctagttccgctcttcattgagcgggacttcaagacgctgaacagtcgatatgtgtccttccttgatatcggcggtagccacgcccatcgactaaagccgttggtagagaagctacggattcccacggtcatcatcactgacatcgaccctaccgaagaaaaggctggcaagccaaagaagaatggagagccgactacgacactggtcgcagtggccaataccggtcaagcagggctgcactgcggcaacccaactctccgcggctggcacccgaaactgcagaagctcaacgatttcaagaacccgaccgaggctcagttggtctggaatgagactgcagagtgccttgtgcggttttgctggcagcttccggtcgccgaagctgaaggcaattggcccagcacatttgaagattcactcgttctcacgaacatggtctggttcaagggcctgctggatgagaaagtcgatgatgatggcgtgaagattaagccaccgaagggtgcacttggctctgtcgcaacacaggttgctgacgcgccgagcgttccagacctggtcggcgcactccacaagctcatgcacgactcgttcaacaaaggagacttcgccgcaagcatcttcgaaatggtctcgacggaagagccggttgtctgtccaaagtacatcgcagatgccctggactggctgcagaagcagcttgagccgaaccaggacgtgatggcatga

SEQ ID NO: 71753 - DNA, 1950 bp, Polaromonas naphthalenivorans CJ2
atgagcgcggtaccaatccttgccaacaacgaccgcgacgctggggtagtcgaagaaatctgcggctatctcactgaggagcctccccgcagctacttccttttcgcgggtgcaggctcaggcaagacaaggactcttgttgaagtgctgcgtcggctgaccggtgtcctgaagcatgagaaaggtgaacagcttgcacgacgcttgcggacgtacgggcgttcgatacgggtggtcacgtacaccaagaatgcggtcgcggtcattaatgggcgcctcggggacaacgacttggtcggcgtatccactatccactcgttctgttgggaactcatcagcgggttcaacgatgacatccgcgaggcactcatagcggtgaaggaagctcagctcgagaaggagactgccaaggcgcaagcgaagccaagaggtatcacggctgcgaaacagcgggacctggacgaaatcaaggctgacatcgaggggtttagaacaaccgatgtgttcatgtatcaccctgaccgcaacacgtacgggccgggagcacttgcgcataaaaacgtcctcgacgcggcggcttggctcctctgcaacaaacccacgctccagactatcctcagggaccgtcaccccatcgtgctcatcgatgagtctcaagacacgataaagggcatgttggacgcattgatgggactggcggagccgaggggtagcggcttaacccttggattgcttggcgaccaccgccaacgcatctacaccgacggacactctgacttgcccaacttggtcccgcagagttgggcaacgccggagctgcaaatgaaccaccgcagccaaggccgaattgtcacgctcatcaacagaatctggaaagcggagttggatggccggactcaacctactaccggagtagagcagcaccctcgaattgagaagactggaggagtggtcaggctctatgtaggcgacacatcgctttctccggaggacaaagttcgtcgtgaacgctggtgcgcagaccaaatgcgggaggctagcggagcggccgcctggggcacgggacaataccagttgcttgctctggaacacaagctcgtcgcgactcgcggctcgtttctcgacgtgtaccaggcaatggtcctgcttgacccgaacgcagcagcgcctgctggtagcggcgataacaagggacccgctgcagtacaggtgatgttgaacgagcttgctcatctcgaggcatgcgttggcgctgatggcgcactgaacgagtttttggccacagaggtgtttcggcggcacggaagcctcgacaacatcccagaagacccagcgacgagagctgcccgtgtggatgagatgctcaaggcgatggcggcatttgtcgccgcctgtaccgatgagaagtccaccgctgaggatgtgcttttcccggtcttgagcgccaatctgtttgagtttgaccatcgcctctcggcggcgtatgccgacaagtcgcctcctcctgcagctcctggccgaggtgaggaagagtcaaagcaggcaagaatgcgtcgcggctggtgcgctctgtttgatgctccctggaaccaactgaagcgataccgtacctaccttgccggaaattctgtgctcgccacgcatcaggtcgtgaaaggttcggagttcatgcatgtcatggtagtgatggacgacgccgtcgccggcggcaaccagatttcctacgacaagatttttgggggtactcagctcagcaagggggacagggaaaatgtggataagggaaaggagacgactatcgaccgcaccttgcgcctgctgtatgtcacctgcagccgcgctcaggagtcgctggctctcgtactctggtcctccgaccaagaagctgcgctgactcgaatcaaggaaagcggctggtttaccgacgacgagtttcaagcaatccagtag

SEQ ID NO: 71754 - DNA, 1821 bp, Acidovorax sp. JS42
atgaaggttgtccggctgaccatctcgaactttcgcggcatcaagtcggtggagctcctgttcgacggacacaccctgatggtgggctccaacaatgtcggcaagagcacgctctgcgaagccctcgacctggtcttgggccccgaccggctcaaccgcttccctccggtcgatgagttcgacttctacaacgctgaatacctggcccccgccaccgaagaaggcgcggagcaggcgccgattccgcttcggatcgaggccgtcctcatcgagcccggcgccgagatcggagccaagtgcggcggcaacatcgagttctggcatgtggccgagcaaaggctgctcgggccgggagaagccgacgccgccaatccgcctgatgccgtgccctgcctacggatcgagaccatcggccaatacaaccccgaggaagacgagttcgaggcccggacctacttctcgcacagccccgatgcccctcccggcgagctgaccaaggtccccaaggggatcaagaggctgtttggtttcctctacctgcgcgcgcttcggaccggctcgcgggcgctgagcttggagcgcgggtcgcttctcgacatcatcctgcggaccaagggcgtgcgcaccagcctgtgggagaagaccatcgagcgcctgcgcggcctcgacatcgaagccgacgcgaccgagatcgcgccggttctgcgatccgtggagaggcggctggcccgctacatcgcattggagtcgcccggcaacgccaccaagctgcatgtttcggagctcacgcgtgagcatctgcgcaagacgatgacgttcttcttggcgctgtcggcggaccaaggacacgtcccattcccccacgccggcacgggcaccatcaacacgctggtgctcgcgctgctctccttcatcgccgacctcaagcccgacacggtcatcttcgccatggaggagcccgagatcgcggtgccgccgcacacccagcgacgcatcgcccaatacctgctgaccaagacgacgcaggccttcgtgacctcccactcgccattcgtgatcgagaagttcgagccatccaagacactgctgctggctcgcaatgccggcgtggtcacggcgcgaaaggtctccgacgccaccggcctcaaagacaacgactacaagcgcttctctcgctccggcctgtctgaatgcatgctgggacgagcagccatcgtcgtcgaaggcgttaccgagttgcatgcgatgcccgtcgtcgcgcggcgcatggaggagagcgatcccaacttgcagccgctggacatcgcgggtgtggccttcttcgacgctgatggtgagtcgaacatgcccaagttcggaaagttcttcaagacgctggggttacgcaccttcgccttctacgaccttgactacaaaaagaagcgcaaggccgagcaggcgcaggctctggcggacaacttcgaaatcaatgtcgagcacgcctacaagggcttcgaagacctcgtcgttgcggaggtgcccgtggatcggctgtggtccttcctgtcgggcctaaaagccaatgatgagaacggcaacgtcgccatccccgatgcgcgcccgaacgacgacgcggtcaaggccatcgccaaagaagccctcggcggcaacaagggcgccggctggtcggcgcgcctgttcgaagagtgcgagctccacgagctgccggccacggtgacgaagtttctgtcgtcagtgttcgcactgttcccacctccacccccgatcgaagacggcgatggagcagcacccgaaccggccgccgctgctgccgctccatga

SEQ ID NO: 71755 - DNA, 1761 bp, Acidovorax sp. JS42
atgaacgagccttgcaagctgcgcgaaagcgtcatggcttgcgagggccatgccttggtcatcggcggccccggcagcggcaagacgacgctcgcgctgcgcaaggcggtcaagcggattcgcgacggcatgcttccgggtcagtcggccttgttcctgagcttctcgcgggcggcagtggcgcgcatcttggatgccgccaagctcgagtccaccaaagccgaacaggagcagctctccatccagacgttccattcgttcttctgggacatcctcaaagcccacgcctacctgcttggggcaccgcataggctctcgatcttgctgccacacgacgagaaggccctgtcgggcggcctcggcgacgaagacgaaggctgggacgagtggctcgtcgagcgtgagcggctgtttcgcgaagaggggcggatcgcgttcgacctgttcgcgcccaatgcgacagctctgttggctcgcagctcgcatcttttggcgtcgatcgcccatcggcatcccatcatcatcgtggacgaggcccaggacaccggccagtacgcgtggcagtgcatccagatgctcgcaccacacacgcaggtgctgtgcctggcagacctcgaacagcaaatcttcgactacctgccaggcgtcggcccggagcgcgtgatcgccatccgggaggcgttgaagccgcacgagatcgaccttgggacgcagaaccaccgcagcccggactccgaaatcttggcgttcggcaatgacatcctgacggccaagccacgcggcgcgccctacaagggcgtatccgcccttgcctaccgccccgagaagccaccgccgaactggaatcatctgctgcgccgagccctcggggagctcttgaaatcaattcgggctcagagcgacaagaaggtggagacgatcgcgatactggtcaccaacaaccgcagtgcgttgaagatgtccaacgccctcaacgcgttgggggccaatgtcgggaagccggttcggcacaagctgctgttcgacgaggccgaagcgctgctgtcagcccgtttcgcggcctttctgctggaacccaaggacctcgccaaactggaggccgatgtcgccaccagcatggaaatgatcgccgccgcgaggcgcgcgacgggacagggccggaaggaagtcgccaaactcttggagcaggccaacaaaatcaagggtggcaaggccctgaacatcaacatcgccaacgccctgcgcggcctgatctcaggcttggcagtcaacgatttcagcggcgatcccgccgaggactggctcaccgtcaaacatgagctgcgggcgaccaatcaagacgaactcacgcgggtcgctgcgcagttagacttcttggtggcgttccgtcggggacatcgcatctcggctgccctctctgatgaatggcttcgcgacggcgcctacaccaatgcccgcaccgccctcgacctggctctcgcacaggagcaaatcctcgacggcgtggagccgccgatgggcttgcaagtcatgaatttccacaaggccaagggcaagcagttcgacggagtcatcctcgtccgcgaagctcgtcggaccggccccgccgtcgaatcatctttcgtttggcgaggcgacaccgctctgtatcccaaaagccgacgtgtgcttcgagtcggcatcacgcgagcaaaagtccacacgctcatcctcgatccgctttggccccaatgtcccctgctcaaggggcacaagctctaa

SEQ ID NO: 71756 - DNA, 1785 bp, Burkholderia pseudomallei 668
gtgcacatttcgcggatcagtatcagcaatttcgctaatttcaaagctctggatgtggagaccaccgagagcatcgtgatcgtcggcgagaacaaggcgggcaaaagcaatttcatccaagcactgcaactggtgctggacccggggctgtccgaacgggatcggcaactgggactggagcaattttgggatggccttggggagaacaaactgggcgccaccgtagaaattgcaatagaacttacagatttcgacgatgacgccgacctagtcgcgagtttggtcgattgcctcgtcgacgtgggtccaccgaccgtcgcgcgccttacctatcgctttcgcccaaaagcgagccttggtggcgcaccccccctgagtctggccgactacgagtatgtgatctttggtggcgatgatgaagacaacgccatcgccgcgatgcaacggcgacagttgccgctcgacgtgcaggccgccctgcgtgatgcggaaaaggatctctccagttggcgtcggtcgccgctccgaccgctcatcgaggaattgaccttcgaccttgatgcggaagcgcgcgaagagatccaacagatggtcagcgaagcacaaacggacctagcggatcgcgacgaagtcgtcagcaccgcagaaaggatcggcgcacgcttgctggccatcgtcgggaacaagcataccgttcccatcaaactggggcttgcacccgctcgcgtcgacgtgttgttgcgcagcctgcgcatcctcatcgacaacggtgcgagaggcatcggtgacgccagcctgggaactgccaacctgcttttcctcgccctgaagagtctggaactcgatcgcctcgtcgtcgacggggaacggagtcacaccttctttgccatcgaagagcccgaagcgcatcttcacccgcacgttcaacgtttggtgtatcggtactttcttggtgaatcaccgggccacgacaggccgtccaacatcacgaccatcctgaccacgcattcgccccacatcgccagcgttgcaccgatccggtctgtggtgctgctgcgccacgatcccataagcggcgcaacgacagcgacctctacggcgacagcacctctcactgatgaagatgaagatgacctacaacgttacatcgacgtcacacgaggcgaactgttcttcgcccgcgggatcatttttgtcgaaggggatgccgagcgcttcctcattccggcgttcgcggaagcactggatattcatctagatatcctgggcatttccgtgtgctccgttagcggcaccaatttcgcgccttacatcaagctcgtggggccgacaggcctgaatatcccgcatgtggtactcaccgacttagatcccgtcgacgataggccacctttggcccgcaagcgactgctcagactactcgagctcgctgtcactgacgaagaatgggatgaactggatgaagacgagccttgggatctgggcgaggagtatggatactttgtcaacgacagcacgcttgagcccgaattgtttcaagccggccttggcagtggtattcgggatgttatcgaaagcgaactgtcgactagcgcccaaacccgtgaggccctcgcctgctgggtggacgatccaacagcgctcaacaacgaaagattgttgaagttgattgagcgcatcggaaagggacgctttgcacaagcgcttgccggttttgctacggcggacacttgccctgcatatatccggaatgcattggagtacattcgcgatgccgttgcgtag

SEQ ID NO: 71757 - DNA, 1800 bp, Burkholderia pseudomallei 668
atgccgttgcgtagctcaagcaccgcttatctcgtgcaggctgaggagttgcgcgacaatgaccaacaatgggccgcttacgaatcggaatggcactgtgtcgtccttgcgggaccagggagcggcaagaccaagaccctggtactcaagctagcgcgcattctggcggaagatgtacgcacgccacgcggtgtcgcttgcattacctacagccaggagtgtgcaagagagttgacccgtcgccttgagcagcttgggttgcgagaatcgtcccgcctattcataggcacagtacacggcttttgccttcgccacttactgatgccgtacgcgcacctggctaatctcggccttccgacgccaattaaggtcgctactgtcgaacattgccgccaactgtactctcgacagggcactcgactcttcggtgtaggccatccttacaagcaaatggacattgacaaacaccgccgtgtccaccttgatcgtgcgacacccgcatggcgtgagcaagaagaacttgccgcattggccgaagcctacgaagaagcgctacaccgggagggcttggtcgactttgatgacctggtcatctacggcgagcgactcgtgtcccagcacgactgggtccttccgctcgtgcgggcgcgttttcccgtactggccgtggatgaatatcaggatctcggtctgggtctgcatcgcatcgtcaagcgtctggcgttcgatggcggtgttcgtctgtttgctgtgggcgacgccgatcaatctgtgtacggcttcaacggtgccgacagcaggctattgcacgaactcgccaatcgcggcgacgtggaactggtccggttggaaatgaattatcggtgtgccgacgagattattcaggcgtcggagcgcgcactgggagaagcgcgaggttaccgggcctgggatcgggaccgtgcggcacgcgttgaaatggtcgagtgcccagaaggtctggccgaacaggcgcatcgcgctgtcacggagatcatccccgccgcactggaggcgaaggtgggacgccaactcggcgacattgccattctgtatcggacggcagacatcggcgatctcgtggccgaagccgtcatcgcggcgggactggattttattcgggtcgacaacgcagcgccctatcggaaatgtgccctcactagctggatcgaggattgtgcggcctggtgcgctggtggttggatggaggcaaagcctttgctacgtgggcttctggagcgttggttggcgttccggtaccggcggctatccgacgccgagtcgcgcgccgaacgcaggcgggtaaccgagtttctttgggcacatcgacaaaacggcgggggtggaaattttgtcgccgcactgagggcaacactacttgatgacgtgatggcggccgaaccaagcttggcggatcaggccgtccaggtacagtccatgagcacggccctacgatcgggcggcgtattgcaagacctagatatggcccgcctcggcggtcgcgacggatcgcccaaccagttgaacctgttgacgctgcactcggccaaagggtgcgaatacgacgttgttatcatgcttggtctggatgaaggttccttccattggagcaacgtgcagggtgatgcattgagggagagtcaacggttgttttacgttggacttacccgcgcacgtgacgaagtctacatgctgtactccggctggaatgaaaacaaacgtaccggtcgccgctattactctgggcggttgcgctttctaaacgagcttcaggctgactaa

SEQ ID NO: 71758 - DNA, 1641 bp, Burkholderia pseudomallei 1106a
ttgatcaaggtcgatttcctgcatgcacagcggcatctgtcggactctggtggcggagctcgatccgaagatttgtcgcggtgcttgagtcgcttctatgaaagaaacctcgagaaacacgaggaagactatgacgcccaacgcgcactctatcagtcggaggcactgctcaacgaccatctcgaacgtgttttcggcccgacactcgagcggctctcgcatctcggctatccaggcctcaacaatcccaagctgttgatcaagaccgcactgaatcctgcaactattttgagcagccatgatggtgctcgggtgcattacgccgttggaccagaagtaggcatagacacgcagacgacactgccggatcgctacaacggcctggggttcaagaaccttatctatatggtggtagagcttctagacgcgcatgccagatggctagatatagaagagaaccgtccgcctttgcatctgatcttcatcgaagaacccgaagcacatctgcacgctcagttgcagcaggtattcattcggaaggttctggacattctcgatattcccgatgaagatgcaccgcactgcaccactcagattgttgtttcgacacattccccgcacgtgctcttcgagcgcggcttccaaccgattcgctatttccgccgcgttcgcgaggccggagttcagcgatcggaagttctcagtatggcttcgttctatgaaacagctaacgacccgaacgatcctactgaccgtacccgggatttcctcgagcgctatctaagactcacgcattgcgatctatttttcgccgatgctgccattctggtagaaggtaacgttgaacgcttgctgatgccgcagatgattgcgaaggttgcgcccggccttctgtccacctacgtgagcattctagaagtcggaggagcattcggccatcgattcaaaggtcttatcgagttcctggggctcactaccctgatcgtcaccgacatcgatagtgttatggcgcctgcggcagccgatccagtagcccccgacgatgaggatgatcccgatgccgatcccgaccttgaagaagcagccgaagatcgagccgcagttcgaggcggacgcaaagcatgcatggccaatgagcccggagcattgacgtcaaatcaaacgctaatccaatggcttcccgggcgcagcaccatcgccgatttgctcaacgcgactgtcgaacagcgcattcaagtccgcactgttgctagcgatgcgttgatccgcgtctcatatcagacatcggttaacgcaagttggcgtgggacgacagctgccatggtcggtcgaacattggaggaagccttcgcgctcgagaatctggcctggtgtcaggatgcggcacgcgccgaaatccgcctgcgcgttcgaggctgcaacaaattgtcccttgaacagatcgcacaaagtctgcatcgcaaaatcaagagcgcgaatttccgcaagaccgactttgcattggcgcttctctcacaggacccatccgcgtggacggtgccagcctacatctctgaaggtcttctctggctcgagcatgaggtggttccccatcctcccgaaatcgcggctcctccgatcaacgcaggagcagtagcatga

SEQ ID NO: 71759 - DNA, 1896 bp, Burkholderia pseudomallei 1106a
atgacactccgtgctagccaacctgatacaccggcagatctggaactgagagcgtgtctggatgaacgtcctcaacgaagctttgtcatggtcgcaggagctggatcaggaaagacgacgtcgctcgtcaaagccctcactcatcttgcgcagacacggcgacgcgaactcaagatgcgcggtcagcggattgcctgtattacgtacaccgaggttgcgaccaaggaaattagcggagatgtcggagatgacgggttgttccatgtctcgaccatacatagctttatgtggtcggttgtacgcccgttccaaatcgatctcaagacgtgggtgatctcgcgcattcacgaacagatcgctgaggcgcgagaacactacaacagaccgcgcacacgccccgccactcggcaacgtttggagagagaaattgctcgccatgagcgccacctagaagaggtagcacaccgaacgcacttttcgtatggggcgggacgcgacttcgcgcgaggtgtcttgggccatccagacgtcattgcggttgcggtggaattaatcgagcaaagccaattactacgcgacctcatcgccagtcattatccggttctctttgtcgacgagagccaagatacccgtgcggatgttgtggccgcatttcgcctcatcgccgaaactactcctcttgagttttgcctaggcttctttggtgacccaatgcagaagatctatgccgatggcgctggcgcgatagatgcccctgctacgtggagccaaatcaccaagccggagaacttccggtgcccgcaacaagtactcaggatagtgaatggaatccgcagagccggtgatggattggagcagacgcgcggcaggatgacgcgcgttgacgatgttttgatcccagtcgccgggactgcgagattgttcctactgctggcagatgagcgtcggtcggcgaagctatcaagggttcgcgaatggctccgacggacgaacaatgatgagctctgggttagcgaggatcgcgccgcagacgttcgaacattggttgtcgttcatcgtatggccgcgtcgcgcctaaactttcccaacttgtatgcggccttgaacgacaactctccgcagaatttcaaagagggtttgaaagatggcagtgcgtggccactccgtccattcttgacatacctactaccgctagcaatggctgtccgagatcgccgcgactttgacgcaatgacgttgttgcgttcacagtgtttgctgttgagctcggtgggtctggctggcaatggtgcgcccgaagtactaagaaatctacgagcggccaccgagggccttgcaacgctcatgcactcaaacgacgcgacgctcaggaccgtgctgattttcgcatccaacacggggttgctgcagcttgacgaggcctggtccaagtatcttgatgacgatgctgaggcccttgctgccgatgacgatcccgaagtgccgtccattatcgccttcctgaactgccaagttagcgagctgagaggatatcgccactacctcgaggacctttccccatttgccactcagcaaggtgtcaagggcgctgaattcgaacgtgtccttgtgttgatcgacgacgacgaaggaagaggccagcgcctcttctcgtacgaaaaatatttcaacattgctccgctttcggagaccgatcaagagaacatcgatgcaggcgacgacaatgtgatcgatcgaacccggcgcctcttttatgtctgctgctcacgcgcgaaacgggatctggcggttgtaatgttcgttggcgatctcgcggccgcccgagggaagatagaggaaagcgggatttttatgccggacgacatcgttgatgaagccgccctggaactcgactga

SEQ ID NO: 71760 - DNA, 1698 bp, Vibrio cholerae O395
atgtacatcaaaaaggtaacgatcaaaaactaccgcagcttccgctttttcgaagcacagcttcagcagctaacagttgtcattggtgaaaacgatactggtaagacgaactttttcaccgcactttcgttaccgttaagcggcaaccaaatagacttcaaccagaagcgattgagtgtctcagacattaacaaagatgccgtgattgattttctaaagtctgttgtcgatgatgacactgaagataatcagcttacaaagatccctaaagtatccgtaaccgtagagttcgcagatccgaaagatgcttatgaaacagctctgttggctaagtggattgttgctgatggaggcgaagaaacatacaaaattagatacgactttaagcctaaagacgacaaagacttgcttgaggttgtaaagaaatcgctcgctggtaagactttagatgatattaactggtttactctacccgttgagctttacgactaccaagtcgtatctgtgaacaacgaaaagcctatcgcatacagtgacttaaaacacgtcagtatccatagtatcaatgcagagcgagatgacttctcagaaagcagttcaatgaagtccaatagcattttcaccaagctgcttatgaacactctcaacgatgacgacaaaggtcagatcaatacagcctactctgagttctttagtgctattgaaaagactgaaacattcgacaaagtcattggagctaatgacgattttgagaattacgacagtattatcaaacagcttgagtgcactcctaacctgcctaatttgaagaacatcttatcgaacatcactttgaaatacggtaatgaatttctgtaccaaaaaggcttagggcaacgaaatcttatctacatactcatcctgtttgcttactacaagtcatgtggtgatacattcaacttgtgctgtatagaagaaccagaagcacacttgagcgttaacaaccttcgtttagtaagagacttcattgagaaaagctcaagcaacagcggctcgcttgtacaaactatcatttcgacccataacccatcgatcatcaacaagttgaagctttctaatgtgttggcgtttactggcgagaaagcaattagtctgtctgatactccaactaagctagttgactacctaagaaagagacctaacttcgacatcttaaagctgctgtttgcgaacaaagtaattctcgtagaggggccgactgaagaaatgctaatcagcacttatctgtctaaacaaccagccctcaacgacatcgatattattccaattggtcaacgtggttacgccactttcttagatatatggctagccttgaacaaagataaccagaataagaaaattggtgttgtccgtgattatgacaattcagatgcggctaaagccaaacatgatacctatgacacagcgcatgcgaatgtcactgtaagaacaacaacaaactacacacttgaaattgatttagtagaagcagaagacaacctagctttactaaatgatttattcgaaatggaaggcgacctcgacgcagtatccaagcacatgattaatggtaagacagcaagaatgcttgatgtatgtgatgcgatggttgatgaagagaatccactggatatcaagttaccagctcacatcgctgaggtcatcgaggcggtatcatga

SEQ ID NO: 71761 - DNA, 1377 bp, Vibrio cholerae O395
atgatagaagtacagattgctggtgcaggtgctgggaaaacttatggcttagcaaagactttgatagagcacatcgaagcttgtactagtcacaaaaagacatttgcactgacgtacacaaactctgcaacagcgaagatagaacaagagataatcaaacagcatggctttattccgtcgaatctctgtatacagaccgtacatagcttcttgttaaacgaaatcatctacccattctcgtcattcactctcggagatgtgtataacgacgcatcaataatgatgttaccgagcgatgctagattcaaaaactggcacttaaaacgattaaaagataagaacgtcattcatgccgagagcgtatacaacatcgctaaacaaattgttgatgaaaccatcagcaagcacaataacagagcgaagaaagcaaaagtccgcagactattggctattctaggaagctgctttgacaagatattcatcgatgaagtccaagacttagacaaagatgcactccgttttttcgaagttctagggtgcaacgatattgatgtgtatatgatcggagatccaaaacaagccatcaagtttccccaagatcttgatgctttcgttcgaaaagtagctccaaaagaatacgcgactatactaccgatcaacaatcaaaccagacgagtacccacagagatactagcggtctcaaacagcttctgttatgaaggtcaacaacaagagtcactatcagaaatggttggtgaactcatgtacattgaatcgacggacggacgatatgacgagctactaacgaactacttagatacaaaacaacttgtttgtatcgacaaaaagaatggtcgctataccacttcgtctaaacacaaacacgcattcccacgagagatcgaggaaatgattcgtgattctaaccacaagaaagacaaagctttgtttgttaaagcagctttttctgactttatggacgatgtcgccgaagtcggtgcaagaattgctatcaataggctaaaaaccagtcatggcttgacacttagtaaacaacacttagcccaattacttgagctgtgcaattcttgtacgggacatgacgttcaattcaaagtccaaagtatcgaatctatcaagggattggatgctgatgtgtgtgtaatcatacttagctctaataccctaaaatacttgacccaaaatgctattagcgaagcaaaccgatttaataaagaatggaaaaaggtctatgtcgctcttactcgtgccaagaagaggttggtattggctttagatcacgagttactcgctaaagaagatatggcggctgttagggactccattggtgaactgggattcgttactcataactag

SEQ ID NO: 71762 - DNA, 1797 bp, Agrobacterium radiobacter K84
gtgagaattgtccgcgttcacatagaaaattttcgcggcataaagctcgctgacatatatttcgacgggacaaccgttctcctcggcgacaacaacaccggaaagtcgacagtattcgaagcgatcgagctggcgatcggggcggatcggctggcgcgaacgcaggctatcgacgaacatgacttttacggcggcgactatcgcgccggagagaaccaggtcccgaagatcatcgtggttgaggtggtaatcgcggacctggacgaacagcactgcaccaagttccggaacaatctcgaattttggcggacggctgcccgctcgctattgggcgccggtgtagccggcggtgccgcacaggccggcacggaaccggccgtgcgcgtgcggtttgaaggtgcctatgattccgagaatgacgagttcaccgcgaagacgtggtttgccgttccacgtcaggaggatggcacgccgatcagcgaatgccgatcaggcgacaaacgggagttcgggtttctccatcttcgggcacttcggaccggaaaccgtgcgctgtcgatggaacgcggctccctcctcgatgtgatcctgaagacatacgaggtccgaacccgcatgtgggaaggattgctcggtcggctgcgaggtctcgatgtggtgggcgcggaagatgccgaattcggccgcatattgacggcgatacgcgatgcgatgagggagatcgttccaggcgaatgggcagacgcgccgcacctgcgggtttcggagctgacacgggaagatctgcgccgcgttctgaagtcatttttggcgaccggtgtgccgggctatgcggcgccgtttcagcaccaggggtcgggcacgatcaacgcgctggtgctcgccatgctgggtctcattgctcaacgccggaatggacgggttatcttcgcgatggaagagcctgagctttctctaccgccgcacgttcagaagcgcgtggtggacaaggtgcgtgaacttgcggcccaagcgctgtttacgtcgcattcaccctacgtcatcgagcagttcacgcccgagcagatggcggtgttgacgcgcgataatgccgggctgttgaccgcgatgagtgtggttctgcccgacagtctcaagctcaagattttcagagacggcttccggacacgcttttgcgaggcattgctggcgcgccgagtcgtcgtcgtggagggtaagacggaactggtcgcctatagcgccgtggcgcgccgagcggctgaacttgcccctgcacagtacaagcggctcgatgcccttgggtgggtgcccttcgacgctggtgggcagacagcggtagcgccgtttgccagtttctttcgtggccttggcaaaacggtggcgacgatcttcgatcagcagcagccggacgctcgtgcagcgattgtggccgcgtgccatgcgcctttcgagcagccctacgcaggcttcgagcacatgcttcaggccgaggtttcgcctgcgatgcaggcttggttcgtccagtggttcgtcggcgccggcgagtggccgcccgcgcttgcccatctcgttccaccgaacgggtcaccggaggcggcttatcgcgcgccgttcctatctctcttcacgcacaagaaaggcgacgactatctcaccgtctttttcgatctatgccaggttgggcattttccgcagacgatgctgggaattttgacggcattgaagaacatggtcgcgccgccagtgccaccagttccgcagccgccggcgccgcagccgcccggcattttcggatag

SEQ ID NO: 71763 - DNA, 1707 bp, Agrobacterium radiobacter K84
atggtgttggtgctttgcgatcagcggcgaaggctattggaaactgagggcagcattctcgttcgcgggggagctgggtcgggtaagacaacaattgctctcgcgaaggcgtgcgcggatttggcagcgggccggctcggcaacactgggaaagctttgttcctgagctttgctcgggccaccgtcgcccgggtcgcggagcaagcgaccgcgaccatccctcgcgaacagttggcccgcatcgagatcaacacctatcacggctttgcgtggaccatcctcaagagccatgcctaccttctctgcgcccggcccggcgtctcgctccttcttccggctcaagcgcgagggcgtctcgcgggtttggacggggcagctcgcttggcaaggcaacgagagctgttcgatcaagaggggttgatcgccttcgatctattcccctcgcttttgaccgagttgttcgcgctggtgccgctcttggcgcaagcctacgcgcgggcgtacccgcttattatcgtcgacgaattccaggatacgaacacggctgagtggcagatggtcgcccggctcggtcagcacagtcggctgatcgccttgggcgatccgaaacagcgcatctatgattttaaaggtgccgatccgcggcgtttcgatgaatttatcgaagcgttcagaccaacgctgttcgactttcaaggcgaaaatcgtcgcagtcctggtacgcaaatgacggacttcgctgacgacatgatcgacggcgtcttcaaagcggtcgcctacacgggtgtttcaatcgcccgctacggtgggcagagcctcagaccgttgaaacaggaaattcttcgtgccgtcggccggctgcgtcgcgcaaacgaatggtctcttgcggtgctcgttccggcaaatgcgctggccgtcggcgtcttcgactacatggctcgggccgatcatggattgccgcgttaccccgtggagatcctggtctcagcggagggcccgatgctcgccgccgcgatgatcgcgttgctgctcgaaccgcgagaccatcccgaccacctcggcgctctggtgctcgatggcctcgcggcctttgagctgggacgcaacgaagctgcgtcggccggcgggattaccaaggccgcgcgcctgcggacgattgcccggtctttgcgagcgcaaggtgatgccgggtttggcgttcgcggcataggaccggacgtgcgggcgctgctggagagcgtcgccgcgcatcctctcagtggtgatccgatgacggattggcgttcgatccgcgcgatatttgaggcgagcccacgcgccgagctgcaggcggtcgccaaagaagctcgacacatgcggctgctgcgccgcggagcgcagatcgagagccgcttcgccgaggtttggcgtggtcacggcacttatcgggatgcgcgcggcctattgagcgcagcggtggtcgaggatcagttcgcggcgacaacccgcccccatcacggagtgaccgtgatgacgattcataaggcgaagggaaaagagttcgacgaagtgatcgtgtttgagggagcctatcaacgctatttgcaaccgcgaggggcggatgctgagcgatcggcacggttcaacctccatgtggctgttacgcgagcgcgacgtgcagtgacaatcatgacgccgcaagcgaacccgtgcccgcttctcccatga

SEQ ID NO: 71764 - DNA, 1974 bp, Rhodobacter sphaeroides ATCC 17025
atgaagatcgaaacaattacgctgtccaacttcaggtgcttcggtgctgatcctgtcgtgatcagccttgaggagaacctaacggcgcttgtggggaacaacggttcgggcaaaaccgctgtctttatggcgcttgcccgccttttcggggcgaccgccgcgcagcgagccctgcgcaagtcggactttcatattgcagggaaccaagacgcgctcgcatctgagacagagctcgcgattgactgtgttctcggttttcctgagctggatggtgacgatgatgaaggtactgacgcagtgcctgaagcactcagtcatatggcaacggatggtgaaaacggtgcgttaaaagtccgcattcggcttcaggcaaaatggattgataacggcacccctgacggaattatcgaagaatcattgcgatgggtccagtcacttgatgacgaatttgaatgggatgactgtcgccctgtacaaaatgttgaacgaaatttcatccagctcgtttatgttccggcaaacaggaatgccgccgaccaggtgacggctcttctcaaaggccgcttgtggcgtgcggcgaaatggtcagaagggcttgccgaatcggcagctgaggcagctggcgagcttcagaaagactttgacgaagaagagccttcggcattcatcctggacaggctggaaaagcgatggacgcagctttatcaggctgacactgaccgcaagcccaagctgcgtttgatcgattctacgctggaagagcttgtgcgcagggcggagtttgtgttttttcctgatgaagcgggtcaggcacggaatctggatgaccttagcgatggtcagcgatccctctttcacattgccttgacggccgcggtccttgaaatcgagagggatgcgcttgctctggacgccgatgagagcatgttcgaccaggaaaaacttcgccggacgtacctgacaatccttgccatcgaagagccggaaaacagcctttcgccttttttcttgtcgcgaatcatgacgcaggcacgagagattggagagctcgacactgcacagatcctgatctccagccacagtgccagcatcttgagccgcgtggaacccgaagaggtccgttacgccaggttggaccaggaaagcagatcttcctccattagttctctgtcattgcctgatgatgacgaagatgcgcagaaatatatccgtctggcggtcagagcataccctgagctttacttcgggaggtttgttatccttgcggagggagattccgaagcaattattctgccacgtcttgcggaagcagcgggcttcccattggataggtcatttgtacccatcgtccctctcggcggccgttatgttcgccatttctggcatcttttgagtggacttaaaattccttatgcaactttgctggatctcgatttggggcgaaaacatggcggttcaaatataatcgcgacaacgataggcgaattaaatttgattgggcgtgatcttgcagagaataggctcgtggccaacggtgacgtaaatctcgctgatatcggcgatctcgatgattctgaattgctggaagaggggcaggaccacccgtggctgaagatgctacgaagggaggcggtctatttctcgtcaccaatcgacgttgactttgctatgctccgttcgttccccgacgcgtaccagcatgtgcggcctagcgggcggggcccgcgcagatcggcgaaagcaattgaaaataagaagagtgtcactctgaagacagatggcaaccccgatctatatgaagacgctgaatggcgtgacgcctttgtttggtacccatacttgtttctcagtgacagtaaaccgggaacccatattgaagcattgacgcgcatcgctgacgaagatctggttgatgacgcaccgattgagctcaagcgcctccttacccgcgtcaggaaagcgctcagcctatga

SEQ ID NO: 71765 - DNA, 1854 bp, Rhodobacter sphaeroides ATCC 17025
atgacactggtcaagcccgatgactggcaaccgcaaggcgtggccgaattggaagaccgcgccttgcaagcgcttcgggaaaccgaacgaagcgtctgtgtgacggcgggcgctggtgcgggaaagacggagtttcttgcccaaaaggcggcgtaccttctccagacagggctttgtcccgcacccaaacgtattctggcgataagctttaaaagggacgctgcggctacattggctgagcgcgtcaagcggcgctgtgctcctgagcaggcgcggcgtttcatttcggtgacctttgatgcgttttcaaagggactgattgatcagtttcgcaaggcgcttcctgacgcttaccgacccccggccaattaccgtatcggctttccaactacagactctgtcaatgatttcctgcggcgtcacaatcggcacggcgtcaactcaacccagttccaaaacgcactgatccggcgtcgcctccttgatggtggccaggaggtcaacgatgaaacggaagccctgcgcgatgcgtattggcgagaccaatatcaatactatgacgagccagttctgacttttcctatgatcaaccggcttgcggagtacttgattcgtactaaccatcgtgtgcgccgggccgtacgcctaagctatcccgtagtttttcttgatgagttccaggacacgcaggcatcacagtttgaaattctgcaacgggcatttgatggcgcggctactgtcttgacggcggttggggatgacaaacagaagatcatgggctgggcaggggcgatgccgaatgctttccgggtattccgggaccagtacaacgcgcgcgctatctcgctgttgttgaattggcgatctcacgcggaactggtcgcgatacagcacgtcatcgcaagcaatatcgatccggacgttgagcctgtcgtggctcgcgggcagcgcaatgtagaaggtgacgtttcggctatttgggaatttgccgatgaagaagccgaaattacggttatttctgaatggatagaggggcaggtagcaaacggtacggccgctcatgatatcgccatccttgtacgtgcgaaggctgatcgggttgaaattgagttgggaccagcgcttgcagagcggggattgatcctaaggaatctggcgaggaatgttggtgaaatttccattgaggatctgctatctgaagagttcaccaaaatacttgttcctgttttgcgccttgcgacgagcaagcgtcatcctgaggcctggtcgacgactcttgagaattttagcagactatacgccgtttctccggaggacgatgatcaacttcaacgtttgaatgatcgcgtgcagagcatcgtccggaggcttcgggcgtttttatctgaacacgccgtaactgccaccaatccaaatcaaatcagcgatcttcttattgaagagatcgatgaggcgttaattcgccgttctacacctgcgtatcagcgagatgcagactatctaagggtaaaacagggatttgatttgcttctcgcagagtcgatgaatgaggcagacgactggtgcgtagtcctggaccgctttgaggggcgaaatcagatacccctgcttaccgtacacaagagtaagggcatggagtttcataccatgatcttctttggctttgatagccgaacttggtggagtcttacgccagacaaagatgaggaaaaaaattcgttcttcgtggcgttcacgcgagcgcgacagcgtgcctttttcacatcatgtctgaggcgcggtggtcgcatcacgtggcttgaggagcttctgggcgatgcggtgccacgggtcgagggtgtgacgatcttgtga

SEQ ID NO: 71766 - DNA, 2382 bp, Flavobacterium johnsoniae UW101
atgcatttaaaatctattacagttaaaaattttagaaggctaaaaaaaactcaaattgacttagaaaaagatgattcaatttttgttggcgcaaataatagtggaaaaacttcggctacctatcttttatatcgctttttagaagatcaaaaagctaaattttctttgcatgactttagtagtcattgttggaaaatattcgatgatttaggtaactcggaaactttactaaaagcctcggaattcccgtcaatttctctcgatttatggtttcaaattcaaagttcagatttgcatagagtattagatttactaccaagtttagaatggcaaaatgctcctgttggagctagagttgaattcagtgtaaaggatgtttccacacttatggaaaattataaacaggctaaaagtaaggcagtcgcgaacaaaaaagaacaatatcatccttggcctaaaaatctctctgattatctacggaaaaatcttaatcaagaattcaattttaaattctatgttcttgactttgaaaaatttgacaatgatttcaatcaggaggagggatatgaaccgctaacattaggaaacgacacagatagatctgggagtaagataataaaatcaataataaaagttgatatcctaaatgctcaaaggcatcttacagataacaactcggctagatctgaagacctctcaaaaagaatgaatcgtttttacgagagaaatcttaggaaaaaagaaaacgattatgaagcgatgcgagctcttgataattctgaaaaagaattgacagctcacttatccgaagtttttgcaccaacattacaaagtctaaataatttaggatacagaggctttaatgaccctaaacttcttattaaagcagctttgaattctgagatgattgctagtcagactaaattacattatgctcttagtgacgatccagagttaatggctttacctgaccaatataatggtctaggatttaagaatcttatatatatggtaattgaaattcttgattttcatgctcggtggatggacgatgaagaaaatcgagcaccacttcatctagtaattattgaagagccagaagttcatcttcacgctcagcttcagcaggtttttattcgtgaaattcgtaaggtaattcaaaaagctgaaacaagtgagttttttgctacacaagttgtaatatctactcattcccctcacataatttacgaaagcggttttaagcccatacgttattttcaacgagaaatagatgatgatggacatcaaaagtcaaatgttctaaatctttctacattttacgatggttcgagaccaaagacaataaaatttcttcagcaatatatgaagttaactcattgcgatcttttcttcgctgatggaacaattttagtagaaggaaatgttgaaagattgcttttgcccatgatgatcaataaaagtgcctctgagcttaatgcttcttatataactattatagaagttggtggtgctttcgctcacctattcaaaaagcttataaatttcttagggttaaaatgcttaataataacggatattgacagtatgttaggaagagatgaaacatcgaaaaccttgtcttcaaccgtgtgttttgataataaaacaccatttaaagatagtccagattctttagaaaatggggaatctgctagcaatattttaaacgaagatgatgaagatgatgaagatgatgaagatgatgaagatgaagatgatgaagatgaagatgaagatgaagatgaagatgaagatgtaaaaaaagaaaataaaaatgggaagtgtccaaccgatacagaaaacgctgtcacttcaaatcagactttaataaaatggttgccaaaattatcaaaaatttcagaattattcgaagcaaatgatgatgcaaaaactcaaattccatctgcgatatctaagtctcatgtatttataacataccaaacgccacaaaaagttacttgggaaggtaaaagcaaaaaaatatctgggcgaaccattgaggaagcatttgcattagaaaatttggcttggacgcaaaaagttgagcataaagatttgaaattgcgtgttataacattaattgataaccgatcacttgatgaagttaaggatcgtttgtataggagaattaacttaaataattttaataaaactgattttgcgctaagactgatgatgaaaaattccgaagaatggaaagttccatcgtatatcgatttaggattaaaatggttgcaaaaacagttatccgaagagcaacagattattaagaagacaataacagtgcaaaaaaaagatcctaagccaaaaaaaaataataaaaaacaagatcaaatatga

SEQ ID NO: 71767 - DNA, 1914 bp, Flavobacterium johnsoniae UW101
atgagcggaagaataaataaaccagatactcctgctgataagaaattacgtaactgtttaaagacgaagacgagctttgtaatgattgcaggcgcgggatcaggtaaaaccacttctcttataaagtcgcttaaatacatagaagaaacggaaggtataaatttacggcaagaagggaagaaaattgcttgcataacttataccactgctgctgaaaaagagatattggacgatgtcggacatgacagcttttttcacgtatcaacaatccatagctttctatgggaacttattaggccttttcaaaaggatattaaaaagtgggtttcatcgaagatagattctaagcttgaagaattacaagaagctagagcaaaatttagtaataggacatggcaaagtacacgggacaacaataaattagaaacagctaaatatctacatatgaaagagaactttcatactgttagcgaatttcaatatgaaacaggaagcaaatatttagatggtattttaggtcatagtgacattattgcaatggcaccgcaaatgattatttctaaccctcttttacaaattattttgtctaataaatatccatattttttcattgatgaaagtcaggatactatacccgagtttgttaaagcaatgaaagttgttcaaatgaatgtcaaaaatttctgtttaggtttttttggagatcctatgcagaaaatttatcatacaggttctggagcaattgttattgaaacagggtggcaagaaataaggaaaccagaaaattttagatgctctaagaatgtattagatgttataaacaaaataagagcactaggagacggattaaagaagcagactgggggcaggaaaatgttcgttgatggagaatggcaattaataaatgggagtgcgcaaatttttatattgcaagcggatgagcgacatgctgaaaaaatagctttagtacgcagttatcttgctgatcagcttaaagatcctctttggaaatctgacaaaaaggaagcagatttaaaagtacttgttattgagcatagaatagcggccaaccgtctaaagtttgcagaattgtattcggcttttaaagacagctcgacagactctttgagtatgagtttcagtgaagggacatcttgggcgcttatgccattcttaaaatatatattaccacttattaatgcttatagaaatggagaacattttcaagtggttaatttacttcgacaatattgtccacttttacaaaaatcacatctacaattaccagaaagtgaaccaagtaaaatacttaatgaattaaaagttcatctcgaaatcattaataaattattaaaaatagaaagtcctgctacggtcgaaaatcttttttcttatttggaatctaataatttaatatcttttgatgatagaattagaacaagattgaataaagcttctaaaggttctctcgaagatgaagacataagtgttacggatcaagttattgctaatttttttaaatgtccagttttccaagtatggggatatgagagatatttaaatgaagagtcaccatattcgactcaacacagtataaaaggtgctgaatttaatagagtaatggtggtgttagatgatgaagagggaagacgatcaacttcgtactcttatgaaagacttctaggcataaaggagctttctgatacagatgtcacaaatgctggtaatggtagagaaacttcacaagatagaactcgtagattgttttatgtttgttgctctagggctttaacagatttagctgtagtattatttaccaacgatcccagatctgcgaaaaaagcggtcactgaaacagggatttttaaaaaaaactccattaagatagaattagatatctccaatgaaaaataa

SEQ ID NO: 71768 - DNA, 1944 bp, Acidiphilium cryptum JF-5
gtgcgcagccactatggtgatggaatgcgcattactcggctccacatagagaacttccgttccgtccgcaacctggacatcgagctgggcgagacaacagtcctgatcgggcctaacaatgcaggcaagaccgcgatccttgacgcggtgcgcattgttttgacccggcgctggggccaacgcggtacgggctttacggagaatgacgttcatcgtccggaaccagacggcgatccgcgcacattgccgcctgtacgcattgttatcgcaatggaggaatcgcgctccggcgagtgggaccccgatatggtggcggctctcgaagatatcatcacagtcaccgccgatcgcatgagaaaccttcttaccgtgcaggtcacgtgcgcatggagtgaggaaaaagaagcgttcgaccctgcctggcagtttctggactccgccggcgttccgttgcgcgaaagacgccgagccattaacttaaccggcttcttcagctatatgccgctgttctggcttggggcgcttcgggatgcaacgaacgagttcaccccgcgttcaggccattggggacgcctcttgcgcagcgttcgcatcccagacgaacttgaggccgaggctctgcgcatccttgccgagctcgatgcgcgaattgctgcagccgatccgcgccttgcggaaatcgccgagatgatcggccaagctacccgcgtggcgatcggcgagggaccgggcggggcgcggctcgcgacgctgcctcttggcatagaggaaatgctgcagcggacgggtattgtgctgcgcaatgaggagctgcgtccgtggctcccgcttggtcaccacggccagggcttgcaaagcctcgccgtaatttttctttttcaggctgctgtacttcagcaactcgccgaagccgaacggcccggcgtagaagcggtctttgccatcgaagaacctgaagcgcatttgcatccgcaggctgcacgcactttgtgggagcatgttcaggcgcttgcggggcagaagctgatgagcacgcactcaccctactttctacagcatgttccgcttcgcgacattcggcttgtttgcctacgcggtggatgcaccgaaatcgccaccctgccgcgttatgtcgtatccgatcttccctggaacgacgccgtgaacgggttcctcaacggctccgcggggcgcatcttttttagggacgagccgaccggccgtgtcgcgtcccgaagctggttcgacatggccatggcgacgcgtgtgttgcgctgctatcgccgcgatcccgatcgcgcagctcgcacagatcaagtgcgccaattccgacatctctgccggattcttcccaccgccgaggatgaggaagaacttggctttcatggccgccgcgtgcggggcgaaattttctttgcccgtcgctggataatggtggaaggcgtaacggagtaccttcttcttcacgcgctcgggaaggcgcttggctggccacttgacgaccacggcgtggccgtcatcgactttcagcaaagcggcaatgccggcatttatccggcgctcgcggaggcgttcggaatcccctggaacatgatcgtcgatggcgatcatgaaggcgagaaattccgccgtcagatcattgaccgaggatttgacgacgaagagctagagggtcgcttcgtgaccctcacgccgcaaaacgatcttgaggatcagctactggcggacgggcatgagcagatgctccgcgaaattctcgccgacatcggcggtcggtccgccctcgactgtccgcctgacgaattccgcgcccggctcaagaaccggaagaccggatatatgggcgtactgtcactgcgcgtcgctgccgacgaggcgctggcgcggcgtatgcccgcacgcttcgttgatctggtaacagccctgcgggatggtgctgcatga

SEQ ID NO: 71769 - DNA, 1920 bp, Acidiphilium cryptum JF-5
atgacgccggaacttcaggcagcactggaccggctgagccccacgcagaggcaggctgtcgattgggaagatggcgccgccttggttcttgccggtcccggtgtgggcaaaacgacggttcttaccactcgcattgcccgcatccttgatagcacggctggcaagaactttcgcatccttgcccttactttcacgaccaaggcaggcgatgagatgcgcgagcgtgtcgaggcgatcgtgccaggcctcgccgaacgcactgttatcggcacatttcacagtttctgtgcccaagtgcttcggcagcatggttcccacctcgctatcaaaccggattttggaatctacgatcaagatgaagaccgggccgaacttctgaaggatgcactcgaacaggcggcgtcgcacggcgcggcggtgacggcagacgatacgcgctggctccgggctatagaccagcttcgcagtagcctggtcagcccgcaaaaagccgcaaaacattttcgcgatccaaaagcgggcgaacgcgccgcgcgagtctatgaaatctatgagaacgctcttcgcgagcgcaacattatggacttcaacggcatgatactggacacctgccggctcgcccaccaggttcctgccgtggcggcgcgcatccggcagtcctatccgtattggctgcttgacgaattccaggacactacgcccgcgcagtaccggctgatccggttccttgcaggtgacaagttcaagaacgtcttcgttgtcgctgacgacgaccagatcatctaccagtgggcgggcgccagttaccggcagatagcggcgtttcgtgagcactttgcgcctgatattatccaacttgtcgaaaacaggcgatgccctcctgaaatcgttcaggctgcaaacaatctcatagcccacaacgcagaacgaacgccgggaaagcagccgcttgttccaacgcgcccgagcgacggtgccgccatcatcgaccgggcctttgctaccgagactgaagaagcacaagcgatcgcgcaggagatcgcggccaagggtgaggccgtttggggacgaaccgcggtcctcgggcgcaccagagccatactgcaaccggtattggatgaattgaggaaactaggggtcgccgcctccattgcgacccggcgagatcgctttgtttcgccgcaatttgtctggctgcaaagctgccttgacctttcgcttcggcccactgaccggcgggcgttcacgacgatggccgcagccgccaaccgcattacagggatagagcttgacgtggccatactcgccgccgaagcgcggtcgtccgacgccagcctcctcgaatattgggcgctcgctgccaacaatgccggcaacgatatcgcgtcaagccttgcagaattcgcgctgcgcctggtgcaatctcgctcgacctggcgaaaggtagtttccgaggccatcgcatggctcccccaaaccgcggattcttcgaacggaatcatcagcgacgccgaagaagataggaccgcttgggagactgccgcgcaggcaatccgagtcgaaaaaggaagccagcctgatctcgacgaactgctccaaggtatagcgctcaggccaaaggagcccccgctcgacccatccgccgtccgcctcctgaccattcacgccgccaagggcttggagttcgagtatgtttgggtcactggcgtggccgagcagattcttccgtcatggcaaagcctgaaagcgggcgcttctcccgccgagcttgaagaagagcgccgaaacttcttcgtagccgttacccgcacacagaagcagcttgttcttacgcacgccgctcaatatcgcggctggcaacgacaaccctctcgcttccttgccgagatgaacctcagcggtactgacacagactcttaa

SEQ ID NO: 71770 - DNA, 1923 bp, Geobacter uraniireducens Rf4
ttgtacgtagttgagacactcccctatagctcttgtaaatactataacaaaaggaaactaaatatgcccaaaccattggtggccacgagtggtgtgaaagttactgatgttcggattgcaaatttcagatctcttatggacattgaagtgagtcttgacagtctgactgttttgataggagccaacaatgcgggaaagacgagtttcctggacgcgatctatgcagctatcggcgctgggcgcaagctgctcggacaggatgacataagagtcgcgcctgaagaggcaataccacccaaagatcggaacgttgtcatagacatcaagataagaccaattaccgatgacggaaagtttgccgacgaatttccggagggcagtttctggacgtctctttggggttctggcatcacccctgcagaaacagatgattcgcacgagttcatggcatttcgcacaattttgtcgtggagctttgccaaaggagattacgtccttgaacgtaaatttctaaaagagtggcggccatatgcagagtggctgcctacacccatgcaggagaagagacttcagtcgtccgacatagagcccatagctctccattacattgacgcaaaacgagatctcgatgatgaccttcgcaagcaaggctctttctggcgaaagttgacggacgacttaggcctatccccggcggacataatcttcttagaagaagcgctgactggtattaaccagcatattgttgataagagtgagatccttaaacatctcaagcacaatttggcagacatgcaatccgtagtggctgcggaaggcgctggtatcgacatatcgcctgtggcacggcggcttcgcgatctttccaaggggattgatgttagcttttcaacgactgccgcccaatcattcccgctgacccgccatgggatgggtacacgtagtcttgcctccctgctggtattcagagctttcgcgtcatggcgcagtagccaagcgcaaatggaaggggatcaaatccacacttttcttgcgttagaagaacccgaatcgcatcttcacccgcaggcgcagcgttcgttattttcccatattaagacaatcccaggacagcgtatcgttagtacgcattctccttattttgctggtcaagcgcagttaagtgatttgaggttgttcttaaagcggggaggtaacaccattgtcacccaactggatatctctcagcttgggactaaagaagatttacgaaagcttcagcagaccgttgttgacaccagaggtgacttgttgttttcgcgtgcagtcattttctttgaagggcaaactgaagaacaggccctgccgatatgggcagaaaagtattggaacgcgagtatccacgaattagggtttagctttgtccgtgttaatggcactgactattttccatttatatcgcttgctcaacaccttgagataccttggtatgtgcttgctgatggcgagccacgccctcttggcgagctaaataaagccttgaaaaagatcggacaggtggtcgcttccgcttgccccaatatcgtagtgtttcccaatggaaataattttgaaagtcagtttttagctgagggttacctgcctgagattgaaaaggcgttgaacgagacacacaattgcacagatttcttgggtgactatattaatgaattgcaagggcagaagcgtaaaggtggggagatacgggactatacggttggagatggtcgcaagattgcagcgctggacgcgctgaatggtttgaagacatgcatggctaaaccgttagcccatacgatttccagtttacctgacgaagcgagacgatttccgaatcaaattcgcaaactttttgaaattatctcaagtgagcatggattgaccaaggcaaaggagacgacatga

SEQ ID NO: 71771 - DNA, 1863 bp, Geobacter uraniireducens Rf4
atgactaaggcaagactttctgctcagcaagccactgttgttgagcacgtagaaggtgctttacttgtaattgctggtcccggatctggtaagacacgtgtgttgaccgaaagaatccggcgtctcttgacggttattcccggtcattttcgcgtgctcgcacttacgttcacaaacaaagcagctaacgaaatgaaggagcgactttcagatctcggagatgtgcgccaacgtgcatttgttggaactttgcacagcttctgcctggatatgctgactgaacgtgggaaactcgttggtgttacaagcctgccgcatattttcgaacagttcagtgaccgcaaagaaattttgcacaaggctgttctgcaagaccctttgctttctgatgagttagatagagctggcgatgcgaaagctcgtaacaagaggttagacgactggctccaaggcatttcatgggtcaaggcacacccgattacttgcgaatttccgactgatgatttagataagcgcgttatcgaaacatatgatgccggtttgcgtgcgtgcgatgcctacgactttgacgacctgctcctacttgcttaccggctattaagcagttatccgaaaatagccgatttctacaggcgtctgtataaattcgtgtgtattgacgaggcgcaggatctcaacgaggcgcaatacgcagtgctgacagccttgtgtggagaggatttcaaaaatgtccttatggtgggtgaccccaaacaatctatttatggattcaatacgtccagtcctgactacatgtggcgcttccgtgatgaattcggcgctggcgaaatagaactcacagaaaactttcgctcttcgagtgctgtggtccaagttgcgcgttcgttggaaccacattacttggttgaggcccaacttccgattcctggagcagtttcagtattggtcggtatcgacgagaccgacgaggcccataaggtagtcgatgaaatccagcgactgatttcaagtgggcacgaggacattgaaggaaatgtcacgccatcgaattgtgcgatcttgggtcggacgcgttacgccctcatggcaatcgaaaccgagcttaaagagagaggcatttcttactacaaacggttgacagcaaatcacgagaatgagtccgccacagtcgatgaattccaactcgccctgcgcgtattggccaatccacgagatcgactccatctgacagcgcttgccaagaaatggaaactgtcggaaccaaaggggccagctccagctaacgaacaagaggtgcgattgattttttctgcaatggccaatgttgccaaagaaggaagagctagcgccatagttgatgcaatcgatgctgtcgctcggcaaacccaacgtctcgacctgatgcttggcatcaagagccttcgggcttttgctgatagcctgcctgaggtggaacggctggtgatctatgaagaccttgccgtgttacagcaggagtgggatcaatacctacgctcagatggagccgcccgtaccatcgctggcttcatgagcagtaaggctttgggggcaactcaacaagcttcgcgcgatggtgttgcactcctgacggtgcactcttccaagggattagagtttgatgtcgtctttatcgcaggaatggcggacggcgtttttcccgactatcgcgcacaaggcaaaaaaaaggagatggctgaggaggcacgcaacgcttttgtcgcggttacgcgttccaaaagattactttatctgtcctttccaaagcgcagaatgatgccttggggggatgaaaagcgtcagcaaccatcttgctatttgagacaagctgggctcgtcgaataa

SEQ ID NO: 71772 - DNA, 2040 bp, Clostridium botulinum A str. ATCC 19397
ttgtatatatcaaagttagaaattaataattttagatgttatgaagatgtagatatagaatttaatgaggggttaaatataattattggagagaataattgcggaaagacaactataatgagggcgctggaatatatatttaatcgttcaagagttagtacacctgatactaatgatttcaataaagaactagttaataaagctctagaaataggtgaacaaccaccagagataacaataattgcaactctcaagtcgtcaagcagtgataaactagaagataaagcagttgtagctagctggcttacaaagttagaaacaccgtgggaagctacgcttacatataaattttttctaccagaaagcgatattaaggaatacaaagaggaaataaaaagtattaagaaatctcaaaagaattatattcagaaaagatggaatatctttgaaaaatatttaaaaaagtatgtttcaaggatatatggagggaatagtgaaagtaaaaataaggtggaaagtgaatacttaaataaatttcattgcgagttacttgatgcattacgagatgtagaaagtaaaatgtttacgggaaaaaatgctttgttaaaagaagttttaggatattttaaggattcacatatagaaattgaagatggagatgaattttcagaagaagataaaaagaaactaattgagaaagaaaaaaaggatagaaaaaaagagtttgatgaatatgctgataagattgtaaaaaacattagtaagagagtagggaataacgatgttttagacttcgcagagaaaacaggtgcttccatagggggtattccaactttaggaggaaatctagaagaaaatgatgtattatctgtattgaaattaatgattaaaaataagacaggaattgaagtacctattattaataatgggatggggtataataatttaatttatatatcactattactatcaaagttcaaaatgattacttcggatgaatatggtgagaatgctaaagtattcccaatattattggttgaagaaccagaggcacatctccatcctgcgttgcaatacaactttttaaaattcttaaaagatgaagttagtaatcaaaaaataagtagacaaatatttataacaactcactcaacacatataacagcagcagtaggattagaccaaataatatgtatggagagagatgaatcaggtaatacaactgctagatatccaggtaaggttttttctgattctgataaagaagatataaaatcaaaaaaatatgttgaacgctatttagatgctacaaaatccacaatgttatttgctaaatcagttctttttggggaaggacttgcagaacaaatattattgccagtgttagcagagcaagttgatagaagttttgataaaaaccatgttgctatggtaagagttgatggtgtaacattcaaacactttattaaattatttggagctggaataaaaaaacataatttgaaatatgcattaacaaaaagagtagcctgtataaatgattcagacccacaaaaaattattaaggaaaaagaagagggcaagacaagacgttggaaaaaatgttggccttttgaaattgatttagatacagagcattacgattataaggcattttcgggaacaattaagaatttgttggaggatgtaaaggaatgcaaaaatgtaaatgttttttataacatcacggaaaaaggaaagacgttagaatatgatattgcacttgaaaattatgatagtgatgatttttttaatgataagattgaaattatggactttcaagaattgaataaaagttcttggaaaaaagaagagaaagtaaaagctaagaaagcagcatcatatttaaactatgcacaagatactaaaggggaagctgcatttgaattagccgagaaaattagaagtgaggaaataaatattaaattaccgaatcatatccaaaaagcatttaactgggtgtgctacatggatgatgaggaggtaaaagaggatgagtaa

SEQ ID NO: 71773 - DNA, 1782 bp, Clostridium botulinum A str. ATCC 19397
atgagtaatacggagtatgaaacaattacttcagaccaattaattgatataaatacaaattttaaaatcatagctggtcctggtgcaggtaaaacgtattggctagtacgacatattaagcacgtactagaagaatcgaaaatattaaaatcagcttcaaaaatagcgtgcattacttatactacagtagctgctgaagaaataaataatagactaaaggcaaatagtgatagagtagaaatatctactatacatagctttttatataataacgtaataaagccatatatttacttgttaaaggatgaaaatgaaaaatgtattgtgaattatattaaacttgatggacatgttgaaaatgttccaagcaatggcaaaataattcaatggaagaaaataaataatttattccactttaaagatgacaataagattaagaaatgtttgatggatttagattggagtttaaaagaccaagaattattattgaaagtacgaaaagattataatagaaaagtaggaagatattatatcaaagaagaatgttttccttcatataagcagttgttttgggatgaaggaataatacatcatgaggatgttttatatttttcatttaatttattagaacaatatccaatgataaaagagtttctttctgcaaaatatccttatattttccttgatgaatttcaagacacaaatccaatacagacccaaattattaaatggttaggagaagcgggaagtttgacaggggttataggcgaccctgctcagtcaatttacaaatttcaaggtgcttcaagaaaagattttctagaatttaatcttttaaatcaaaagaactataaaatagagaaaaacagaagaagcacggaaaatattattaaaatattaaatcatttgaggaatggagataacataaatcagagttgttatagagcgaatttagggaatgatgtgttgtacattgtatctaatgatacaaattatattattaataaatttaaggaagtaagaaaagcgataggttgttataaagactattgcattattacaagaaaaaatgacgatgtaataaaattaaagaatggtgataaaagttgtgattgtaaactatgggacaaagtatttgaatgtgatttttcaaggggaagatttttaaaaaatttatttactgctcaagaattggctgttgaagacagatatgagatggcaataaaagaggtattaaaattatttaaaagtaatagagatggtaaattaagagaacctttcaaatcaactatagaaattactaatttacaaaaaagaagttatgcagttagtatattagagcatttgttaaataatagagaaggtaatatgaatgtaaaattattagacttctataatcgattgaataatgatgttttagaaagtttaaatttacagatttcaaaagttggatctagagggaaagctaaaacttgttatgaatctgtaatattaaaagacctaataagtaatttaaagttagacgaagaaaaagaaagtaaaataagaactatacataaaactaaaggtacagaatttgaatctgttttagtttgtatagaaagcaatgatgatattgaaaatattatatcacctaatattgaaaatgaggaagatgattgcaggctttattatgttgcatcaagtagagcaaaagatcttttatgtattgctgtaccagaaggaagtcaagaaaaaaaattaaaggaaataggtttagtttctatgatagataatatataa

SEQ ID NO: 71774 - DNA, 2040 bp, Clostridium botulinum A str. Hall; identical to SEQ ID NO: 71772

SEQ ID NO: 71775 - DNA, 1782 bp, Clostridium botulinum A str. Hall; identical to SEQ ID NO: 71773

SEQ ID NO: 71776 - DNA, 2124 bp, Methanococcus maripaludis C7
atggttaataattacagactactgaaagaaatgaatctcgatttagaggatgatttatccctaataattggaaaaaataattgcggtaagacatcattattatcaatattaaataaatttttaaataattcacccaatttttcttttgatgattttaatattgaatttcaggatggattacgagattttgttttgcaaaacactgatttaactagccggggtatttatttaaaattgttcatagaatatggcgaaaaagatgatttagctaacgtatctaacctgatgatggatttggatccagataataacaaaataatactttcttttggatatgtattgccagacgataaaattgataatttgaaagcagattttaatgagtatatttcaaaaaaaccgaaacctgaagaaaataaaaaaaccatttttaacgaatttataaaaaaagaacatggtaaatattttaagacatttaaaaaaaccgtaggatatgatttacaaacagcatcaattaacgaaaatagatatattgacttaaacgaaagaaaaatatccctggacaatattattaattttaaaattatcggggcaactagaaatgtttctaataacgattccaacaaaactttgtcattattgtcatctaaatattatgaaaaaactgaagaaagtaaaaaaggactggataatttcaaagaatttaaagaaatattatgtaaaactgatggtgagctggaagatatttatggtaagttatttgaagacgtattaacaaaagttaggaaatttggcgggattaatgagggtgattctacaataaaactagtttcaaatttacaacataaagaactgcttggtggaaatactacggtagtgtatgaacataataaggagcatttattgccagaaagttataatggattaggttatttaaatttaataagtatgatttttgaaatcgaattaatattaagtgatttcagacgggaaaataaggaagataagaatcctgcagatataaacatattatttatcgaagaacctgaagcacatactcatccacaaatgcagtctgtattcataaaaaatataaaagagctgctcaaaaccgaaagtggaaactctgacggaacagaatttaatttacaaacaattattacaagtcattcatcccatattgtgtcggaaagtgattttgaggatataaaatacttttataaaaaatctcaaaatgaagtaattgctaaaaatttgaaagatttaaaaagtgaatacttgggtgctggtgaagatgcatattataaatttttaaaacaatttcttacgctaaatcgggcagaactattttttgcagacaaagctattttaattgaaggggatactgaaaaaatacttttacctgcaatgatgaaaaaaattgaccaggaatttccagaaaacatgccccttttatcacaaaatatttcaatcgtagaatccggggcatattcccacatttttgaaaaatttatcgattttataggcataaaatcattgataattacggatcttgattcggccaaaaaagaacctgttcttaataataaaggcgaacaagaaacgtatgataacggtaatcctaaatacacaaccgggaaagttaaagtttttgaagggaatattacaacaaatgcttctttaaaattttttcatggaaaaagagaaaatttagattattttttggggttgtcatgcgaatctaaaagattatctaaaaataaaacaacaaaaaattgggaaacagacgaaaatgggaatttaatggtaattttccaagttgaagagagtaattgcaatgatgaaaaatattgtgcaaggagttttgaggatgcatttttccatttaaatcggaagtatgtatgtgataacattggtaattttccaagtttacaatataaaaaatatgttgctgaccagactaaagatgtgtatactttagcagaaaaatgtattgataaaaaaccagcttttgcaatagaaatattattaaatagcaaggatactgaaaatggaaaaatgtttggcaattggaaaactccaaaatatatccgggaggggttgatatggttgaaaaattgctag

SEQ ID NO: 71777 - DNA, 1884 bp, Methanococcus maripaludis C7
atggttgaaaaattgctagaacctgaaatagttgagatatttggccatgtgctacgggggaataattttcttctgagtggtggggcaggtagtggaaaaacatattcgttaatccaagtaataagaaaggcattaaacgataaccctaatgctagtatcgcatgtattacatatacaaattcagcagtaaatgaaattaaattaaagattaatcatgataacttaatggtttcaacgatccacgattttttatggaataatatcaaacaattccaaaaagaattaaaaaatggaataattgaactttcagaactagaaacttcaaaaattaagtttaaaaatgaaaatgataaaagtcattttgtagaaaatgtgtcaaatattcagtataaagaatatattcaaatgaaaaatggaataatttcgcatgacgaagtactcgttttagcccaccatctgttcgaaaaacatgatttactttgtaatattctaaaagataaatttaaatttatatttcttgatgaatatcaggataccaataaattggtaattgaaatactattaaagcacttgaaaaaatgtaacaaggaacagattattggattttttggagactcaatgcagtcgatttatgatgatggaataggggatttaaaagattatgtaaactctggagaagttaaagaagtagtgttgaatcagaatcgaagaaatccaaaattagtaattgatttggcaaataagttaagaaccgacaatgtgatacaagaaccttctaatgatataaatgcaccaaatatgaaggatgggtcagtaattattggaaaaataaactttttgtattctacaactaacgatgtagaaaatattaaatctacacagtatttttcaaattggaattttaatgatactattaaaacaaaagaattaagtttaactcataatctaatcgctccaaaagcaggattttcaaatttaatggcaatatatgataaagatccaatgtttagactaaaaaatgatatattatctaaatctaatgaaaaatgcattgaattggatgattctaagtcattcgaaaaaattattgaagaagttgattctttatttagaaattctaaaaaacagatgataaactcgtcaaacgaagtaaaagaactatatgatcacctgaagaacttaccattttctgagattaagaaaatttattttgacaaagattcattaatagataataaaaaagaaacagatgatgagggttctaacgactcaaaaagggataatttaataaaacatttgtttaaaatagaaaaaattattcaaaattataaaaataaggattataacgagtttatacgaaaaacaaattttaaaatagattcaattgcaaaaaaaagagaactaaaaaatatcattgacaaaataggaaatttttctgaacttaaaatcgaagaagtaattaatttatgtgatgaaaaggagctatgtaaaaaagatgacagtttcaatacattcattgaaaaaaatcaatatttgtataatcgggttaaggccctacaatatttagaatttcaaaatttatttaattatttggagggatttaccccattttcgacacaacataaggttaaagggtcagaatttgaaaatgtacttgttatactagacaatgggggttggaataattataattttgaatatctattttgtaataggatagataaacaaagtgtgttattaaggactcaaaagatattttatgtatgttgtactcgtgcaaaagagaatctaaatatttattaccataaccccaactctcagaccatcagcaaagcaattgaatggtttggggaagaaaatgtccataatttggacgataattaa

SEQ ID NO: 71778 - DNA, 1710 bp, Shewanella baltica OS185
atgtacattcgtacggtcgaaattgaaaactaccgagccttcaaaagcttcaaaatcaaactttcaccacttagcctaattatcggtgaaaacgaagcaggcaaaaccaacctatttgacgcacttgctctgccacttaatagcaacgacataagcttcaataagaaacgtctatctgtatcggacatcaaccgcgaagcaatcaaagacttttatcaagctatcatcaacggcaagggagatgatgagatcaaggctttgattccaaaggttcgagttgaggtcgagttcactgacccaaagaactttattgaagaaggcgttattggtaagtggataatcggagaagaagccgacgagagttataagattcggtacgacttcaggcctaaagatgcagatcattttgtaaagagtgccaaagaattactcgacggcattgaggacatcaaagaaacacgctggtttaacttaccaattgagctttacgactatgatgtaacgcaaagcaataatgggttaaaggttagctattctgatttaagacttatagccatcaactctatcaacgccgagcgtgacgactttgctgaaaataatacacagaaatcaaacaacattctgacaaaaatgcttatttccgctctcgaggattccgacaaggccaagattaacagcgcgtacacttctttctttgatgaaatcgaaagtacagagacattcaaaaaaatcgttacacctgatccagacttcgagaacttcttcgacgaaattgttgataagcttgaatgtatccccaacctgccaaatttaaagagcatcctatccaacataaccttgaagtctggtgaaagctacctatatcagcgtggccttgggtatcgtaatcttgttttcatttacctattatttgagttcttcaaaggcaacaagaatgcactcaacctctgctgtatcgaagaacctgaagcacaccttagcgtcaacaacctccgctttgcaactgacttcatatacaagagcacacaaaaaggcggctcatctctacaaacgctaattagctcccatagccctcaagtcatcaataaacttgagctaactaacgtgatcgtcctatctggaaatgaggccatacacctaactgatagtaagaagcatctcactaattaccttcgtaagcggcctaacttcgatattctaaaactgctactaagcaataagactgtactcgttgaaggcactaccgaagagatgctgatcaacgccatcctctaccgtaataacaagaatttgagtagtcttgaagtaatatctatcgagcaaactggcttcataactttcatggacgtctggttgcaagtcaataaaggtaaaccaaagaagaagctaagcatcatacgtgattatgatgataataatgcgaccaaagacaagcaccaaaaatacgatatcgaaaacgacaatataagagtaagaaccactacccaatatacgctcgaagacgatctagctggaaccgctggaaaccttcatcgcctaaacacactgttcaacaagaagtgcaaaaccccggaagagatggccaagttcctgaaaaatagtaaagccgaaaggatgctcaagattgcagactctatcttagatgaaatgaacaaagatccaatcatgctacccaagcacattcaagaagccttggacttcatgaaatga

SEQ ID NO: 71779 - DNA, 1455 bp, Shewanella baltica OS185
atgattgaagtccaaatagccggagcaggtgctggtaagactcacggcctagctgagaagatcatcaagcactatgatgcttcgtcatataagaagatctttgccatcacttataccaataatgctgcgaagaacatttccgaagctatcatcaagcaatttggatacttgccagaaaatatcatagtttgcactgttcatacgttcctattgaatgagatcatttacccttactctccgtttgttctaaatgaaatacacaccacctcctctcgatgcaaaacattctcaaactttccgcctggcaagtctgaggaaaaaaaacgacgagaatcagcgggcacaattagcaggctaaagaagattggcgtgatacatgtcgatgagacatatgctgcggcatggagaattgtcgatgaaaactactccaaacatagcagccagaaaaagaagtctaaagttaggaaagttcacaagttactaagtagcgcgattgataagatttttctcgacgaagctcaggatcttgatgaaacagctcttaaggcttttcaacaaatcggcgagaattcggttgacatttacatggtgggtgaccccaagcaagcaatagattatccaacatctttcacagagtggttagctgcgaataaagccaacgaaaaagttaaagtacttccgaatataactacttctcgtagggttccacagagaattcttgacctctcaaacaccttttgccccaaaggccaagagcaaactagcttgtctgaagttgaaggacgcctaacatacatcacttctgaagatgatcattacgacgacgttctctgtcatcacattgagaatagaagtttagtgagcatcttcagaaaagaaggtaattactcaaccaaacaagcagggtcactacccgagtttgatcctgaggtagaagagctacttacagtaaagtttcccgaatacgaagaaggcgtggtcatatattcattacagcgtttctttacctccctgttatccaagaatgacaacaacaaatctatacgtaaatttcttgccaagctggaaattccgtatgacaaagagctgttcataaaactttgccgctcagccgagcaatttagttcatctaaggacaattcggccaagtatgcaataagcaacatccaacgaactaagggcttagagtctaaggtttgtgtcttaatcttaacgccagcgatattcaaatgcttaatgcagaatggtgtaaccaagttcaacaagacttggaatatggtctacgtcgcattaacgagagctgagtcagagcttgttgtagcagtagacatggctttgcttggcagagggtataagcatgatgatattgttgagagccttgaatctattgggtttgaagtgctaaacccgaatctaccaaaccacaaaaccgaagaaaaattagaggaagcgtaa

SEQ ID NO: 71780 - DNA, 1785 bp, Parvibaculum lavamentivorans DS-1
atgagggtttctcgggtcaggttgatcaatttcgccaatttctcggatgttgatgtcgagacgggggaaagcatcgtcatcgttggagagaacaaggttggcaagagcaatttcattcgcggcctgcagttgatccttgatccaggtttgtctgaacgcgatcgacaactggggcttgagtatttctgggacggacttggcgaagacaaggttggtgcgaccattgaggtctctgtggatctaacggacttcacaaacgatccccggttgatggcccacctcaacgactgcgtgattaatcctggccctcctatggtggcccgactcacctatcgcttccagcctaaagcgggactggggcgcgccccagaatcgttgaaagactatgagtacataatcttcggtggtaacgatcccgatatgctcattggtggcgcacttcgccgaatgttgccaatagatgttcaggtagcgctgcgcgacgctgaaaaggaccttgcgagctggcgtaattcgccattgagaccgctcattgaggatctcgcagcatccctggatgatgacgcccgcgaggagatccagaatcaggtcgatgaagcacagcgagagctggccggtcatgaggaagtggtcgcgacagcggaacgaatcagcgaacggttgatcgccatcgccggtgggcagcatgccgtcccggtatcgctcggacttgcacctacgcgagtcgatgcgttgctgcgtagccttcggctgctcatcgacaacggtgttcgcggtgtcggcgatgccagcctaggaacggcaaatctgatcttcctggccttgaagagcctcgaactcgaccgcttcgtctccgagggggagcgcgaccacacattcttcgtcgtcgaggagcccgaagcgcacctgcatccgcatgtccagcgtcttgtctatcgctacttcctcggcacaagagctgaagatgaggacgaagcccctccgctgacgacaattctcactactcactcaccgcatatcgcaagcgttgcaccgattaggtccatcgttctcctgcgccataacgcagcggacggaaaaaccatcgcggtttcaaccgcaaacgcacctttcacacagagggatgaagacgacctccagcgctacatcgacgtcactcgcggagaaatattcttttcccggggagtgattctggttgaaggggacgctgagcgcttcatcatccccgcgttcgccgaggccctcgggattcctttcgacatacttggaatcactgtgtgctcggtcggggggacgaacttcactccttatgtgaagcttttgggccctaaagggctaaatattccacatgtaattttgacagatcgcgacccggtcaatggcaaacctccactggcccacaggcgattaattaatctcttgaacgaggtcgatgaagaatatggctacgatgacctggatatagatgatgtgctcaagtacgccgcggagtttggatacttcgtcaacgagagcacgctggaatccgacctattcgctgccggaatggccgaggcgatgaaggcggtaatcgagcaggagttgccgctgaggcaagtcacccgggacgcattacaagagtgggtggctgatccggatcaggtcgatgaagaccggctgctgaagttgattgaacggattggcaaggggagatttgcacaggcacttgcgccgtcggtgtctgagggcgtttgcccggcctacattcgctctgcgctggagcatatccgcgatgccgtcgcgtaa

SEQ ID NO: 71781 - DNA, 1815 bp, Parvibaculum lavamentivorans DS-1
atgccgtcgcgtaacgtcggtacagcctacctggctcaggctgccgagttggctggaaatccagggcagttggcagcttacaactctcaaggacattgtgtggtactcgccggtcccgggagcggtaagaccaagacgctcgtcctaaagctcgcccgaatcctggccgaagacgtcgagtcccctcgtggcgttgcgtgcatcacgtacagtcaggagtgcgctcgcgaactcgttcgccgaattgaaagcttgggacttcagcaggcacctaatcttttcattggtacagtccatgggttctgtctgcgtcatctcttgatgccgtatggacgcttggccggcctgcccatatccttcccgctttcggtggccactcaacgagtcagtgatcggttgttgaagcaaactggagacgcaattttcgggcagaaccatccgtacaaggtcattgacctcgggcggcatcgccgttccgtgctcaatcgaaatagcgtcgcttggcgtagcgaggaggagctcgctgcgtgggccgaggcctacgaggccgctctgcgcgacgaggggctgattgactacgatgacatggtcgtcttcggccagcgtttgatcgccgagcacgactgggtactacctctggttcaggcaaaattccccgtgctcgcggtggatgagtaccaggatttaggcgtggcactgcatcgcatcgtcaaacgccttgccttcgacgggggtgtccgacttttcgcggtcggtgatgcggatcagtcgatctatggattcacgggcgctgacggcgcgttgctcatggagctggccgcacgcggagacatcgagcctgttaggctccaactgaattatcgctctggcacagggatcgtgacggcgtcggagatggcgctcggagaagtccggggctatcaagcgagcgatccagctcgacaagcgaccattgaattcgtcctgcggccaggtggtatggccgatcaagccgcgcacgttgtcgcgcaaattattccggcagcattggcttctaagccgggacgaacactgggtgatatcgcaatcttgtacaaagactaccgcgcaggcgatatcgtctccgaagctgtgaccgccggcggtttagattacatccgcgtggacactgcggcgccttaccgcaaggtttccctgacgagctgggtggaagattgtgcggcgtggtgcgcgggcggctggcgtgtcggacgcccacaattgcgcggactgatcgaccgctatctcgcatttcatcgagcgagcttggacgatgcacaagctaggcgcgagggacaagagctaaccgctttgctatgggcgttacgctccgaccagcaacctgcgcgtgattttgtcgcttcgctgcgtagcggcatcgttgaccgtctgttggctgctgaattggcgcttgccgatcagaaggaacaactcgatcgcatgacggcagcgctcgccgaaggcggcgcactggctacgctggacatgacgagtttgggcggtagggacggttcgcctgatcatctaaatctgctgacactccactccgcaaaagggtgcgagtacgatgtggtcatcatggtcggtctcgacctcggaaatctaccgtggcgcaacgagagtccagagaagttgcgagaaagccgccggctgttctacgtgggtctcacacgtgcgcgtgacgaggtccacatgttgtattcggggttcgttgaggggcgctatggcccgatgcgccttgggcgctcgccattcttagatgagctagaggctcgaatgcgtgccaccggcatttga

SEQ ID NO: 71782 - DNA, 1860 bp, Xanthobacter autotrophicus Py2
gtgagggcttgtcggctaactataacgaacttcaggggcgtcaagtccgcgacgctgcacttgccgcagcatggtgtgctgatcggcgataacaacaccggcaagacgaccatactcgaagcgctcgacctggtccttggacctgaccgtctcaatcgtcagccgcctatcgacgagcatgatttcttccgaggggcctatctccccgagcctgctgcgccagcggccgatgcagccgaggctgttgatgatggtggcgacggggagcttcctgcaccggaagtcggcgccgaaccgcccaggatcgagatcgaggtgacggtcgccgacctcaccgaggagcaaaaggggaaattcggggactacaccgagttttgggatggggcgatggacaccttctacgacgagccgaatccggccggcgtggatgccgccaccattaccgaagcgctccgcatcacgttcctcggctggtacgacgccgaggaggacgacttccaggggaagacctatttcacccgcagcctgaccgagggcgaccggcccgagccgttctccaggaagcacaagcaggtgtgcggcttcctctacctgcgctcccttcgcacaggttcacgcgcactgagcctggagcgaggcagtctgctcgacatcatcctgcgcctcaaggaagtcaggccacagatgtgggaggccaccctcggcaccctggcgggcatctcagtcgcgagcgatccgaagctcggcatctcgcccgtgctggagagcatcaacacggcgttgaagaagtacgtgccaaaagagtggggcgtggagccccatctcaaggtctccaatctcacccgcgagcatctgcgcaaggtgatcacggccttcatcgctacgggtgacggggaccatgccgcgccgttctatcggcagggcacaggcaccatcaacatgctcgtcctggcgatgctctcccagatcgcccaggacaagcagaatgtcatcttcgccatggaggagccggagacagcaatcccgccctacgcgcagaagcgtatcgttcacgaggtgcggaagctcgcgtcacagacgctcttcacgtcccactccccctatgttttggaggagttcgcggtcgaggagactgtggtgctcgggcgcgatggagaaggggtcttggagcaaaaggccatcactctcccgggcaatgtgaagctgaaacgctatcggcagcagtttcgtacgcgcttctgcgaaggattgcttgcccgccgtgttcttgtggcggaaggcgccacggaaacctccgccttccccgtcgcgtgccgccgcctggcggagctcaaacccgatacctacgcatcccttgaggcgctcggcgtctgcattgtcgatgccggcggagaaaccgacatcccgggcatggcaaagctctaccgagacctcggaaaacggactttcgcgatctgtgacaagcagggcgatgcgaacaaggacctcattgaggcacaggtcgagctgctcttgatgcacgaggaaaaaggctttgaggccatggtgcttcaaggcacaacggaggccgccttgaagcggttcaccaagctgatcgactggccccaggacctggcccagaaatatcctgatccggaggcccaggccgttgactctttgacggactatttcgccaagtcgaaagggaactggggcattgccgactttctcgcgcaatgcagcgaagccgagattccccagtggcttcggaatgcggcggtcaacttgagggatgcctgtcttcccatccctgcgggcggtggccaggctgccgcacccgctgcggacgagcacccggaagcggtcgatggagctgactaa

SEQ ID NO: 71783 - DNA, 1788 bp, Xanthobacter autotrophicus Py2
atggaggcggacggccatctcctggtcacaggcgggcccgggtccggcaagactaccatctccatcctcaaggcggcgcaagtcgccgagcgggaccttcgccccggtcaaaagatcctgttcctcagctttgcccgcgccaccgtttcccgcgtagtcgaggcgatcgaatacgagcagcagatcccgcctgcccaaaagcgccacatcgacgtcgaaacctaccattcctttttctggcgcatcctgaaggcccacggctatctcatcggcctgccacggcggctcttcattcttacgccgcccggcgaggccattgcgctctcggccgcccgatcaggttttcccgcccggaatctaacggacgcgcagaaagcagcgaaaaaggtcgcggaagagacggaacgcgcgcgccttgcaacggaagacggccgtgtgtgctttgatctttatgccccctatgtgggcgaccctctccatggcagcgcgcgtattcggcgccttatcgccagcatgtaccctgtcatcatcctcgatgagtttcaggacaccaacgaggcgcagtggcgtgttgtccaggcgctgggcgaagtctgccgcctgatcgccttggcggacccggagcaacgaatttacgactggatcggcgccgatcctgcccggctcgaccatttccgggaagccttcaagcccacggaagtggacctgagcacagacaatcaccgtagcgccggaaccgagatcgccctgttcggtaatgacgtgctcaccgggaaattccggcaggattcctataagggcatcgacttcgatgtcttcgacccgtttcccgatccggcgatgaccaagctcgtgacgacggtttacaaggcgcggaagcgtctcgtggatgcgggcgtcgtcaattggtcactggccgttctggtgccgacaaagaaaatgactcgcctggtatccgatgccttccgccagcctcctgccggcatggtcgaggtgccccactcggcggtcatcgaactggaggccgccattctcggcgcggaaatcatcgcccttctcatgcagccggccgacgaccgccatttcggccagttcatcgacctgatgtgcaactactttcagggcaagggcggcgatgggccgacacagggggcactcaaggaggccgcgaacatccgcaaggcctacgacgagtggctggcctgtcgggcggcaggcaaggcgatccgcaaaaacagcatgctcgtcaacatgattgccgtctacgagcaggcccgtaccgctgtgctgacgggtgaccccgacgaggattggcgcgcagtgcggcgggttctggaggatgggggctgcgcgcgcctgaaggagattgggcaagaggtgcgcaatctccgcatcctagagcgcggcacccaacttcgtcaggagctgtcccaagattggcgtgacagtggcggctatcgcaatgccctagctatcacgcggcaggcttttattcaggagcacttctcgacgaacgcgaagcccgaatccggggtcgtcgtgatgaacatgcacaaggcgaagggaaagcagttcgacgaggtcatcatctttgaacactggccgatcaagcgaaaggggcagccgccctacaatggcgacaggatcgtgcgcttcaattccagggagcagatcgacgatcaggcgcggcagaatttccgtgtcagcgtgactagaggcaaacggcagacgaccattttgacccccaaatgcgatccctgcgttctccttttgggagatgacgagtag

SEQ ID NO: 71784 - DNA, 1797 bp, Xanthobacter autotrophicus Py2
ttgaagatattctcggtagggatcgaaaattttcgcggcatccagtcggccaaactggtgctgcctgatcacgccgtactgatcggcgacaacaataccggcaaatcgtcggtattcgaagcgatcgatctcgccttggggccggaccggctgagccggcgaccccccgtggatgagcatgatttctatcaggggcgctatcttcctagcccaaaccccgatgctcccgagggcgcggagcccggccccgcgccgaaaatcacggtcgaggtgacgatcaccaatctgtcgccggagcaggaggcacgatttggagccaacgtcgagtggctgaatactactaccggagacttctatcaggaggccaacccggctggggtcgatgctgccgagatcaaggcggcgctgcgcgtcacattcgtcggccaatacgatcccgatgaggatgacttcgtcggcaacagctatttcacgcgcagcctttcagaggatgagacacctgcatcgttctcgaagaaggacaagcagcactgcggatttcttttcctgcggtcgttgaggacaggatctcgggcgctcagcttggaacacggcagcctgctggacatcatcctccggctgaaggaaatccggccgcagatgtgggaagggacgatcggaacgctcgcagccttcgatgtcgcgagcgacccgtccattggcatctcaggcgtgctcgagagcatcgacaagtcgctgaagaaatacgtcccgcgcgaatggggagtgaagccgcacctaaaggtgtcgaacctgacgcgcgagcatttgcgcaaggtcatcaccgcgttcatcgccacgggtgcgggcgatcatgccgctcccttctttcggcagggaacagggacgatcaacatgttggtgctcgcgatgctgtcacagatcgccgaggacaagcagaacgtcatttttgcgatggaggaagccgaaacggcgattccgccatacgcgcagaagcggattgtccatgagcttcgcaagctgtcggcgcagtcgatcttcacgtcgcactcgccgtatgtgctcgaagaattcagcctcgacgaaaccgtcatcctctcgcgatcggacaatggccaactgagccaatccaaaatcgagttgcctgagagcatcaagcacaagcgttatcggcaggatttccgaacccgattttgcgaggggcttctttcgcgccgagttctcatcgccgaaggcgctacggaggcgacctccttcccggtcgtcgcgcggcgactggccgagctcaacccggctgcttatgcgtctttggaagccttgggcgtctgcgtgatcgacgccggaagcgagacccagatcgccgaccttggagcgctgtacaaaagtcttgggaaacggacctttgcgttatgcgacaagcagacggatgccgccaaggtggccatagaagcccaggtggaacgcctgttcatgcacgacgagaagggtattgaggatctgatcctcaagaacaccacccaagcggccctggagcggtttgccgatcagctcgattggccacagcatctgctcgcgaaataccccgacccaaaagctcaggctgctgccgcgctcggggcctatttcagctggtcgaaaggcaattggggaatcgctgagttcttggcacagtgttccgaagctgagatcccgcagtggctacgggatgcctgcgtcaccctgaaggcactgtgtgatccgcctctacagccagccgagcccgaacccgaagacgattttgctgacctgttaggatag

SEQ ID NO: 71785 - DNA, 1827 bp, Xanthobacter autotrophicus Py2
gtggtcgacctaacagaagcgcagaaggaaattctacaagctgtcgggcatcaactcgtcaccggcggtcccggttcggggaagactaccgtctctatcctcaaagcggccaagatcgcgcgggaggaattgaagccaggacagcgcatccttttcctcagcttcgcgcgtgcaaccgtttcgcgcgtgctggaggcaatcgacgaagaaagcgcaatcacgcgagaggagaggcaacggatcgaggtcgatacctaccattcgttcttctggcgcatccttaaaacgcacggctaccttgtcggctttccacgacggatgacgatcctcacgcctccgaatgaggcgattgcattgtcggcggttcgaagcggctacaaggcggccaaaaatctgtcggacgaggaaaaggctgagaagcgcgcgaaggaggaagcggagcgtgtccggctggcgaccgaagaagggaaggtctgcttcgacctcttcgcagaccgcgtggcgaccctgcttcatggctcagataaggttcgagcgctcgtctctacgatgtatccgtacattaccctggacgagtttcaggacaccagcgccgatcaatggcgagtggtccaagccctcggcgccaacagcacgttgatcgctcttgccgacccggagcagcgcatattcgatttcatcggcgccgatccggaaaggctgaaccacttcaaggccgatttcgcgccgacggtccacgaccttgccggtgacaaccatcggagcaaggggacggagattgccctattcggcaacgacatcctgaccggcaattttcggcagaaggaataccagggtatcggctacgcgccgttcgcgtcgaaccccaaccaagcttatgcttcactggttggccaggtgttgcaagcccggaagcgcttggttgagtctggccggcgtgactggtcgttggccattctcgtgccgaccaagaaaatgacgcggatggtgtctgacatcctgcgcgagccattcggtaatgttccgtcgatttctcactcagcagcagttgatatggaaggcccgatcctcgccgcagagatcattgctttcctgctccaaaagtgcgggcatgacggaagtttcgacgaatttgtcgagttgatgtgcagctattttcacggtcgaggaggcacggcgccgaccaagggcgacatggacgaggctgcgcggttccggaaggcgctgtccaagtggaacgaatgtctagcgaaaggacgaacaacgcctggtaacagcgtcttgcaaggaacctttgccgtgcaccaggcaactgccgcactgacattcacaggtgatccggatgcagattgggtctcggtgcgcgacgttctggatactggggcctgtgagcgactgaaggatgtcgcaaaggacgtccgtaacgtgcgtctgcttgagcgcggtacgcagctccgtcaggggttggcgcaggactggcgtgacgtcggccgctatagcaacgcccttgcgatcacccgccagtcgtttgttcaggagcatttcgcaacagcccacaagcctgaatccggcgtcgtggtgatgaacatgcacaaggcgaagggaaagcagttcgacgaggttgtgatctttgaaggatggccaaaacggttcaagggcgaaatcgtggccaatcctgaccggatcgtcttcggcaatgtccacgacggggtgatgactcaggcgcgtcagaattttcgggtcagcatcacgcgcgcaaaggcacgcacgacgatcatgacaccaagggatgatgtctgtgttttgctcagacccgtaccggcatga

SEQ ID NO: 71786 - DNA, 1824 bp, Escherichia coli O139:H28 str. E24377A
atgaatattctgatagataaagtacgtatatctgggtttagaggaatatcaaatattgagataactctcccaagagtaactgttttattgggacaaaataatgcagggaaaacatcagtaataaaagcaatgcagttagcaatgggagactattcgcgttacttatcggatgaagattttcatataggtgaagatgaaaaacggcaagaggctatcactgtagatcttcgttttatagctgttgatggtgagactaggattaaagagttttcagaaaactggcagcaagtgtttggcgagaaaattcagtcagagcctgatggaagccaatttgtatgtatacgaactactgcaaaaccagatcgagtgaagggggggtacgttgttgagcggtttcatttggatatttggccagaacgtatgaactggcaagatgctagggttaataataagaatagattaggtaagcgattggagtttgtaccttttattccgattgatgcgcaaagagatatacatagtgaattgaaagagaaatcctcattcgtggggcgtgtgctatcaagtgttgagtatgacgataaagatgttgctgagctggaaaggatggtggctgaaataaataaagaagctatcgagaagagcgaaccactcaagcgtttgaaaaatcacctagataatttaaaccaatcatttgaaggttcagggcaaacagagcttaccccgtttccgaagaagatacgagatctgtcaaagagatttagtgttaattttggtgaatctgataagagttcgttttcgatggaatatcatggtatggggacacgtagttgggcatctatgttgacagtaaaagcctttactgaactcttagttaaaaatcacgaagaagaggcagaaccgtttttcccaataatggccgcagaggaaccagaggcacatttgcaccctaatgcacagaggactctatatagacagctcgtggatgctccagggcaagtgattatcagtacacactcaccttatattgctggtttggcagagttgcatgaaattagattcctaagtaagcaagagaattcggtatgtgtatatcagttaagggataaatttgatggtgatgatctaagaaaattaaggagagaagttgttcactctcgtggtgagttattgttttcaaaagcaatagtattatcagaaggagaaactgaagagcaagccttacctgaactttttgaagcctataccggaaaacatcccttctcgcttggtataaacttcgtaggagttaatggttccggagcgaaatatcgtccatttcttattttggcgaaagatttcaatatacctgtattcatatttagtgatggtgaagaacagacagttaaagatcttaaaaagaactatgaaaaagtgtttggggttactgatataatgaatgcagctaacatcaccatacttgaagggactgattttgagggctatttgttaagtcaaggtttcgatcagttgattgaaaagactatacatgaaatcgacggtgatgatgcaatcgataagtggattgaaaaaaagaatggaacatcgttaaagcggattcgaactgataagccaaactgtggcacttgtaatcaaccaatctttgaagatgtgctgaggaattacattggtgatgatggacgagttcgtgcaatcctcgaaatccttgattcaagtaagccgctttatgcaaaagcaatcacagataatttgattaaattaccgaaagaaaaatttcctcagaagataattgaattattcaaacaaattgagtcgggagtttga

SEQ ID NO: 71787 - DNA, 1893 bp, Escherichia coli O139:H28 str. E24377A
atgaatctatcaaatgctcagcgccagatcgttgaagcccctatggatatagctattcaagtgcttgcctcagcaggttctggaaaaactcgtgtcttaacagagcgtgttcgatatatattgaataatacaaagagagatgctgttattgccctgacctttacgaataaagcagcggaagaaatgagttcgcgtttaagtgattttgatccagatgaagatagggtctggattgctacgattcactctgttgcgcagcgtattttagaaaaatacggacacaccattggtttgccatcagatttgtatatatatgatagagataaggatcgtatggaagtctttatgcagtctttgcgtgaagatggtattgatatagatgaatatctctccattgcagattccaaggaattgaaaaatagagagcgaaatctgcaatcgtatatggatatattttcaaaaataaagagagagttgcttactgagtttgaggtatctgagttgtatccagataataatatctggaaaatatatcaagattatcaggcttcattacttaatagtggcggtatcgattatgacgatattttagtatatgcacatcggattctgctcacgcatgattggatagcaaaaatatatcgttcaaaatataaacatgtttgtgttgatgaagctcaagatcttaataaagcgcagtatgaatttattaaggtgctgtgcggtgatgtgataaaaagtattcttatggtaggtgaccctaatcaaatgatttatggttttaatgggtcatcaaaagactacttttgtgaagattttattaatgatttttttcctaatcagtttgagttaaaggagaattatcgtagtgccaaagctattattcgcgcagcaaataagttaagaccgggatcacaagcagagattgattatgccttagagggaggcgttagaatctcagaatttgcttcagaagaagatgaagctgatacggttgtcgctactataaagcatcttctggaattgaaagttcacgatgagattgagggggatatttcactaaacaatatggttgtgattggccgtaatcggtttgtttttggcaagcttgaaaaatgccttaaagaaaatttgattccttactctttgaggaaaggagagagagcgttagaaccttcgactagatttggaaaagccctggactatgccattagagtgaagttgaattcaaaggattgggttgatggaaaaaaattatgtcaagtactttgcatatcagagccggctggctggacacctgatgtattgcgagagatggcggttcaaatttcatcatcagatgatgattactctattgtatttgaaaaacttcttactactattgatagcttaaatattgaaaatcctaaaattcccaagctaataaaggaatttaatgctcttcttacatcgttagttgaaaatcacaatggtatttcagacgataaaatagaagacgtcaagttgagtattgaggagcttaaagagtttagtggtatgtggactcgatttaagcgtaaggggttaggtgattcattagttgcatttaggaacgcattggcattggggcaactagctgaaagtagtatggatgaaggcttaactttaagtacagtgcatactatgaagggactggaaaaggatatcgtgttcttgataggtatgtgtgaaggggttttcccggattacagagctagaacgcccaaagagcttgaagaggaacgcaataacgcttttgttgcggtgacaagagcgaagcgttggctgtacgtttcttatcctaggcagaggatgatgccttggggcgaccttaggtttcagcaaaaatcccgatttgtcagtgaaatagaataa

SEQ ID NO: 71788 - DNA, 2136 bp, Citrobacter koseri ATCC BAA-895
atgctaagggcccaatcgattactatgtatatcaataaattagctattagaaactataaaaactttcgaagctcaaatttctactttgttaaaggctcagtgaatacaattatcggtgaaaatgcttcgggaaaaacaaatttatttaatgcgatgagattaattctagatgattctctcccaatgaattctaggattctatctaatgaggacttctaccgtggattatccgaaccctttggtcattggatcataattacgctatattttgatgatttaagtgagtcggaggaagaacaggtccttgccaactatacagtaaatgatggtaatgataagtctataaaggaaggtaattatacttttatatatcgacctaaatttcatattcgacaaaagctttatgagttaacattagaagatgacaatgtggaagcaagatctgcttcttttactgaatttgcatctaaccatattatttctaaagaaacatatgaagcagtagcttttgttagaacaaaggttgatttgaataatgacgaaatttataaacaagtagttggtgattttgatagttactccttttcaaatcctaatgatgatgatgctactgtattaggggttaagaagccaccttactttgccttaggcagcgaagtcgcttgcacttatgtcaaagcacttaggaatgtagttgcagatcttaaatattataaaacgaatccattgtataaattacttactttaaaaagtaaacaaattgatgatagaaaagatattgtagaaaatgttaaagagatcaatggtaaaatttcagctatacctgaaattgagagattgagtaataagatatctgcttcattacttaatacagtaggttcgacttattcccctaaaatattagtatcctcacaacttccagaagatttcacagaattaattcaatcacttggcttagtggttgaagattctctggattacaatggctcaggaaagattgatgatctgagtcttggtggagcaaacttaatttatcttgctttaaagttatatgaatatgaagaaataagggatagtgaagagcatattactcacttcttgttaattgaagagcccgaagcacatattcataaccatatccaaaaaacccttttcgataacttcaattttaaaaatacgcaagtgtttgtatctacacattcaacacaaattagttctgtatcaaaaatatcatcaatgaatatactatcacgccaaaaaggattcactgatgtatatcatccatcgtttggtttgacgccgaaagaaatttcttccgtagaacgatatcttgatgcaattcgtagtgaccttttgtttgctaaaagtgtcattctggtagaaggcgatgcagaacttattttaataccagcaatggtaaaagaaactttgggaatcagcttagatgagttgggcataagtctgatcaaagtagatggcactgtttttaaacatatttctaaccttttccatgaaaaacggctgaaaagaaaatgtgcaattctcacggatcttgattcggcctatgtaaaagtagctgatgatatttttgatgcggattttgtcgaatctctggtagatgccgaagatgatgggttacgaagaaaagaagagttagataaatatattgaaggtaatgagtttattacggttcattacgcagaaaatactttcgaaactgagcttgttcgctacgatgaaaacaataacttgtttttagaggttatgaaaacagagtataaaaaagaagcgtattttaaaaaggctgaatcagatgtaaattcatctgatctcagagttcgatataaaagagtattaaagtttgcaaagaaaatagggaagggatggttggctactgaaatggtagagcatcttagtgttgataatcgtgttcctgattatattttacaggccattcaatttgttcttcgagatagaaatgtcgagcctatatatcaaaaaatgcttgattacaatatgtctttaatgggggttaaagaatttgactgtataaatgccgaaaaggatttttctagtaaaatgatagaatataagaaacatttcaatgacagttttgtaagactgttggagttatag

SEQ ID NO: 71789 - DNA, 1722 bp, Citrobacter koseri ATCC BAA-895
atggatgccgttaaattcaacgggaatttattgttaacggcatgtccagggtctggtaaaacaaagacattggtttctaaactttgttttattttagaaaataaagaactattttgtataggtaaaaaaaagataattgctcttacatatacaaatatagcagccgatacaattcttgaacgaattatgtcattcggcataagtagtgaatcgttatggattggaacaatacacagtttttgtttgaattggattataaaacctaatgtagataagataccaagactttgccgaggatttagtgtaattgatgagcatgaaaaggaatttctcataaatgaattaaaagaaaagcatggcttatctgcaaatgataaagtttttactaatttagattttaacctttgtcagctttattcccgtgggaccaaagaatatttggttgtaaaagaatatcataatcatttgtatgagcaaaaattaatcgattttgatttgatattaaatctgtcttgtcgggtgttgacaaaatacaatgcactttgtgaaagattgtctttacttttaaggtgtattttagtcgatgagtatcaagatacatcccttatacaatatgagatactcagacaaattgtattaaagaaaaatacaatgattacttttattggagataaagagcaagctatatacactggtttgggggctgtcgttaagaatagagatgaattaattgattgtttccaacttgataatctaaccgagatgaaattaacagggtgttttcgtagtagccaatctattgttgatttttatagtaaatacaaagacgaagattatgatattaattcactttcagataataaggatttcaactcagtaatttttaaagaaagcgaggtagatgttactcaacttcctatttatatatcaggtattattagaactcatttagctcagggagtgctttcaaatgaaattgctattctgtgtccaggctggtttgatgtgataaaactgtcaaatgatattgttactcttaatccggatatagaagttgatggagtcatgatctctcctatacctaaaaacaatgaaaacctctggcttgctttggttaaactctttttaattaagagggttccatctaattttaatacaagacagaaactattgcgagatttccttcaggaattaaatgttgccgcaccgtatacagagtctttgtctcctaaaaaaatattgaagataataaataaaatatcattatccgtagattacaattgtgaaattgatgtttggttgagagagattataacgagcttttgccattctattaacttgagtataagtatcgatagctactattatcaagaaatggatcttttgattaatgccacattgaaaagaatgttgaagtataaaatggcttataaagcaaatgaattacatttatttttcaattttagaagcggtgttaaaatcacaacttgtcattcaacaaaaggagatgagtatgaagtagtcatttgcactgggttactaaatggaaaaatacctaattggaatgatattataaattgtagctcagagcatcaaaattatgttgcccgtagacttttatatgttgtttcttcgcgtgcaaagaaacatttatacatgatatcagagagaggttacaaaacaaaaaggggatatccatatcagacaacaccacagctatga

SEQ ID NO: 71790 - DNA, 1803 bp, Delftia acidovorans SPH-1
atgcagattgcaaaagtcaaggtcgaaaagtttcgtgggattgaatccggcatcgtgacgctgtcaggccacagcgtatttctcggtgacaacaacgtcgggaagtcaacgctgctggaggccatagatctcgtcctcggcccggaacggctctcccgaagacccgtcatcgacgagcacgacttccacgccgggcgctacctggatgaagagggagatccggttctcattcggattgaagttatcgtcagtgacctgtccgccgagcagcagcgacactttcgtgaccacatcgagtggtggtccgccacggaaaagacgctactcgtaggcccgcccccggaaggcacggatgcgtcagacgtgtcggccgcgctgcgggtgtttttcgagggtcgctacgacaaggaagaagacgacttcacgggcaatactttcttcgcgaccccagtgctagctgaaggtactcacccaactttcaaaacgaccgacaagcgcaagtgcggcttcctgtacctccggacgctgaggacaggggcgcgggcattgagcctggagcgcgggtcgttgcttgatgtcatcctcaggcttcaagacaagcgcgtgacgatgtgggaagacctgctgaacgagttgcgcaaactccccgtggccgataagccggaactcggcatcgccccgctcttgaaggacgtccaggacgctgttcgccgattcgttccttctgactgggcagaggaacctcacatgcgcgtgtcggatctcactagagaggccctgcgcaaggatttgaccgttttcatgggcaccggcgcgaagcgtccggacggcagcacctattgcgcgccatatcaccatcagggcaccggcacgatcaatacactggtgctggcgctgctatccatcatcgcgggcctgaagcagaacgtcatcttcgcgatggaggagcccgagatcgcccttccgccacatacccagaagcgcatcgttaacagcgtgcgcgagacgtcggcacaggcgcttttcacgtcgcactcgccctatgtgctcgaagaattcgcgccgtccgagatgcatgtgctgcggcgtgacgggggcaagctttctgcgatgctggcgacatacccaccagcggtcaagcccaaggcatacaaggcagagttcagggcccgcttctgtgaagcgctgcttgcccgatatgtacttgttgtcgaaggtcgaacggagttcgatgcgatacctgcagcggcgcgccggcttaacgacttgaaccccacagaatacaagacgcttgaggccctgggggtggccgtcatcgatgcgcaaaccgatgcgcaggttgcgcctctcggcaagttctttagagacttgggcaagacggtctttgctgtgttcgacaagcaggaaccagccgcttccgctgccatcaaggccgccgtgcaccactcatttgaatctgccgagaaaggtttcgagaacgtagtgctgcaccacaccgcggaggcagcccttcgtcgatatgcgctcagcctcgtcgcggagaacgcgtggccgaaccatctgatcgccaaaactcctaacgccgcccagaccgtggagcaaattcgcgacgcattgcggcaattctttggctgggccaagggaagcggcgatgccggcgacttgctcgggtgctgcaccgaggcggagatgccgcagtatgtccgggacacgctgcgggtgatccacatcaccgtcgaacctccgccgctgccacccgtgccgtcagcggcggcagcaccgttcgatgacgaagagttatga

SEQ ID NO: 71791 - DNA, 1653 bp, Delftia acidovorans SPH-1
atgggtggtccaggctccggaaagacgcatgtcgccctggtcaaagccagggacgagattcgatcagcaaagctcctatcaggccagcgcatcctgtttctcagcttcgcgaggcccacagtggcacgggtccttgagaaagccaaggaactcatcaccgcggatgatctgagacttctagatgtcaacacctatcacggcttcgcatggagcgttctgcgaagtcatggctatctgctcagcaacggaaagccgctccagctcctaccacctcccgagggctccgcgcgcttggctcactttgccaaggagcagcatcaccaggagaagttgcgccttttccatgaagaggggctgctccacttcgacctcttcgcccagttgacggctgaactgctgcgccgcagccggcggctggcaggtatctacacagcgacctacccgatactcgtcgtggacgagttccaggacacgaacgccgacgaatgggcgatggtccgcgagcttggacgcggctgcaggatcattgccttggccgaccccgaccagcgtatttacgaattccgcggcgccgatcctcagcggctcaaggaattcgtggaccagttcgaccccttgccagtcgagtttgaaggggagaatcatcgcagtgccggaaccgacatcgcaacgtacggttcagacttgctcaccgggaaaaacaagggcgccgtctatgccaatgtgtcggtggtcgagtacggcgtgtactacggaaggggtccgcatttccatgcgaaggcccagctcatccaggcaatcaagcgacttcgcaaggagccggcctggtccatcgcagtgctcgtcccatccaaggccttcatgcttcaagtgtccgactacctctccgcggagtccgatggcatgcccaaccttcgccacgaggtggcgatggacgcggaatccccggcgcttgcggcaaacgtcatcgccacgctaatggaaggaggcccttcggagcttctggctgcgcggctactctccgccttacatacccacatccggggccgcagtggcaccaaacgccctgcgcaggcggaactcgacatggccgacgccatcgaccaatacttggtctccggaaagatccgcggcaagaatcgccaagcgttgatcagcgagtgcgcgcgcctagcagcgcttcgccaggacgtcgtattcaccggccatcctgaagaagactggttgactgcgcgggggcttctcgcgacgtctgccgttggccaactgtcgcgcgttgccgctgatgccaagtatctccgcctgcttcacaagggctcaaacctgcgggcgtctttgtcagagctttggagatcccaaggacagtatgtcggcgctatcgaagctgtccggggcgctttgctgcaggagcatttcacagcagccgccaaggaatggcgtggagttcatctcatgaccattcacaaagcaaagggtaaggagtttgacgaggtactgatttacgaagggcgatatgctggacgaattgtgcctgcgaatgcagatacttctcgtcaaagccaagcccttttggcactgcgggtcgcagtcacaagagctatgaagagagcaacaatcctgacgccatcgggagaccgcagcatttttttgtaa

SEQ ID NO: 71792 - DNA, 1710 bp, Shewanella baltica OS195; identical to SEQ ID NO: 71778

SEQ ID NO: 71793 - DNA, 1455 bp, Shewanella baltica OS195
atgattgaagtccaaatagccggagcaggtgctggtaagactcacggcctagctgagaagatcatcaagcactatgatgcttcgtcatataagaagatctttgccatcacttataccaataatgctgcgaagaacatttccgaagctatcatcaagcaatttggatacttgccagaaaatatcatagtttgcactgttcatacgttcctattgaatgagatcatttacccttactctccgtttgttctaaatgaaatacacaccacctcctctcgatgcaaaacattctcaaactttccgcctggcaagtctgaggaaaaaaaacgacgagaatcagcgggcacaattagcaggctaaagaagattggcgtgatacatgtcgatgagacatatgctgcggcatggagaattgtcgatgaaaactactccaaacatagcagccagaaaaagaagtctaaagttaggaaagttcacaagttactaagtagcgcgattgataagatttttctcgacgaagctcaggatcttgatgaaacagctcttaaggcttttcaacaaatcggcgagaattcggttgacatttacatggtgggtgaccccaagcaagcaatagattatccaacatctttcacagagtggttagctgcgaataaagccaacgaaaaagttaaagtacttccgaatataactacttctcgtagggttccacagagaattcttgacctctcaaacaccttttgccccaaaggccaagagcaaactagcttgtctgaagttgaaggacgcctaacatacatcacttctgaagatgatcattacgacgacgttctctgtcatcacattgagaatagaagtttagtgagcatcttcagaaaagaaggtaattactcaaccaaacaagcagggtcactacccgagtttgatcctgaggtagaagagctacttacagtaaagtttcccgaatacgaagaaggcgtggtcatatattcattacagcgtttctttgcctccctgttatccaagaatgacaacaacaaatctatacgtaaatttcttgccaagctggaaattccgtatgacaaagagctgttcataaaactttgccgctcagccgagcaatttagttcatctaaggacaattcggccaagtatgcaataagcagcatccaacgaactaagggcttagagtctaaggtttgtgtcttaatcttaacgccagcgatattcaaatgcttaatgcagaatggtgtaaccaagttcaacaagacttggaatatggtctacgtcgcattaacgagagctgagtcagagcttgttgtagcagtagacatggctttgcttggcagagggtataagcatgatgatattgttgagagccttgaatctattgggtttgaagtgctaaacccgaatctaccaaaccacaaaaccgaagaaaaattagaggaagcgtaa

SEQ ID NO: 71794 - DNA, 1920 bp, Shewanella baltica OS195
atgaagcttagctgcgtacgcttatccaacttccaaagttttggacctacttcaactgaactaaatctcgaaaatttaacctttcttattggctctaacggttcggggaaaacagcagcattgcaagctctctgcagaatgtttgctcttgacccttcagtacgtcgaattaaaaaatctgatttccatgtaccatacgacgaaatcgaaattccggacgaacgaaacctttggattgaagcagattttcaattttccgaacttaatgatgaagcagggaatacaactgtagcccctcactttggtcacatgaggcttgatgatggtgacggaattccgcgagttcgctttaggttagaagcatcaattggggttgatggtgacatcgaggagtcttttgtttatgtacacgatctagataagcatggacatccactctctacagcaaaagttagacgaggtgaacgcaatctaattcagcttcattatctaccagcacgtcgtgatccagctgagcatatcaccttcgctacaaatgctattttaggacggcttctaagagccgtaaattgggaaggagagagggaagctataaaagagcacacagagcaaataagccaagatctcgctgcaaatacttccgtaaatgctcttagtaatagcataaaaagttcatgggcaagcttacacaaaggtgagttttttaaggagccaaaaataacttttgttgccagtgaaattgaatcacttctgcgtcatctttccatttcattcacccctggacatgatgaaactctggtagacttttcgcgcttgagtgacggacagaagtcgatgttatatttatctctcgttttatcatctcaagtcattggccgcgcggccttgaatggtgataactcctttgacccagataagttacgccccccagttttcacgattgttgcggttgaagaacctgaaaatagcttatcaccacatttcctcggtagaattgtaagtgctttgaaagaaatgaattccaatggagatgctcaggcattgattgctacccatgcaccttcaatgctaagaagaatcgagccaaagcaaattcgatatcttcgactaaatacaagtagacacactactatttcaaacatcagtcttcctgattccgagacttcaggagacgcacataaatttgttacgcaagcagtaaaagcatttcctgaaatttatttttctcgacttgttgtgctgggtgaaggtgatagtgaagaaattgttcttcctagattaatggaagccaaaggagtacctgttgacgaatttgctataacggtaacgcctttaggtggccgacatgttaatcacttctggcgtttacttgaaggtttaaacatcccttacgttactttattagaccttgacatgagtcggtttaatggagggtggggacgagtgaaaacttgtaatgaacagttaaaactacacaatccagcacaacaattaaccggcgacttcgtaaatattccagcgtgggatagtgaacaatataaaatcaaaaactatctgatatatcttttggaattagaaaagcgcggcatttttttctcttatccaatggatcttgacttagcgatgctgaaagcctttcctaatgcattcaaggtacaggcaataaaccagatagaacctgaagaaagcacgattaaagctgtacttggtaaatcccgtacagatgcttctgagtatgaggaagatgaaaggaagttattcgtcacatatcacaagctattcaagcttggcagcaaaccagcagtgcatattgatgcactgtccaacatttccaatacacagcttcttgcctcaataccgccgtcattaggccgattagcagacgccgttatcgctaaactagcggagttaccagagtga

SEQ ID NO: 71795 - DNA, 1671 bp, Shewanella baltica OS195
gtgattagacacgataactggaaacctgcggatgggctaactcttgaaccaaatgctgaacgagcagtaaaagaatgcgaaaaaaatttagccctaacagcaggtcctggtgctggtaaaacagaaatgcttgctcagcgagctgacttcttactccgaacaggcacttgccgctatccgaagcgaattttggcaatttcatttaaagttgatgccagttcaaacctaaaagatcgggtaactcgcaggagtggagatgaattatcatctcgatttgatagttacacgtttcatgcatttgctaagcgaattattgaccgttttcgccccatactcacaggcatctacacgttagattcagaatataccattggaagtcctagaacgcctcagaagcaaatagaatttgcagatttggttccattagcaactcgtatcctccaaagttctgctgtagctagaaatgccataagacaaacatatactgatgtgttcttggatgaatttcaggattgtacagatattcagtatgagtttctaaaaatagctttccaaagcacaacaattcgattaacagctgttggagatacgaagcaaataattatggggtgggcaggtgcgcttgatgggatttttgtcacttatgctcaagattttcaagcattaccattaaacatgtatcgtaacttccgctcaaagccacagcttcttcggttacaaaacgaaatcatccggacactagatcctgcctcggtgatgccgaatgaactcattgttggcaatgaaggagaaatacgagcatttcaatttgaaacaagccaacgtgaagctgaatatctagccgaacaaattcaaaattggataatcgtagataatatccctccaaacgagattgctatactcatacgaaatcaaccacatttatatgcccaacatctaatacctgcgctgcgaaatagacaaataccttttagaaacgagcaagaattacaggatataactgtggaacctgctgcccgcctcattgtcgatttccttctttgtacttttggtaaacgtgaacccgcagcttggttaaggctaatgaaccaattgatcccatttaccgatgacgaagaagagcaggataaatatcagcaaatctggcttaacttcattcaacgccagcggaaaagaattagggaaaacccaataacaatagataaccaaagtcgttggcaaagtgttcaaagttttattgaacttgtcggtattgaaacaatgacagcactttcacatgactacgaaacagcctctcgtctaaatgaagttctaagggcaacatttaataagttagatgaaaccttggcttcaggcctgacactacttgaagcactttgccagtttacagatgatcaatcagtaagaatattgacctcacacaaaagtaaagggctagagtttgatactgtagtacttttaggcatcgaaaatgaatgttactttggggcccctcaagagaacctatgtaccttttttgttggagtttccagagctaaatgtaagctattgttaacatttgcaaaagagcgaatacggccagaaggcttttctggtcggtggagtgaacaaagaacacttgttaatgagtatgctggttatgtcaggccatttttatctaacaataactaa

SEQ ID NO: 71796 - DNA, 2010 bp, Anoxybacillus flavithermus WK1
ttgactgtaaggaggaaaaatatagtgcgttcaccttatatctcaagagttaaaataaaaaattttagaaattttagagatattgatatctctctaagtcataagcaagttattatcggtgagaataatgtaggaaaaacaaattttttacgcgcgattcaactcattttagatccaacactttcagatgaagatcgttatctaacagagtctgatttttttgatggtcttgaaaacccaatggaaaatggtgaagacattgaaattattatagaaattcgcgggtatgagcataacaaaaatatattgtctgttttatcagatgctaccatctccgacgatcccccaacactaagattgacttatcgttattatcctattgaaaaagaagatggcaccaaagactacgaatacattatttttcaaggaatcaaccccgataatttatttaaacatagccatcgaaaatacctaaatatgagggtaatcaatgcgattcgagatgtggaaagcgaattaagaaattcacggcgatcaccgattaatcaattacttaaacaatatgaaattgataaaacggagctaaaagagattgcagagaaacttaaacaaagaagtgatgaagtcctaacactggatgaaataaaagatttaacccaaaaaattaatgaacgatttaaaaaagtaatcggtgttcaaccagattctctggtttctctggaaacaatcgatattgatccaaatcgtattttaaatacgcttaaactaatgatgggggataaaaaaagacctacaagcgaaacaagcctaggtttaaataatttattgtatattgcattaatccttttattattagaggataggacgatacctacatttttaaagaaagaaaaatttgaggagttattgcaaaagtcaggaagcaacatccttacttcttcctacgaaaaaaatgataatgacaattattttttaaaaggagatttgtctaaaaacgagttaaagcaactttattcttttatggatatgcataacccaataaacgaaggtttcacaatattagctattgaagaaccagaagcacaccttcatcctactttacaaagaattatctatcgggatgtcatggttggaaactcttcagttcttatgacaactcactcaccgcatatcacttcagtagcaccaattaattctatagtgcatatgcgctggactaataacggtacacaagtacatactacttctaacctatcgcttactccgacagaaaaaagggatcttgaaagatatttagacgttaaacgcggtgaaatctattttggtaaaggcgttattttagttgaaggtatagccgaagaatatctaataccaaggtttgccgaattattagataagcctttagatcaaaaaggaattgttgtttgtaacattaacagtacgaactttgcgccctatgtaaagtttttggatgcgttaggtattccttatgttgttatcactgatggagattactatatccttgaagaagatggaaaaactaagatttttcatgtcttatatgaccaaagtcatgagaactatgggtttttagggcatgagattattagtacattacttacagatctgcaaaaagttaaacgaagccaaatccctactgacttccaaaagcaggaagatttgtttaataaacatggtttctttgttggctattacacattggaagtagacattatggtacaaagcgcagaaaacgaggaagctaaagagctaatttatcaagtatttagtgaattaacaataggtggagaaaaacaaaaaagtaattttaagaatgaattaaacgcagaaaaatattttgattgtttaagaaaaatcgaaagcagtaaaaacggaattggaaaaggacgattttctcaaagattctccaacatgtgcataaaggatcatattccagtttatattgagaatgcaatcaatcaaatttataaaaaagtggatgaggtttaa

SEQ ID NO: 71797 - DNA, 1812 bp, Anoxybacillus flavithermus WK1
atggatttatataatgaaaaacttaatcaaattaaaagtgataaagaacaatacgaagcatatctgtctgaagatagtaccgttgttattgcaggacctgggagtgggaagacaactgtattaactttaaaaattttgaggttgttaaaagaatatatacgccctccacgaggattggcttgtgttacttttagtaaagctgccgcaaaagaaataaaagatcgtttgaatgcctttggctaccagcaaagggataatgtttttctaggaactgttcactcgttttgtatatcggaaattatatccccctttgctcatttatacaattatgatatcccattgcctttaagaatcgtttctgagaaaaagagaaaatctctctttaaacaaataatttctgactttgaattggaacaccttgggttgagtattgaagaaatggataaagaaagaactcttaacattgaggggattagtgaggttgaagtacctacgtatgatcttgcattaagggtagccattgagtatgaaaaacgacttcatacgaatggattggtagattttgtggacattgtaaaatatgctaccacccttatacaaaatcaagaatacgttagaaaatgtttagaggcaaaatttccttgggtactaatcgatgaataccaagatcttgggaaaccacttcatgaaatggtactttcactcttttataaaaccaatattaaaatctttgcagtcggtgaccctgatcaatctattcatggttataatggagcaatacccgactatttaattgaattgtatcacaacccgtctataacacaaattcaattaaaaactaattacagaagtaatcaggacattattgatgcatctgaattagcacttcaagataaacggggctataaagctggagcaagattaggagaaaacgcagagtttcattttattacttgcgaagaggaaatgtttgatcaatacgttaaagttgctaaagaaattattccatcctgcagggaagctggaatccccttagaagaaatagcaattatggttggttccaataaacatgcaaaagagcttggacgtattttagatgaatcaggtgtcccattttatatcacgaaatttgatttccaaaggtctgacgttgttctttggcttgagagatgtgctatatggtgtgtggacaagtccaaacaatctttcaatgaattagttgggttttggattaatcttcataaaatacatgaccgtccattattatcaaaggaacaaattttgtttagacgaagattgtttgataccttaacatcaagtattaagcacatcgatgacttaggtaagtggttaacatttgtggtcaacgaacttgaactatcatcattattaactgactcacctgtttatccagatgagctagaaaatctaaataaattaatgaaattaacaattgaaggggaatttcgagattacgatttgtccaagttcggaaaacttggtaaacccggaaatcaagttaccatcaccacaaggcatgggtcaaaaggattagagtttgaggtggttattttgttgggaatggaagaagatcattttccatcttattggaataagcaagatgaaaagagattaagtgaagagcatagagttttctttgtatgtgtcagccgagctaaacgcgtatgctatcttttaagatcgcaaaagtatacaaaaaaaaccaaatacggattaaaaaaatttgattacgcaccatcccgtttttgggaactgttatacgctagatacggtgaaaaaacccatgtataa

SEQ ID NO: 71798 - DNA, 1725 bp, Pseudomonas putida GB-1
atgctaatcaccagagtggttttaaaaggctttcgaaacttcgcggatgcgactgtcggccttgaacgcaacacattgatcattggcgcgaataatgttggaaagaccaatctagtttatgcgttgaggttgctcttagacaaaagcctttctgatgcagaaattgagccgatggaatctgacttccatatttcaagtgctggaaaaatatcggatcatctgtctattacgatctatttctctgaagtctcagaggacgccgtgctcgcaagtctgaaaggaaacattacagatgattcgtgctttgtgcttcagtacacagccgacaggcgcagcctgacataccagattaaaatcggcgctacaaaaccttcgcttgtagaaatcccatcaagatattatttgaagcacataaatctcaggtacgtaaaatctcgaagagaccttgagaaatacatcaatagtgaaaaaaggcaactcctaaaactatccttagaaaatcgtagcgatgatgagtctaagtcggatcatcggcagatggctagaattggaaaagcgctagaggccatcaacggtagaattcgtaacctacactatgtaaaaggtgcgaccgactctgtaaatgaggagttacagaagcttgctcacgattttagtgagtacgaagtgaagctcgactcgggcgcaatccaagtacagcagtttattgatagccttcgccttggcgcttcaacgtctggtgcgtccgttatgcttggaggcgatggtcgaaacaatcagattctgatggctttatggaaggccaaaagccagcgtgaacatgacccagacagtgaagttgtattttattgtgtcgaggaacctgaagcgcacttgcatccccaccagcaacgaaagcttgccgattacttaatcaatgacctccctggccagacatttattactagccactcccctcagatcacggctcgctataccccttcttcgatagtccacctgaaagtcacgggaggaaggaccaaagcagcgagcaatggttgcagtaactgcatcagcaaagcatgggatcacttaggttacagaatgagcattcttcccgccgaagccttctttgcaaaatgcgttttattggtagaaggcccatctgaaattttattttatagtgagcttgcaaagaaattatcgatagatttggacttttacaacatttcaattttatcagtagacggcatacagttcagtgtatatgtaaaaatcttggacgccatggaaataccgtgggtaatgagaacagacaatgacgtctctgacatcacagtaaagaaagttttacagcgtcacgttgcgggaattaatcgttgcagggccgcagcagcattaactgccgagccgcattatccagtcggcacgactacccaatctctgctggccgatggtacttgggatagaatctcgatggaaacaaatccaaaaggcgcctatctttcacgtattgatcttgagcatgacttgacggaagagttggagtctgaggtaattgcctatgcttgcaaaaagctgaagaagcggactttagacgcaccaagtgctatcaagtacttgcagggcaaaaaagcaatccgcatgagggagttactgacgcagatatcaaatagccttcctgtaatcacaggcggccatctcgcgaagccgctactccatgctaaattgctagctgagacctaa

SEQ ID NO: 71799 - DNA, 1638 bp, Pseudomonas putida GB-1
atgcctactaaaatcacctacagtgacgcacaagaaaaagcgattgactgtctaggcagcatggttatcacagcatgccctggcagtgggaagactactgtaatggtggaaaaaatccgccgcgagtttgatagtctcaaaccacatcaaggcgtcattggaatttccttcaccatcaaatccagcatggaacttggcgagaagtgcaaacgaaacggagccaatataagatcaagcttcttcgggacaatcgataacttttgtctggcagagatagtatttccattcatagctagaatctatggcttctccgccaagcaaatctcttgcgtacaatacaaccaactagaggacaattacaaagcagatcttcctgacctttcgaaaaccaatataaatctccagacgagcgactacgacctatatgagtcggaattcaaagaacactatcaaaaagggttcattcttcttgaagcagccacgatcattgcctgcaaaatcatagaaaaatcggaagcatgcaggcgctatatcaaggcaagatatcgttctgtctatatagatgaatatcaagacacttcagagcctcagcacacgcttttctgtgccctttactcattgggtttgaaagctgtagctgtaggcgacacgcaacagtctatatttgcgttccgaggcagtgaccctacctatctgttggcactcacggcagacgcatcaaacttcgaacaccacgtcatcaacattaaccatcgcagccacccctccattatcaactatgctaaccgcttgttcgcccctcagtgccagcttctccctgtagaggagaatgacgttcaggtatatcacaggcgcttcaatggtacacaggaagatgtggctagcacacttaatgaatggatagaaaaggcggcacgagttctcaagattgaggatttaagcgaagtggcaattttggtgagatggaataattcaatcgagcgcctgcaaagaaatcttacacttcctgccagattttataaagatgatccattatcacagaccgtcagtccactgggacgctttttctccgcactactctacttctattttgacaaacgcaagctagtagaaaaaatcctagaagattttccgctccttaggaccacccctgctaagctgcgggccttaaggaagtcgatacatgacctccgtaatttgcagccagccagcctcccacctgcctttctggagatcgcgcactcatttcgtttcccaaccgacaatcaggctgaactcggtgctcttgaaaaaaccatatcgtcgccagaagaaatcttgcactatgaaagcgcgcgtcccggtgaaatccagataatgactctacataaatctaaaggactagagttcgatctcgtagtgcatttggacctttatgattgggtatttcctactcgcaaatatactggaaactttgacgaaaaagtttttccagattgggaccaagacttgaaccttcactttgtaggaattacaagagcaaggaaatggtgtgtcttggtcacgagtacccaaaggataaactctgaaaacaatacaaaaaacggcaacgcctctcagttcatgacaatgcccggaatcactggactttataggtaa

SEQ ID NO: 71800 - DNA, 2076 bp, Caulobacter sp. K31
atgcgaatcaagcacgtggagatcgaaaattttcggctcctgcgaaaggttgcgataggactcgaagagcggaccacgctcatcgttggtcgcaacaacagcggcaagacatcgatcgccgagctcttccgccggctcctgtccgaacggaccctagcgttcaaactggaggatttttccctcggttgtcatgagtgcttttggacggcattcgaagctttccgggcaggcgcagattcctccgatgtccgcagccacctcccgtcgattacgatcgcgctcgacatcgcctacgatgttgatgcgccggacctggggccgctgagcgactgcatcattgatctcaatcccgactgtacggaggcgaggctggtgctcacctttggcccgcgaacgacggcagccgagactttgttcgccggcatcgttgcgcctggggaagacgtagctgccgaccgtatcgcgctgtttcgggctctcggcagccggttgccggcggcttatgcgtcgtcgcttgaggcagtcgatccgaatgatccgaccaatcgaaagaccctggagccgaagacgctcaccgccctgatccacggggggttcatcaacgcccagcgtggactggatgacgacacccatcgcgaacgcgatgtgctcggcaaggtcgttgaagtgctctttcagtcggcgttgaccgatccgcttgacccggaaaagcgaacgacggccgagcaattgaaggcggccgtggaacagattcagggagatttacatgtcggcttcaatgcgaagctcacttccttgctgccaacgttcgatctgttcggctatccaggcttggctgaccccgggctcgttaccgaaacgagcttcgatgtcgacaagctcctgaacgaccataccaaggtccgctatgtcggcgtaaacggcgtcactttgcccgagacctacaatgggctcggcgtacgcaacctagtctacatgctgcttcagctgctccgtttcttccgtgagtatcaagcaagtccagcggcggcgggcgtgcatttggtctttatcgaggagcctgaggcccatttgcatccgcagatgcaagaggttttcattcggcagctggaccagatcacgagcgccttcgtcgcgcagcttaacgagaaccgtccgtggcccgtgcagttcgtcgtgaccacgcactctcctcacatggcgaatgaagcgcgatttgagtccatgcggtatttcctgtctgtggcggacggcaacggtttacgtcggtcggtcatcaaggatctgcggcagggaatgggcaatgctccggcccctgaccgtgaattcctgcaccaatatctaaccctgactcgatgtgacctattcttcgctgacaaagccgtgctcatcgaaggcacttcggagcggctactgctcccagcaatgatccggaagactgatgctgcagcggctggggaagcgcagctcgggagccaatatctgacagtaatggaggtcggtggcgcctacgcgcatcggtttttcgatcttctggccttccttgagctgcgcgcgctgatcatcaccgacatcgacactgtgaagcccaatgacaaagggaagcacgtggcggccctcgtcgccgacggtcagttcaccagcaacggctgcatcaaggcctggttcgaaattgcagtgtcgccggctgcattgttggcgaagacgtcaccggacaagacggttggcagtcgtcggcttgcctatcaaattccggagacggacggcgggccgtccgcgcgtagctttgaggatgcgttcattcttgcaaatcccgaacgcttcgcactcggggatggtgatgcggccgcactcgcctatgagcacgcggccgagcagaaaaagtcgacattcgcattggaacacgcgatcgaacacacggactggaatgtgccccgctacatttcggaaggcctgcggtggctggcccagggcaaccctgctccgttggagcctccgctggcggtcgcggtcgagattgttgcgggcgtggccggtgtcgcggtgaacgtcgccgaggttgccggaaatggctga

SEQ ID NO: 71801 - DNA, 1767 bp, Caulobacter sp. K31
atggctgatggtgccgaaagtcccgccgatgccgccggtcgcgtcgcgctcgaacgaatgttcgcgtgcctcgacgaaggtggaagctttcgtctggaagcgggcgctggagcaggcaaaacctattcgcttgataaggcgcttcgccgtctgatcgatcggcgtgggacggacctacttcgccagcgccagcaggttggctgcatcacgtacactaacgttgccaaagacgagataatctcgcgcgtcgaagcccatccggcggtgcggccagagacggtccatggcttttgctggtcgatcctccaggattttcagtcgacactgcgtgcgctcgtgcctgagttgcccggttgggcggagaggctggagcccgttggcggcattggtgctcggcgggtgcattatgagcttggctatcccagtgtcggggagcagcaggtcacgatccggcatgaggatgtgctggcgttgatgattcaggccatggcgctgcccaagtttcgcgcggtgttgaccgcacgctatccggtgctgctgatcgacgaataccaggacactgacgcagcgtttgtcgatgcgcttaaggcctggtttctcgatcatggcgaaggcccattgatcgggctgttcggcgaccattggcagaagatctatggcgatgggtgcggctcggttgagcacgccgcgcttgcggtgatcgacaagaacgccaacttccgatcggcggacccgatcgtgcagatgctaaaccgtatgcgccccgatctgccgcagatggtgagcgaccctgacgcgcctggcgaagcgcgcgtcttccacaccaatgcctggccgggcgtgaggcgtactggacagggcggcggccattggaccggcgacaccagtgccgatgcggccagagcatatttcagccacatcaaggtacggcttgccggcgaaggctgggatttcgcgatcgggaagaccaaaatactgatgctcagccacagcgtgctggctcgcgaacagggttacgcgagcatcccgtcgatctacggtcagttcaacgacccgtggttgaagaaagatgatcctcatatcaagttcctgaccgaccagctggaaccggcatgtgccgcattcgaagcgcagcgttacggcaatatgttcgagtgcttcggcacgggcatgccgcgcattcggaagcacctggacaaggtcgcgtgggctgagacgatgacggcgctgattgcgctgaggcacaccggatcaatcggcgacgtgatcgatttcattgccgggcagccgcatatgcggctgcccgatgcggtcgaggagcgtgagaagaagctggcggacgcgggccctgaccctgccgtgggagagtcgcggcgtatcactcagttgcgaaaactgcggcaggtcgcgtacgtggaactcatagcgctcgacagattcatcgatggccatacgccgttcgcaacgaagcatggggtgaagggtgccgagttcgaaaatgtgctcgtgatcgtcggcaggggctggaacaagtataattttggccagatgctcgaatggatcgacgctggtccgccggccgacaagctggagtttttcgagaataaccggaatctcttctacgttgcctgctcgcggcccaaggtgcgcctggcactgctcttcactcagatcctgacagcaaacgctatggccaaactgacggcctggtttggcgcggcaaacgtcgtggcactgcccggccagctcgaagaggtgatggcttga

SEQ ID NO: 71802 - DNA, 2253 bp, Cellvibrio japonicus Ueda107
atgtatctagaatcactgaccattaaaaactttcgcaaattcaaggataaaaacaatgccgtccattttgtgggctcaaaggaaattgcagtaaaaaaagatcaagaaaagcaatctctagttgccccatctagcacgctaataattggtaaaaataatacaggaaaaaccacaattgcaagagcgctaaatctaataatcaataagctaaagccaaaagcatatgattttaacatagactatctacgcgagctgcttaccctatacgaaacaacattagcagaaaatgaaagtattgaagagcttgaaactccttccatagaattcaagctacagataaaagtaaacattaaaaaaacgacaaagccagacgatccaaaagatgaggacgatagcgatatagtaaacaatctttatcaattcattcccataagttccagcacacctgatctgattgagatcatagttaaagctcatatgagagaagattcggcttttagaaacgaagtatcagacgttataagagcagattattctaagattgataaaaataagattgctataaaaaaaatggaacttttatgtagatttctaaatagtgatcagaacctatataaaacttcatacttcacatctgcaggagttgaagtagccgatccagcgttatccgagcttatccaagttaaggaaattaaagcaaatcggcatctgagtgaaaaagtactttctgacgtatatcaaaaaataatttcttcacaatatgcggctaatgaagaagacaaaaaccgcttaatccaaagtataaaaaatataaacgatgagattgatggatctgttggtgaaaaaagtgattccatatccgaaatattaaaagaaattgaagactcacaccacgttggtgtatcgttgactggaaacgtttccgaaagctctattttaaaaaatctcataaaatacagtttcagggacggagatgatttcattccggaagatcagtttggcttagggtatgtgaaccttctcaatatcataggggagataattcattacattgatggatatgaagacaacagccatcaaaatcgcgtaaaccttctatttattgaagaaccagaagcatttatgcaccctcaaatgcaggaattttttatcactagaattgataatgcagtacaaagaatattggaattagccacagggaagaaaaaaacaaactcaaaatccctccattgccaaattgtaataacaacccattcttcacacatcgtaaatagcaagattcatagctgcaactcctttgacaacataaattatttaacatcgataaataaattttctcaagtaataaagctagatgatgcaatcgtctgcggcaaacaaaatcccgatatagatgatgacttaaagtttattaaaaagcatataaagtacaaagtttccgaattattctttgcagatgcaattatatttgtagaaggcgttacagaagaaactctatcgcatttctatctagaaaaaaataagactcttagaaattattatgtttcgatatttaatataaacggagcgcatggtgaactatattacccgctaataaaagcgctacagataccgtgtttggttgtcactgacttggatattaagcgagaggcttgtgagaaaaatgaaactaatccagaccacaaaaaagaggccgagtgtaattactgtggaaaggtggcaggcgttgatgatcacaaagaatttaaacaaatcacgtctttacagaaacgcattaccacgaatagtacaattgccaagtttaataaagtggcactaaatgaagatacaaataatacaaaactggacgctatcaattatttcgcctctgacaacttgtatgtggttttccaaaaagacccaattcaaggccaatatgctacaagctttgaagaagcactcatattaagtaattttgacaatgacgttctgaacagcgttttagaaagttgtaaaccagctatttataaatcgatagtatccccaaaaggagataaaaacacttcaaatttaattagtagatcttttgagtttcaaagaaaacttaaaaatagtaagagtgagtttgccaataatctcctatacaaaataatcatagatgaagaaaattcaccaaaactacccacttatatccaagatggaattgattggttagctaatcgtcttactcctagaggggatgtaatggaggaaaataataatgttgcaaactga

SEQ ID NO: 71803 - DNA, 2118 bp, Cellvibrio japonicus Ueda107
atgttgcaaactgaaatagatgaactggaagttcaaaaaaatattaattcatgtatcgattcatttaaaagttttagatttaatgcgggagctggagcaggaaaaacctatgctctgattcaaaccattaggtacattttaagaaataagctgatagaccttcggagaaaaaatcagcaagttatttgcattacgtatacaaatgtcgcagttagggaaattaaagaacgcttaggcagttccgaagtggttttgatatcaacgatacatgacagactctggagtattattaagccataccaaaaagaacttattgaaatccatgatcagaagctcagaaaggaaattgaacttatttcaaatgagttatcagataaagacaacccaaagttagcaaaatatgcaagcctttctgagcaagaaaggatcgatttacacagttttctatttaagcatcgagagaactattttcttaatagagataaatccgccgctgaatttagaaaatcatatgaaagtattccgaacaagccaatgtgcttcaatgatttgattaaaagtgcaggaaatttcaaagaagtagcgaaacgcatatataggaaaagcaggtatgatcaatgcattcaagacatagaaaacaacaaaaaaactaaagttgactacgatagtgcattcaacgcagatcgacttgagtacatgaagtttagccacgacaccctattggaatatagccaaacactttttgataaatacccaatgctatgccgcttggtaattgataaatatccttacttctttgttgacgaatatcaagattcaaatgaaaaggtaattaatataatcaagcagttattcactgcttctgtggaaattaagaagagctggcttgtaggatatttcggagatactgcacaaaatatatatgatgatggtgtaggtagaaaaataaccaaaatgcactcacaagtattggaaatcaataagatttacaatagacggtcgcataaaaaaataattgatatcgcaaacatgataagaaacgatgaaatacgtcaaaagccaatatttgacgaacgaaatgatggaactgtcgaattctattattgtgccacatccataaatcaggaagaaatagctctatcttttttaaataagtataggtctgatttgttgtcagatgaaaagaccttaaagaagcaaatcgattgtttagtccttactaataagttaatggcaacactcagtggatttggtgacatacagagtaacgtaagtaatgcaaaatctatttattggaatgaaataaacacaaagttactttctcatgatctcgaaaagctccaccctacaattcatctactttacaaagtaataaagctacaaatttcactaaccgaaaagaattcaacatataaagatatttttggaacaataaaaggaggtatatccttctcaagagctttacaaatttcagaagccttgaaaaatattaaagcgaatactttaaatgattttatttttgaactttcaaagatattaaccaattccacttttgatgccacagcattggaaaatatccttcagaacctttccgtaaaacttaaagattttaaagaggaacaggatttctattcgtatttaaaatctgaaatttccgtgctaatgctaggatctgaaaatacgtccctcgatgatgccgatccagaagaaacaaaatcacttctaaatatcacacttgatcaatggcatcgatgggtaaattttattgatagaaatgaaaaagataaagagataatttaccatacttatcacggaaccaagggagaggagtatgaaaacgtagcaattataatggaacacagctttggaggtggccatgaaggaagagacaaattcaaaaattactttcttaaattagaagaaattaagagggtaatggaaagcgaagggaaagcagtgaaaactgacgatgaatttgaaaatacaaaaaacctcatttatgtagcgtacacaagagcaataaaaaatctaaaaattttatacattgatgacatacaagaaattcaaggtggcattaaagcagcttttggtattgatgcgctcatccttgatgtatga

SEQ ID NO: 71804 - DNA, 2322 bp, Shewanella woodyi ATCC 51908
atgtatttagagagtctaaccataaaaaattacagaaaatttcgtgatacagacaatacggtatgcttcgttaagcctgaagttgtcgatatgagtgttgaagaagatcagccagagtcatcagtgattgctccttcaacaaccttaatcataggtaagaataacgctggtaaaactacagtcgtcaatgcattaaagatgctatgcaataatgaacaaccctcagcatcagactttaacctctcctacttaaatgagttgttcaatcagtacaaacaagattttgaagcggatcaacttacaaaatttaaatctttagcaacacctaatttagagttcggcttgagggttaaagtggacttcaatgatgaagatttgatgactcaccttgcaccttttatcccaattagtgaagaaggtaatgggaaaccagttagcgtgtacatcgtggttaaagtggcgcttgcagaagaatctgcatttaaagaggaagctagcaaaatctttaaagctactggttcagaggggcaagagctagagagcaaccaaaggtttgaaaaattttacgcactgctttcaaaagaaagtagcgttattcaaacagagggtaatctttatcaaatcgtgtttatggatcttctaggtgatgcaacagagaaattttccctaaaaaaactgataaatattaaagaaattaaagctaaccgtcatcttaaagaaggtgtactaagcgatgtctttaacaaaatcgttgcctttcagttcgctaatgacgttagctctcgttctagtttagaagcaagcatagagtcaataaataaaaagatatctgacaatgtaggtgctaaaagtactgatatatctcaagtcttggggaaggtagaaagtacaaacaaggttaatctgaatctatctggtaacgttacttacgaagccatcatgaaagggctgatcaaatataacttcatggatgacgctgactttattccagaagaccaatttggcttaggctatatcaacctgctaaacattattggtgaaattatccattttgttgatagctatgaagagaacagtcatctaagccgcattaatctactctttattgaagaaccagaggcgtttatgcaccctcagatgcaagagttcttcattaagcgtattgataatgcagtaaaaaaagcagtggagatcgcaaatgcgtcttcacaagatccaaaaacactacagtgtcagatagcaattacgactcactcttctcatatcgtcaatagtaagattcacagcagtaataccttcaatagcattaactatttaacctcaataaacaaatgtactaaagccataaacctcacagatgaggccgtagtttctagtgatgatagtgatgcgaataaaaagctcaatttcattaaaaagcacataaagtacaaagtctcagaattgttcttttctgatgctgttatctttgttgagggtatcacagaagaaaccttgttaaattactatttggaaaatcaccaaagccttagcgaatactatatctcagtttttaacattaatggtgctcacggtaaattgtatcttccgctggcgaaaaagcttagtgtccctagcttgattgttaccgatttggatatcaagcgtgaaaagtgtgagaagggtgaaaagcataaaaaagatgaatcgtgtgaggcatgtggccagcaacctaaagatggtgaagccaccccttacgttgcaggaacacctcctcgctatcttcaaatcaagagccttgttagccgcataactactaatacaactcttattgattttaatcgtacattaaaaggtaagtctaaagaagttgcaaataagattagtaatatagagttctttgaggatgataatctttatgtcgtattccaaaaagatcttattaaggggcaacacgcgactagcttagaagaagcgttaattttaactaactaccaaaataaaattattaacgatgtgattaaaagctgtaaacctaagatatatgaggggattttaaatggcggtggaaaaaaatcactaaggaactttattaatcactcgtataagctacagaaaaaactttcagacagtaagagcacgttctctaatgaactaatatttagcctactttcagcagaaaaaggagaggttttgccacaattaccaaactacctagaagatggcttaaattggcttgtgactaaactgaaaaccaatgacatgccttcattaagtagagttgaaacggcggttgatgtggaagttgaaagtacgggggttacatctgatgacgtccaatga

SEQ ID NO: 71805 - DNA, 2124 bp, Shewanella woodyi ATCC 51908
atgacgtccaatgagatagctgaactcgatattcagaaaagcatccataaacacatcgatgattttaatagctttcgtttcaacgctggtgcgggtgcaggtaaaacctatgcactgatagaaacgctaaaatacgtcactatcaataaaatagcagccaccaaaagcccacaaaaagtggcttgtatcacctataccaatgttgcggtgaatgagataaagagccgactaggtaactcagatgcggtaaaagtttcaacaattcatgaaaggatatggaagataatcaaaagggctcagcctcagcttttgatatgtcataaggagaaaatagaagaggttatagagaaaaataaacaagacctgttaggctcccccaaagcccaattctttaatgacctcgaacagccagaacaacaagagtttttggagtttgctatacagactaaagatctgttctatcaatctaaaaaactaaacgcagctcctttcagacacgcttataatactgagattaataaaccagaatttctagataattgcttaagaaatgtaaggaacttcaaatttgtcgttggtctattatacaaaaagcaaaggcttaaagtttgcttagaaagaatcgatactggagagataaagcgtgttgaatatgacagcaaggtaaattctgacaggcttcactacatgaagttcagccatgataccctactagagtatgggttaaagctagttgaaacttaccctaccctttgccgcattattattgatagctacccttatttctttattgatgaatatcaggatacacatagcaacgtagttaaatttgtcaaaactattcatgactacgcaatagaaaacaataaagactgggtggtaggctattttggtgatactgcgcagagcatttatgatgatggggttggtcgaaagattgaaggtcttcatgatggcttggttaatgtcgataagatatttaatagacgttcacaccagcaaattattgatgtcgccaataacattcgtgctgatcaaatagttcaagtacctatctttgaggaacgaaatactggttcagtacgcttttactacaataattcagaggacaaacttactacagctcaacaattcctagttgagtataaaaatgaacttgtcacacacaatggagaatcaggagatatatctcctgaagatactaaaattcattgcttagtattaacaaacaaactaatggcaaactttaatgggtttggtgatgtttatgaagtgtttcaaaaatcagctatctattatgacaatctaaatacccaagtgttatctcaacaattagaaaagctacatccaacggttttagccatttttcaccttattaagctttaccaagatatactacaaggaaaggtttcgtactatgatgtttttggaacgtcgagtagaaatatggcattttccaaggcaagcttgattatccgtgaattaggaaatacagaagttgcatcattaaaaaattgggtcgacttaattattgatcgacttgataatagtaatgctaaagaagttctaggtaaggtactgattaatagggttaatcattttgagggcgatgtaatttctgctgatgtatttcgctcatcattgttagacagcattaatattctaatgaatgaggattcggaggatgaagataaggccaaagaaaaaaatgatagcattttagagttgccaatcacatccttaatgaactgggcaaactttatttatggtatcgaagccgatgatattagctaccatacctatcatggcactaagggtgaagagtacaagaatgtcgccatcatcctagagcatagttttggtaagataaataaagataaatttaaaaattactttaatgtaatacaacaaaatgaggaagaaaaaaagcgcttactttctgaccgcgaagtggaagaaaaacatattaatacccaaaatttactctatgttgcctcttcgcgagcgataaaaaatcttagagtactgtatttggatgatatctcggagatcaaggaaggcattgagactatttttggcgagagtaaaccttggccaatagaagataatcatattcctgagtaa

SEQ ID NO: 71806 - DNA, 1752 bp, Klebsiella pneumoniae 342
atgtatttaggtagcctaaaaatttcgcggtttcgatcttgtgatgatgtgaccgttagcctccgcccagatttaactgtattggttggtgaaaataatggtggaaaatctaatgtcgtagacgcaatcagattgcttactttgccgttgagcggacgccgcgaacgatatccagaggatgaggatgtacgacgctattcgacagtcccaagttttcaaatcgaaggggctttccagggtctaagcgatactctcaaaggtctattgatatctgcagttcccgatcctaccaagagcgaggctacctacggctatcgatatgaatcgcgttctgaacatgctccccgtggtaagactaccgtgtgggctggacgtttcgacactaatggaccagagcttggttcttctgagttgatcagacacgtttatctccctcctttaagggacgcacatcaggtgctgggtactagcagcggcactagagtgatggcattgctgcgtaatttcttgccaaaagagcgggagcaggatttcctcgctggtgtcaggcgtgcggataatcggcctgagatcttaactacaatcaatacggatatcagtgctgctctcggactactcactaatggagtacgtccgcagatagcggcattggattttggcagcgaaaccttactcgatgtagctcgtgatttgagatttcgtatggccgatactggtttgatacccgaagatattcggtcttctggtctggggtactcaaatttactctacatggccactgtggttgtagagctgactaaggccaaagaggcagacctcactattttccttgttgaagaacctgaagcgcatttgcatccgcaattacaggtacttgtgcttgagttcctcttggatcaagcgcgccaatcagcatcacgtatcgtagagccaggaaagcctgaaggccgcatccaaattgttgtgacaacccattcccccaacctgaccgcatgggtttctccacgtcacctagtggtcatgcgttcgcggcatcgtgaacaagatggaatagccatctcagaatcagtgagtgtgcccattgccgaaatagggctaaagccaaagacattagataaaattagtcgatatcttgacgtgactcgttccgctttgctgtttggtaacagagctatcttggtggaagggatcgcggaagcactattgttgcctgtgttagcacaaaagcttgtgctagctgatgatttagatgggtggcttaggttcaagggggctgtaattgtgccgatcgaaggtgtggacttccgtccatatgtagaggtactgctacggccatatggtgatgcacgtattgctgataggctgatagtgatcactgatgcggacccaaccgtgttgggaaataggaaagttgatctggaaaatctggctgcaacgcatggagcttcagatgctttgatcgttctaaccaatcagcacacattggagcacgaaatttttggcgctggaaacgaaagtttcctgaaaagtgtgtttcttcgtttgcatcgtaattcacgtagagactgggaagcgcagatagagggcattccagaacaagatcgtcccaatgcatttcttaaattaattgaggcgaaaaaaactcgcaaaggcgatttggcgcaagctatggcttcgcgcattgaggcgggtgaaccatttgttgttccgccttatcttattgatgcaattcgtggagcttcaggtatatga

SEQ ID NO: 71807 - DNA, 1776 bp, Klebsiella pneumoniae 342
atgactggcatccacaatctaaccccagagcaagagagttttgcttctcacgttggcggagccttcgttaatgcttgtcctggagccggaaaaacgcgcactatcattgctcggctagcgaggatcgccgctacgttgccttctcgtcagggcatagcgatactttcatttacaaactccgctgtagacgagttccgcgaacgatgcctggctgctgggctcgatactcttttaaagtatcctagtttcatgggaacacttgatgctttcgtcaggcatttcgttgtactgccaagttgtgcgatatcgagtcaaacacggccaattatcctagatagttgggatacgcttggtgtagaaattcgtttatcaggtcaatttgcctttcgaggtcaaccggtaagtctagatttgtttgatccagaaaccaacgttattgatcctgataggattcgacatgcaggtttgcaaaatcatgtacgtcaacatcagaatcgatatcaacaagtagcagcaaatcggcgacgatctttgctacaagctggctatatgagtgcaggggatgcacgtgctcaaacattgcggttgattagagataatgtaattggtgagtcacttgctcgcgcattggtggcacgttttcaagaagttatggttgatgaagggcaagattgcaatccactcgatctgcaaatactgacatggctcagagcacatggggtaaatgttacgttcgtttgtgatcctgaccaagcaatctacgaatttcgtaatggtaatcctcaaggaatacaggtatttaaggatacatatcctattgcggcgcaaaaggggttgacggggaattttcgtagtagcccagcaatttgccagctagcagccactctaaggcgagaaggtcagattgatcggtcgcttggtgaaagtgctgatgttgactatccagttttacttcttacttacggtggccgcggcccaacggcaattattggtcaggcattccttagaaggattagagaactggggctggagtcaaccaaggcgattattttggctcactcaggcaaagttgcgttgcaggcagctggcttcacttccagcatttcaaccggaaactcgcgaattgagttgctggctcgtaaagtgtcagagttctggtcacctgccgcaaccccaagaacgaaggagaatgtaatccagtcagtcgaaatattattgctggatttaatgggggtgcgtcaacgaaatgagcatctggttaaagtcatcgaacgtcttggattggaccggcgtgcccatcggagatgcgccctaagttttctcattaaccttccaaaaacgtgtagagactccgatgaagagcggcttgcctggatagcctgtgttcatgcggaaattgagaagctgcatctgccactccctgctggcgtaagcttacgtcgtttcttccaacagcctcctgatgcgcaatggtcaaagcatcttcaggtgcccgctgctctcagtttcgcatgtggcaacatacatgaagtgaaaggtcgtgagtacgatgcagtatgcgtcgtagtcccgccgaatcgagcccctgaaaacagaattgaagcactcttcgagtcatggcaagcgcgagtagatgcagaggcaaagcgcgtactctacgttggcctcacccgtgctcgtaattttgttgctcttgcgataccaaacgcctttgcagggcgttgtgttgatttgctggccacaggccaagtgccctacacaagagtggatttgtga

SEQ ID NO: 71808 - DNA, 2070 bp, Streptococcus pneumoniae G54
atgaagttaacaaaagtaattattaataattttagatcattcggtgaaagtcaaattattgaattaaacaatcaaactgtactgattgggaataatagttcgggaaaaacaactgtattacaagcattgagtaagctgttttcggacaaacaaaatgatagaataataaaaaaaagtgattttcaccttccaaaaggttcaaggcccggagaaaatactagaaacctctttatagaaactatttttgagtttgatgaacttgatggaactccctatagtcaagcaattccatcgtttttcgaacactttacagtttctaaagatggtgccaaaccatttctacgaatcaggttagaatcttcttgggaagatgatggaacagttgaaggaagtattgatactcaattctattatatttcatctgatgaagatactattagagatgaagacaaacatcgtgctcctagaaaggatttggataaaattagggtactttatgtacctgcttcaagaacgcctgagaaggagttgggtaatgcttcaggtagtatgttaagtaggttggtaaatagtataaattggaccgaagatgagataaatgaaattacagataaaattgatgagttgaataacacctttttatctgaaaatggagcattgactcagatcaacaatgagattcagaagtcatgggaattatatcatgaagataaccgtttttctcaagcagagttgattattaattcttctgagatggcggcagcacttagacagattgccttaaaattttcaccaacaaccactgaagaagcatttacagtttcagatctaggagatggactgagatctattttttatttttcacttgttgattcgatacttgatattgagttagaaattaccaaagaccgtgaagaaaatcctgataatccaagatttaagttgattccaccagtactaactatcctagcaatagaagaaccagaaaatcatattgctccacatcacattggaaaactgataaaaaggtttaagcaattaggcaataatgacaactcccaagtaattttaacgtcacattctccagctattgtaaaaagaattgacccagaagatttgaagtatttaagaatagaaaataatgacagagttcttcaaaccattgtttctgatatacagctacctccagctatagatgaatcttataaatatattaaaggagcaattcaagcttatcctgaactatattttgcgaagttagtagttctaggtgaaggcgacagtgaggaactgctattaccaaagttttttgatttacttgggaaagaggtagatagctctcagatttcaattgtccctttagggggcagacatgtcaactatttttggaaattattgaatgctctcagaattcctcatattaccttgttggattttgataatgagagatacggaggtggttggggaagaataaaatacatttctcaacatctgtatgagctgaacacagagtttcaagaatggttccatactcagagacttgattttaatgaaattgggtcacgaggttgtgaatcgataggagctcaacgtctgattaattggtttaataaactcgaagaatttaatgtctacttttcatcgcctttagatattgatttcttgatgctacaacattataaagacaattatctgaatactttatccccaatagaaggaccagttgtttcatataatgattcggatggaagtagtaaaaaagtgaaattgagtgatttagactgtcttgatagattgcagttagaaggtttcaacaaacgtaaagaggaagcaataagagctactttaaaagataagagtggacatggcgatagtttcaatgaagaagaaaaagaattaatgatttggtatcaatatttctttttaggtagaggaaaaccaacaactcatatgcaatttttatcatctattagtgatgatgaattaacaagaaatctaccccctgtatttgaaaaaatagttaacagtgctgaagaattacttggagatattcaacatggtaaagagtga

SEQ ID NO: 71809 - DNA, 1818 bp, Streptococcus pneumoniae G54
atggtaaagagtgaggagtggtttcctaaaggagatatcattttagaagagactgcattaggagccgtcaaagatgtgactaactgtttagtcattgctggaccaggtgctgggaaaactgaattactagctcaaaagttagactatctattctctacaaataaatgcgtttctccgaaaaaaattctagcattaagtttcaaaacggatgctgcatcaaatttgaaagaaagagttaagaaacgttatggtgatgaatatgcttctcgttttacctcattaacctattcggcttttgaaaagagaattttagaccaatttagagatgttctacctgaggatatacggccatcaagagattatttgattgaagattggtatactataaaagaactactctctatgaatggaattaatgttaatggatggagaatgtcagatataagaagatatgtcgaaaacatcatacttaacaatggggataatcacaagtttaaaactgacttactaaaaggaacacaagataataagccggtcctcttgtataggcaaataacaaagttgagtactcaaataatagatactaacgaatacatccgtaaagcacttcaaatgacatacgattttgtatttctagatgaatttcaggatactacatatgcccagtatgatttattaaaaacttgttttttaggttcgtcttgtaaattaacagcagttggagatgataagcaagccattatgagatgggcaggtgcaaagcctgatatttttccagactatattcgagactttaatccaaatgaatatcaattgttgatgaatcaccgctctgtacctaagcttgtagaatttcaaaaagaggttcatcagatattaaatagtaatcacagttctattcagacaaataattatccagaatttcaagagggtgaaataacattatttgaatttgaaaatgaaagtttagaagctaagttaattgcaaatgatatagaatcaaaaattcaaggaggtatacgaccatcagaaatttgtatcctagcaaaacaaaaggttggtatttatagtttcgaattgatatctatattaaatagcaaagggattaaagcaagaattgaaaatgaatatcaggatattttaaaagatcctacgtgtaacctattattagatttaatatcatgcagtcaaggaaaacgagatcctttaatttgggaaaatattagtaatttttatggaaatatcaatggaatagatgagttaactgatgaattaattttagcaaaatcctataaggagattgacaatatagttagtgatattacttacctaatttcaaattttattcccaatgaagaaagtatgctaaaattaattgattgtattattgaaaaaatagatgaaaaaagaattatttccaatttttcaacatacaatggaaaaagtgacctagatatcattgtcaagaacttttcaaagttattatacatagaatattctcaaacacaaggtgaatggctagatacagtctctagtttcaagggtgaaaactcaattccaattatgactatccataagagtaaaggattagaatatgaggtagtctattttctaggcttggaggattctgcattctggagttttaataatcagccggaagaagataaaagtgcattctttgtcgcactttcaagagcaaaaagtcacttaatattcacatattgtaaattgagaaataatagtccgcaaaataatagaaatattaatgagatatattcattgctgactcaatccaatttagttgatgttattaattaa

SEQ ID NO: 71810 - DNA, 1797 bp, Methylobacterium populi BJ001
ttgaagatattctcggtagtgatcgaaaattttcgcggcatccagtcggccaaactggtgctgcctgatcacgccgtactgatcggcgacaacaataccggcaaatcgtcggtattcgaagcgatcgatctcgccttggggccggaccggctgagccggcgaccacccgtggatgagcatgatttctatcaggggcgctatcttcctagcccaaaccccgatgctcccgacggcgcggagcccggccccgcgccgaaaatcacggtcgaggtgacgatcaccaatctgtcaccggagcaggaggcacgatttggagccaacgtcgagtggctgaatactactaccggagacttctatcaggaggccgacccggccggggtcgatgctgccgagatcaaggcggcgctgcgcgtcacattcatcggcgaatacgatccagatgaggatgacttcgtcggcaacagctatttcacgcgcagtctctcagaggatgagacacctgcatcgttctcgaagaaggacaagcagcactgcggatttcttttcctgcggtcgttgaggacaggatctcgggcgctcagcttggaacatggcagcctgctggacatcatcctccggctgaaggaaatccggccgcagatgtgggaagggacgatcggaacgcttgcagcctacgatgtcgcgagcgacccggccattggcatctcgggcgtgctcgagagcatcgacaagtcgctgaagaaatacgtcccgcgcgaatggggagtgaagccgcaccttaaggtgtcgaacctgacacgcgagcatttgcgcaaggtcatcaccgcgttcatcgccacaggcgcgggcgatcatgccgctcccttctttcggcagggaacggggacgatcaacatgctggtgctcgcgatgctgtcacagatcgccgaggacaagcagaatgtcatttttgcgatggaggaagccgaaacggctattccgccatacgcgcagaagcggatcgtccatgagctgcgtaagctgtcggcgcagtcgctcttcacgtcgcactcgccgtatgtgctcgaagagtttagcctccacgaaacggttattctggcgcgctcggatgacggccaactgagccaatccaaaatcgagttaccggagagcatcaaacacaagcgctaccggcaggatttccgaacccggttttgcgaggggctcctttcgcgccgtgtcctcatcgctgaaggtgcgacagaggcggcctctttcccggtcgtcgcgcggcgtttggcggagcttaaccctgccacctatgcgtctttggaagccttgggcgtgtgcgtaatcgacgccggaagcgagactcagatcgccgaccttggggctttatataagagccttgggaagcggacctttgcattgtgcgacaagcagacagatgccgccaaggctgccattgaggcccaggtggaacgcctgttcatgcacgaagagaagggcattgaggatctgatcctcaacaacaccacgcaggctgcattggagcgatttgccgatcaactcgattggccgcagcatctcctgaaccagtatccgaatccaaaagcacaagcggctgccgcgcttggagcttatttcaaatggtcaaaaggtaattggggaatagccgagttcttggcccagtgctccgaagtcgaaatccctcagtggctgcgcgatgcctgcaccaccttgaaggcagcgtgtgacccgccacctcaaccggccgaggccgatggcgaagatctttttgctgacatcttgggatag

SEQ ID NO: 71811 - DNA, 1827 bp, Methylobacterium populi BJ001
gtggtcgacctaaccgaaacgcagaaggcaattctccaggccgtggggcatcagctcgtcaccggcggtcccggttcggggaaaaccaccgtttccatcctcaaggcggcgaagatcgcgcgcgaggagttgaagcccggtcagcgtattcttttcctcagcttcgcgcgggccaccgtttcccgcgtccttgaggcgatcgacgaagaaagcgcgatcacgcgggaggagaggcgacggatcgaggtcgatacctaccattcgttcttctggcgcatcctcaaaacgcatggctatctcgtcggcttcccacggcggatgacgatcctcacacctccgaatgaggcgattgcattgtcggcggttcgaagcggctacaaagcggcgaggaatctgtcggacgaggaaaaggccgagaagcgcgcgaaggaggtggcggagcgtgtccggctggcgaccgaagaagggaaggtctgcttcgacctgttcgcagaccgcgtggcaaccctgcttcacggctcagataaggttcgagcgctcatctctacgatgtatccgtacattatcctggatgagtttcaggacaccagcgccgatcaatggcgggtggtccaagccctcggcgccaacagcacgttgatcgctcttgccgacccggagcagcgcatcttcgatttcatcggcgccgatccggaaaggctgaaccacttcacggcagccttcgcgccgacggttcacgatctcgccggtgacaaccatcggagtaaggggactgagattgctctattcggcaacgacatccttacggggaaatttcgccagaacgactacaaggggatcgattgcgcgctgttcgagtcgaatcccaaccaagcttatgcctcattggtcggtcaggtgctgcaagcccggaagcggttgatcgaaactggccggagcgattggtcattggcgattctcgtgccgaccaagaaaatgacccggatggtgtcggatattctgcgcgagccattcggcaatgtcccgcccatttcccacatggcagccgtcgatatggaaggcccgatcttggctgcggagatcatcgctttcctgctccaacagcgcgggcatgacggatgtttcgacgaatttgtcgagttgatgtgcagctatttccacggtcgaggtggcgcaacgccgaccaagggagacatggacgaggctgcgcggttccggaaggcgctgtccaagtggaacgaatgtctagcgaaaggacgaccgacgcctggtaacagcgtcttgcagggaacctatgccgtgcatcgggcaattgctgcgctgacgttcacgggcgatccgggcgcggattgggtcgcggtgcgcggcgtgctggatgctggggcctgtgagcgactgaaggatgtcgcaaaggaggtccggaacgtgcgtctgcttgagcgcggtacacagctccgtcaggggttggcccaggactggcgtgacgtcagcggctatagcaacgcccttgcgatcacccgccagtcgtttgttcaggagcatttcgcaacagcccacaagcctgaatccggcatcgtggtgatgaacatgcacaaggcgaagggaaagcaattcgacgaggttgtgatctttgaaggatggccaaaacggttcaagggcgaaatcgtggccaatcctgatcggatcgtctccggcaatgtccacgatggggcgatgacgcaggcgcgtcagaattttcgggtcagcgtcacgcgcgcaagggcgcgcacgacgatcatgacaccaagggatgacgtctgtgttttgctcaggcctggaccggcataa

SEQ ID NO: 71812 - DNA, 1761 bp, Natranaerobius thermophilus JW/NM-WN-LF
gtgatcaaaattagagttgcaaagattaaaattaataattttagaggtataaaatttagtgagttaatatttcctgagcatacagtttttgtaggcgataacaattcaggtaaatctacaattttagaagcacttgatttaactttaggaccagaaagattgttccgaaccccagtaattgacgaacatgatttttacgcaggagaatatctagataatgataataatcccataaatatagaaattgaagtagtaattataaatcttaacgaagagcaatcacgttactttagaaataatatagagtggtgggaccaagatgaacaagcacttataaacgaacctccacccgaaaaaactgataaagaatctgtacaacctgcattaagagttagatttgaaggaaattatgattcagaagaagatgatttttttggccgtacttattatgcctcacctgaagttgaagatggaagcatgacatccttcacaaaaaaagataagcgatactgtggttttttgtttttaagaactttaaggacaggctcaagagcattaagtttagaaaacggttcgcttcttgacatcattttacgtttacaagaattaaagctacctatttgggaagaaattttaaaacagcttgatcaactaaaaatagccgctcctgattctgaaatcaatcaaattctaagggaaattgaaagctctattcactcctttgtccccaatgaatgggctaataatcctcaaatgaaagtttcaggtttaactcggcaaaacttaaagaaaataatcactttttttatgggtactggagctacaagatcagatggatctgaacattcagccccttttaaatatcaagggacaggtactattaataccatggttctaactttattatcaatgattgcggaactaaaacaacagcaaaatgttatttttgctatggaagaaccagaaatagccataccccctcatacacagaaacgtataatccatagcatctgttccaaatctgatcaagcaattttcacttcacattctccatatgtcttagaagaattcgatccaagccaaatattagttcttagtaaatctgatgggattattactgggaaagaagctacctatccaccaagagtgaaacctaaactatatcgtgatgagtttagaagaaggttttgtgaatctttgctatctcgccgagttctaattgttgaaggtaaaacagaatacgatgctctgcctacagttgcaagaaggttacaacaattatcaccagacgagtttaaaacttttgaggagttaggtatttcagtgataaatgctaaaggtgactcctacattgctcaactagctgaacactttaaaaacctgaataagcaagtatttgctatatgtgataaacaatctgatgaaaatagacaagctatttctgagaatgtcgatttaccacttgtgtcagaagaagatgggttcgagaatattgtcttaaaacactctgacgaagatgcattaaaaagatatgcttttatgatagttgaagaagagtggccaccacaccttaacaatttaaagccaaatgaagcgatgacttctgaagaaatacaaaagtccttatttgaatatttcaagtgggcaaaaggttcaggtagtattgcggattttcttggaacatgtagcaaagatgaaattcctaactatataattagcgttttaaataagatacgagagtttgttgaaggtgaaagttag

SEQ ID NO: 71813 - DNA, 1728 bp, Natranaerobius thermophilus JW/NM-WN-LF
gtggaattctcaaagcaacaacaagaattcttgaaagctgaaggaaactgtttagttctaggtggacctggttcaggaaaaaccacaacttcattaataaaagcaaagaatttaatcaaaaatgaacacttaaaaaatgaacaaaaaattttgtttttaagctttgctagagctacaatagctagggtagaggaacaggcaggtttatatgaatcagatcttattaataaaagtatcgaagtaaatacttatcacggatttgcatggaatattttaaggagtcacggttacttactcaattcaataagccctcttaaaattctacctcctcaagaagcttgttcaaggttttctaccataagagatggaaaaaggcgtaggaaagaaaaaataaaactttttaaagaagaaggcgtagtggattttgatttatttgctgaactgtgttatgaattgctaagcagaagtgataagctattaaatgttatatctagttcatacccatacattattctcgatgaatttcaagatacaagttatgacgaatggagattaattaacattttagggaaaagaagtacattggttgcacttgccgatccagatcaaagaatatatgaatttagaggggctgaccctgcaagaattagcgattatattaaggaatttgagccttttcagtttgactttgctagtataaataatagaagtaatggtaccgatctaattcagtttgggaatgatttactatctggagcaaataaaagcaaaaattatagaaacgtaaaaataataaaatatgattttaaaaagggtaaagggagacattcaaaactaaagtatcaaacacttaaagttagagataaattaagaaaacataaaaaaaattggtcgttagccattttggtaccgacaaacaacttaatggctgatgtatcaaactaccttggtagttggcaatcttttaaaagtggcaacaaacttccaggactcaaacaccatgttgctgtcagtaaagaaggtacactacttgcagcagaattaatattaggaataatcgaaaatatatctctccaatctgttaatgaagacgatataatttcagatcttgtaaaatacttccgtggaagaaaaggggacaaatcccccactcaagatgaacttaaattagtaagtgcacttgaaaattatttagaatcagaaaaaataagaggaaaaaaccgtaaaatacttattgcggatattagcagaataataaaagatagcaaaaatattgaacttacaggggatcctataagtgactggcattttgttactgagatattaaagcaatcagaatcaaaagtatttaaagatctaataattgatgcttctaatttaaaacttttatacaggacatcaaagatgctttcaaaattagtagagttatggcgagaaaaaaatagttatgttggtgctagaagagtattccaagattttatactacaagaacattttattgcttcatcaaatgaaattaacgggatacatttaatgactatacataaatctaaaggaaaagaatttgatgaggtgatcatctatgaggggttctaccaagaaaggctagttagacatagaaacaatgttgataaagcaaggttaaatttgcgtgtcgcttgtactcgtgcacgtagaaacacatatatattcactcctacaaaagatccttgcattttaattgagtag

SEQ ID NO: 71814 - DNA, 2289 bp, Burkholderia phytofirmans PsJN
atgcatctgcagaagcttggcatcaggaattttcgtaggttgcgcgacgttgtcatcgatctcgcaccggatatctccatattcgttggcgccaacaatagcggaaagacctctgccggccatgcccttcagctctttaccgggaagggcagattcactctccatgatttcagtgccgagctgtggccgcaatttgtggctttcggagagggtgtggccggcgcaacacttccaacgatgtcgatcgatatctggctacatatcgacgggactgatattcacagggtgattgacctcctgcctagcctggcttggcagggagcgctcgtgggtatgcgtatcgcatacgtgccaatcgatccggaggcgacgaaggcaaggtacacggagatgcggaggcgagcgctggctgctgttgcacgtgaagacggccaagcggctgctttcgatccggcacccaggaatatgcacgattttcttcgcgaggatctgaacaaagaatacgagcttcgctactatgtgctcgatccggcgcgttttgcggctgacatgaccgccgacgcggactatgtgccggttgctctgatgccaagcgagagtcgcagcggacgggagatactgaattcgttgatccgggtcgacttcctgcatgcacagcgtcacttgtccgacagtccaggcggcgcgcgagccgaggatctgtctcgcgtcctaagccgcttttacgagcgtaatcttgagcaaaaggaggacgacctggatgtgctcagggcgctcgccaattcggaggcaatgctcaatgaccacctcgaacgggtctttgagccaaccctgagaagcctcgcaacacttggctacccaggtcttagtaacccccgcttgatgatacggtctgcgctggatccggccgccattatgagcgaccgaggcgcgcgcgttcactacgcgcttggtgatgccgaagagcaaggcatcgatccgccgacgttgcccgatcactataacggcttggggttcaagaatctcattttcatggttgtggagttgctagacctgcatgctcaatggcttgctattaccgatggccgcccactgctccatctggtttttatcgaggaacctgaagcgcatctgcatgcacagcttcaacaggctttcatcaggaaagttctcgatattcttcaactccagggcgaggatcagcggcattgcagtagtcaggtcgtggtcacgacacactcctcgcacattttgtacgaacgagggttccgcccgattagatattttcggcgaagtcaaactggtaatcgatcggagatactaagtttgtcgtcattttatgaccggacgccggagggagaacgaaacttcctcgaacgctatctcaagcttacgcattgcgacctgttctttgctgacgccgcggtacttgttgaaggcaacgtcgaacgactgctgcttccgcagatgatcgagatcgccgcgccaaaactccggtcgacatatttaagcattctcgaggtcggtggcgcattcgggcacagattcaagccgttgatagaattccttgggctcacagcgttaattgtcaccgacctcgatagcgtcgtcggtccgccagtccctgatgtcgtggccggcgatcctattgaagccgcgttaccggtggttgctgatgaggtagacaatgaggcacggccgccggaggaaaatgatgcggacgacgaagacgaagacgaggagggagctggaagaagagcaggaaaggcttgcctaccagagctcgcaggcgccgtcacatccaatcagatgctgatccaatggttgcccaggcgtcggaccatcgcggaccttttcgcggtaacgccggaggagaagattcagccgagaggaggcgaaggaacggcattggttcgcgtcgcctatcaataccgcacagcggttacctggcgtgaggaaacccttcaactggccgggcggacgctggaagaggccttcgcgcttgagaatcttccgtggtgccaggcgaatgaacagcgggatctgggtctacgaataccgggcgctgcagggaaggatttgagtacgctcgtcgaacgtgttcataagcgcgtcaagggcagtagcttcaaaaaaaccgacttcgcactgggtttgttgggccaccaaccggacgcgtggcgggtgcccacatacatcgctgaaggacttgtttggctggaaggcgagatcacccctcaggagcaacctgaggagccgggagggttgcacgtagaggaagcgcgatga

SEQ ID NO: 71815 - DNA, 1887 bp, Burkholderia phytofirmans PsJN
atgaccagtcgcatcgggtctcccgacacgccggcagacatcgaggtccgcgaatgtctcgatgaacagcctgctcgatccttcgtcatggtggccggtgccgggtcgggcaagacgacctcgctagtcaaggcgctgcaacacctcgctgtgtcgcgtggtgcgatgcttcgtcgggcaggtcagcagatagcctgcatcacatacacggaagtcgccgtggctgaaatttcaggagacgttgggaatgcttcgacgtttcacgtctcgaccatccacagcttcctgtggctactcgtacgcagttttcaggcggatatcaagctctgggtcgtcgatcgcattcgggagaaaatcgcggagaaggcggaacaccgcgacagacgggggacgcgagcgggaacgcgagagcgactgattcgtgagattgccgaactcgaggaggtaaggacaaccgttgcgcgcgtggagcgattcacttatggcacggggagcgactatgccgaaggcgtgctgggacatgatgacattttaaagctcgggccggccctcatcgtcgaacgtcccctactgcgccagatcatcgccggccgtttcccattcattttcgtggacgaaagccaggataccaatccagtcgtagtaagtgcactgcgttgcgtcgcggccgaccagccgcagttgtgtgtgggtttttttggtgatcccatgcagaagatttacaccactggagctggaccaatcgcgcgggagcgtgagtggcgtgaaatcacaaaaccggagaatttccggtgtccgacatcggtgctccgcgtcgtgaacgcaatccgggcgacgggcgacggtcttgaacagacgagaggccgggcgctcgaggtcgatggtgtgctgcaaccagtgaccggatccgcgcagatgtttgtgctaccagcggacggaaatcgcacagcgggtctgcaggccgtgcggttgtggctgagaaactcgaccgccgacccgttgtggtcgagcgataacgctgaggcagacgttcgcctgttggtcctggttcatcgaatggcagcctcgcgcctagggttcgcgaacatctacgcggcgctccacgatggagcacctgccagcttgaaggatggcctggatgacggcagcgcttggccgctgcgtccattgctgcagtttgtgttgccactggtcatcgccgtacggtcgggtgaccagttcaaggtcatgagccttttgcggtcggcgtgtcctcagctcgaaacggatcgaatccagcagcaagagattcaaggcgtacttcgtcaactccaggagggagtcgacgcacttgctggtctccttgaggacggggcgcacgcgtcgatactggatgtgttgaggctcattcgcgaccgagagatgttgcggcttgatgagcgattcaatacctacctgatgccagacccgctggataacggcagcagcgaattccaacatattgtcggttttcttgcctgtcacgctattgagttgtgggggtaccggaagtacatcgaagaagagtcgccctttgccacgcaacagggtgtcaagggggctcaatttgagcgggtactggtcgtcctggatgatgaggaaggaccacacagccacttttcctacgggaaatacttcggctttgttccgctatcggaaaacgacgaggagaaaattgcatccggcgctgaatccgtactagaccgcactcgtcggctcttctacgtttgctgttcgcgtgcagtcaaggacctggcggtggtgatgttcgtaccggatgtcgagttagcccgcaatgccgttgagagaacggctattttcccaccagggagggttttcgggctcgaggatctggaggggttggcgtga

SEQ ID NO: 71816 - DNA, 1905 bp, Ralstonia pickettii 12J
atgaagctccaaacgattcggctatccaacttccagtctttcggtgaggcaccaaccgaagtcgtgcttgaagacatcacctacctcatcgggcccaatggatcggggaaaacagccgcgcttcaggccttgtgccggctctttgccttcgatccatcactgcgccggatcctgcgctctgacttttacgtcccattcaatgaggaagccccgccggctgagcgtcagctctgggtagaggctgacttcctgttcccagaactcggcgaagacgaggacaacagcactgttgcgcctcattttggccacatgcgcctcgacgaagttgatggcacgccgcgtgtgcgttttcgcctcaccgccaccatggggctggatggagacatagaggaaagcttggtctatgtgctggacatcaatcctgacggctcgccattgaccaccgcacaggtgctcagatctgagcgcaaccatatccacgtccactatctgcccgcccggcgtgaccccgcggatcacattgcctacggcgccaatgctttgcttgggcgcatgctgcgtgcagtgaactgggatgcagagcggagtgtcatcaagggcctcaccgaccaaatcagcgacagcttggcggccaacccgtcaatcaatgcgttcagcacaagcttgaaaacggcatggggtggtttgcacaagggcagcttctttgccgatccgaagctcacttttgtagcgtctgagatcgaggccttgttaaggcacatgtcggtctctttcacccctggtcacgatgagcagctggttgacttctcacgactgagcgacggccagaaatcgatgctgtatctgtcgctcgtgttgtcttcacaggccatcggtcgagctgtcctggctgcagaagacaagtcattcgacgcagataagttgcgcccacccgtcttcacggtggtagcggtcgaagagccagaaaacagcctgtcgccgcattaccttggacggatcgtcaatgccctcaacgggatgaccggcaacggcgacgcacaagcgctgatcgccacccatgccccgtcgatgctgcggcgcgtcgacccagaacgtatccggtatctgcgtctaacccaagaacgaacatcgcgcgtcacgcatatccagctgccagacaccacagatgaagctcacaagtttgtgcgtgaggccgtgcaggcctttccggaagtctatttctcgcgactcgtggtacttggcgagggagacagtgaagaaatcgtgttgccacgcctcctacaggccaaaggggcaccggttgatgagtcagcagtctcgatagcgcccttgggtggacgtcacgttaatcatttctggcgcctactgtctgccctacagattccctatctgacgctgcttgatctggatgtcgcccgctaccaggccgggtgggggcgaatcaagtacgccaataaccagttggcagcgtacgagccgagtaaggtacttcccgcagaccatggcattcccagttggaatgatgcaactcacaaagtccgagcctatgggcactacaacactctgctcgaagagcgtggtgtgtatttctcgttccctatggacctggatttttcgatgctgctcgcctacccggatgcctacggtgtggagaaggaaaagcctgacgagtcaacgattaaggccgtgctagggaaaagccattacgacgcaagccaatacaacgaggacgaacaaaaactgttcggcacttaccaccgtagcttcaagcttggcagcaagccggccgcgcacattgatgcgctcgccaagctcagcgatgcggacctgctcgcgaacatgcccgaatcacttggacgcttggccgatgccgtcatcgccaagctcgcggagttgccggagtga

SEQ ID NO: 71817 - DNA, 1674 bp, Ralstonia pickettii 12J
gtgatagccgtcgatgcctggcagcccgcagatgggctgacgcttgaacccaacgccctgcttgcggccaaggagcaagtgcgcagccttgcactgacagcaggccctggtgcgggcaagactgaaatgcttgcgcagcgggcagacttcctgctgcgcacaggcacctgttgctatcccaaacgaattctggccatctcgttcaaggtcgatgccagcagcaacctgaaagagcgagtcaagcgacgctgtggttcagaaatggcagcgcggtttgacagctacacgtttcacgcatttgccaaacgcatcatcgaccgctttcgacccgtcctaacagggcaagatgctctggatgtcggctacaagatcgttgagcgaaaagtgaagccgtcccgccaggaaatcgagtttgcagaccttgttcctctggcaatcaagatcctacggaagtcagctatggcgcggaacgctgtccgccaaacctacagcgacgtttttctcgacgaattccaggactgcaccaacctgcagtacgagctgctcaagctcgcctttcaaggtacgagcattcgcctgaccgccgtgggtgacacaaagcagaagatcatgggttgggcaggggccatggacggcatcttccaggctttcgttgccgattttgcggccacaccgctcaacatgtaccgcaactttcgttcgaagccgcgactgctgcgcctgcagaacgagatcgttcgcaggcttgacccctcatctgtcatgcccaatgagcagcttgccggcgacgaaggcgaggtattcgcgtggcgcttcgatgacagtcgccaggaagctgaacatctcgcagagctgatcgatggttggataaagactgagcagctgcctccagcagagattgcagtcctcattcgcaatcagcttgatttgtacgccgatcatcttatggcggcactggaggctcgcggcatcccttaccgcaatgagcagcggctgcaagacatcacggttgagcctgcagcccgcttgatcgtggattatctgacatgcctctacggccagcgcgaaccaaaagcatggattcggctcatgaatcagctgatcccgtttgctgatgaagagattcagtcgaacgcgcgcaaggaccttgatcggctcatcaagcaacaacgaaaagaggtggtcattgccgagttggtcgcagagcccttttcaggctggtgggagtttgttcgcgccttcctgaagcaggtcagtatcgaaacactagtgtcgctttccccagactacgagtcgcatggccggctgaaagaggttgtccgtgacaccaagatccggatcgaggaattgctgaaactggagcctgatctgcctgaagcccttgagcgcttttctgacgatcaggcagtacgaatcctgaccattcataagagtaagggccttgagttcgattcggtcgtcatcatggcggtcgaaaaagaaatcttctttggcgatcaggacgaaaaccgctgtgccttttttgtcggggtttctcgagccaagaggcgactagtccttacccatgcagatcaacgggagcgcccagcaggacatacgagacgctgggatgtgcagcgcacggctcaaactgagtatttcggctatgccatgccgttcgtgagacaagaataa

SEQ ID NO: 71818 - DNA, 1812 bp, Rhizobium etli CIAT 652
gtgcgcgtagcaaggatcgttattaagaattttcggacgtttcaacgccttgacgtcaatgtcgaaaacgatctctgctgtatcataggtgagaacaataccggaaaaaccgcaattctgcgggccattcagatctgccttgatatttcgcttccgtcgactttgcgctcgcttctccgagaagacatcaacgccaatgtggatatctcgatacccacacaggtcctaattggggtcgaattgacaggtttcgagggaattgtgaatgaagaggctctagtcagcacgtggaagacgggcaccgaccgcgcgaggatcttttaccgattccgacccaagcctggggttcgcgagcaactcgcgagcggtgctatccaatccggtagcttgacgctggacgattacgcctgggagatccgcggaggaggaaacccggcgatcgatctcctcgacctcgagtggaacgaagatggcgttggggaagcagtgcgatttgccgatcttcagtcgttccttgttatccatctgccggcccttcgagacgtcgagggcgatttgcgcaatccacgtcaatcgccattgatcaagctgatcgagtccttcgagattccaaaggaagagcaggaggagctgatccagatcctggatgaagcaaacaatctgatcgcgaaatcgaaaaccatttccgatgtagctcaggcgatcgattcgcgcttcaaagacgtctcgggtccagctttcgagatgggtgcaaagctagggctctcggcggccacgtttcgggccatcctgcgcaatctcaaacttatcctgtcggatacgtctctccaggagttcgaaccaggccgtaacggcttggggatgaacaacatcctttatatctcgatcctcatcgaatatctcaaacggcgcattgccggcggaaactcttcaggacagctcatccttatcgaggaacccgaggctcacctgcatccccagcttcaatattctctcatctctgcactaaactcgatcggcgttcagacggttctcacgagccacagcacccatgtgacgtcgcaggttcccctcaagacaatcgtatcgctcacaaaacgaggcgatgccagcatcgcggctggcaatctcgccttgaatgcgaaattgacgtccggcgaaatttccgacctagagcgctatctagactcgacgaaaagcagccttctctacgcgaggaaggtcatgctggtcgaaggggccgccgagctattcttgatacccgctctcatcgaaagtgtgcacaaggtaaagctggagcgtgtcggcatttcattgactccgatccacggtgttcacttcgacgtctatgccaaacttttcgcgcacggctccttggaaaagaaatgcgcgatcgtggcggacgcagatctcattccatcagatgctaccgcgcttgatttcaacccggacgactctgcccccgacctgatggcgctcgagaacgattttgttcaagtctttcttggagcaacgaccttcgaacgcgagcttacaaccaagggccttttgccaatgcacatcgcggccgcagaggcattgggtgcaccgaaaattcatgaggccttgtcctccggctatgccaaactatgttcgggatctctgcagctcgatgatgaagtcaagctccgggtggaactcgggggagccgtgctgaacaccgccaagagatttggcaaggcgcgctacgctcaggtcgccgcacgttttgccgatcatgcgaacgagctccctgaatacatccaacaagcgtttgaatggctctcagaatga

SEQ ID NO: 71819 - DNA, 1785 bp, Rhizobium etli CIAT 652
atgatctcgctgaccgaggagcagcagtcggccgtcgaggtggaaaaacacctgctgcttgccgcctgccccggcagcggcaagacccgcgtgatcctcgcaaagcttcttgggcttgccgataccgtcgagaaatccccccgatttatcggttgcataacctacacaaatgcggccgtggatgagattgaatcgcgcctgcgggtctacggaacgaacacgagcactgaaaagtgcgatgtttcaacgatccactcgttctgccttcaacacattctgaggccttacagctggctcgttgctgagttgccgccaactttcaaggttttgacacgggaaatcgcggatttcgagcaaatcgtagaggcggtagaggaccacttcggtcgcgccaccatggcaagaaccttcgacgattacgaatctctgcgagtcgacgtccatggcgagccggcaggtgacggttttgagcatggtatcgtgacgcgcgattccgccattttgtactgggaattcgtccgcgcgcgcggctttcttgatttcgcgatgatccttttttactcgctccgtattctgcgcgaacatccatttgttgccagaggaatcgcggcacgctttgaatggctcttggtcgacgagtttcaagacactaccgacgttcagctggcgatttttcgcgagctgcaccgccacctgaccacgaaattctttatggtcggcgaccacaaccagtcaatcatgagctttgccggtgcccgccccgatttggcgcaagaatttgcgaccgagattggcgccgagctagactattcgctgactgcaaattttcggtccgcgcccggcgtcgtcaatacagcgcacaccttgatcgcgaccaatcctcgcatgcattcggaaggaaaagcgaaggattttgatgccaaggttacctacgttcatgtctcccaacccctcaacgcaatcaccgagcattttctgcctatgctgcaggacgaaggtatcgagctcggaaacgcggccgttctcgcgccgtggtggacgcacctcatacccgtagcgcgtgcgttaagggagtttgatatccctgttttcgggccgggtgcgaggccatatagacgacgacgcctgctcgccggcttggccgaacaacttggggcctgtgccgagtcggagcattttctcggccttccaggcgttgagaaagcgctcttcaggcttataggcgacatcacgggcgcgacgcggtttgacgtcttcagctatgcgggacgtcggaccgcactggcattgatctatcgcgcacgagcttgcgcgacggctcatcctggtggaaaggcttggctttatcaaatcgcggctgaaatcgcggagcagctgtatactgacggctgggtcccggccccgccgacagcgctccttgaagcgtcagcggatgagatggttcgggacatgcgggcaaatcgcgtggaccttgaaaacctcgctatttctgacatggggctgtttgccaacccggaaaaagctctcaagttgattacgatgcacaactctaagggtcgcgaattcgatgcggtcgcattgatcagcatgaactacggccaccttcctcatttttcgagcaccacccaagagcagtacgatgaagcgcggcgactgttctatgtgggcatcactcgtgcaaaaaaagttttgcttgtcgcatccgatttctccgacaggcgtaatcggccctgcccgttcatcaccgaagcagggctgatgttggggggctcggaagattggtaa

SEQ ID NO: 71820 - DNA, 2322 bp, Acidithiobacillus ferrooxidans ATCC 53993
atgtatgtacattctcttgctttcaaaaacttccggagattgaaggacgcacgcgtcgatttcgccgatgacctgacgatcttcgtcggggctaataacagtgggaagacttcggccactcacgcgattgagcttttcctttcgggaggtaaggacaagttcacggttcacgacttttacgcgggttgctgggccgacttcgagaactttccagccgaaggcgcgatcgacgcgaaggtcgaatttccggccatatcccttgatgcctggatcagcgtagacgcagacaatctctatcgcgtggtcgagttgctgccgcgcgccgcttgggaaggatcgctggtcggacttcggatcgaattcgcggccaaggatgccgcacagacactcgcgaacttcagggcgaaggcgactaaagtagccaagtttgcgaagaccaaggaaaaagacgggcaggactacaagccttggccgcgcaacatgcgcgactatctctcccgagaactgaagaacgagtatagtctgcgctacttcatcctggacgaggcgcagctcaaggaggaaaccgccgacgcggcctatacgcccaaagagatcatcggtgatgccgagcgatctggacacaccgtcatcaactcgctgatcaaagtcgacttccttagcgcgcagcgccacctgagcgatgggaacgctcaggcaagaacggaagacctctcgaaacggctgagccgggtctacacccgcaatcagaaacaacgggaagacgatcacaacgcgctgagagccctcgcgctctccgaggaccagctcaccaatcactttgccgaagtattcagcgacacattcaagtcgctccgcaagcttggctacccaggtctggcaaaccctacccttgagatacgcgcggcgctcaagctggagcgcctcatgggcgaccagcaggcgaaagttcactacctcctcgaagaagcaactgccgaagtggaagctctcgcgctccctgacagctataatgggcttgggttcaagaacctcatctatatgggtgttgaactcctagacattcattcggcttggtcctccaccgaggagggcgaggaagacaagcgacagcctatccatctcattttcatcgaggagccggaggcgcacatgcatgcccagctccagcaggcattcgtgcgcaagctgaccgatctgatctcacccacgggtgatgacggctatgcgacacaatttgtgatcactacacactcgccgcacattctctatgagcgtggtttccagcctatccgttatttcagacgctcgccggagaccggcgcgaagcagagctcagccgttttcaacctgtcggtcttttacgatcagaacgagcccgaccgggatttccttcaacgctacatgaagctgacacattgcgacctcttcttcgcggatgcggccattttggtcgaagggaacgttgagcgtctcgtcctgccgctgatgattacgcagggcgccaagaagctcagcgcggcctatctgagtatcctcgaagtgggcggcgcttttgcctaccgattccgcaagctgatcgagttcctcggactgacgacactgatcgtgaccgacctcgacagcgtgcatccagcatcgccgaagaagcaagaagaagcagtggcaggagacggcgcggccgccgaagcggcggaagacgctgaagaagaggatgaggatgggggccaagacgcagaaggtgagaagaaacccaagccaaggtcgaaatgtcccgccgacacacccggtgcaatcacggcgaaccagactctgatccagtggcttcccggcaggtcattgatcgatgatctcctggttgcgtcgcccggcgacagacttcggtctcctacggtggatggcggcgcacatgtcatggttacctatcaatgccccgtaaatgcgacatggggcgcggatacgctcgaactcaagagtcgtacgcttgaggaggcattcgcctatgaaaatctcgcctggtgccaaaagggggagcatcgcgaggtcgggctcttctgggccaaatcgcccactatgtcgctcgaagatcttgccgccaaaatccacaagcgggtgaagggggaaaactttaagaagacgaacttcgcgctaggactccttgctagcagcgatgtgagctgggttgttcccacctatatccaaaaggggctcgactggctcacgacccatgtcgcgctcactgacgagacgaacgagagcgccgccgcgaagccggagcctgattctgacgctgccctcaacgcagatgaggctgcaaaatga

SEQ ID NO: 71821 - DNA, 1890 bp, Acidithiobacillus ferrooxidans ATCC 53993
atgacgagccgtgctggcaatccggatacgctggcggatatcgagcttcgctcacttcttgataataacgcttcgacgggcttcgtcatgatctcgggcgcgggatcgggtaagaccacttccatcatcaaggcactcgatcacctgcgaaaaacacgcgggccgtaccttcgccaacgggctaagaagattgcctgcatcacctacaccgaggtcgcagtcggcgagatttggggcgacgtcgggaacgatccgctatttcacgtttcgactattcacagctttctctgggccgccatcaagccttttcagacggacatcgcgagttgggtagatcgccgggtcgatcagaagatcgccgacattgaaggggagatcgcagccttcactaaccgaacgcaagagaaaacacgggttaaggctgtggccgacatcgagcgctaccgcgagcagaagctgaagattgtctctgttgaccgtttcacctacggcgtcggtagcgactatcaaaaagggatattggggcatgatgatgtgatcagactctcaaccgagctcatccgctcccaacctctcattgctacggtcgtcgggcagagattcccattcgttttcgtggacgaaagccaggacacggctcctgacgtggttgagtcactcaaggcaatatcggaagcgctgggttcgaagttctgccttggcttcattggcgacccgatgcagaagatttacaccacgggcgcgggcgcgatagagcctctccctggatggaagcgcatcgaaaagccggagaacttccgttgtcctgtggcagttctgaacgtcatcaataacatcagggccggcggcgacggtttgacccagacgggcggcaagactgaagtcgttggagaagagcgaaagcccgttcaaggcacagcaaaacttctcgtcgttcccaaagatgaccggagccgacggttggctgccgctcgccaatggctagcggatcaacatgcagaccccctctggctcagcgatgaaccggaggccgatgtgaaggtgttggtgattgcgcaccgcatggccgccagccgtctcggctttggtgatctctacggggcattccgcgacaaaacgtcagaaggtctcaaggatgggttcgatgatggctcgcattggtcgattcagcctttcctgaagtttttgatgccactggtcctggccaacggagttggcgatcagttcgaggtgatgaatctgttgcgccgcttcgctccgtctcttcaacgcgaatatgcgcgtgcgaatgccataccgacgatcctcaaggatcttgatgcaagagtgaaggccctcgccgaggcatacggcgcgacctcaaccatcgctgtattcgaggcactgaagcttcttcgggacggcatgatgttcaggctggatgatcgcattctgactgcgatggccgagtacaaccaagccgttccacctacggactcaggcgacgcagcagctttgcagaagctgcttcacactccgatgaaggaactctggggctatcggacctacattgaggagcagtcgcccttcgaaacgcaccagggggtcaagggggccgagttcagccgcgtcctgacagttcttgatgacgaggaaggcagccacaatcagttctcatacgggaagctcttcggcatcacgccgccgtctaatacggacctgaccaacctgcgtgaaggaaacgagacgactttcgaccgcacgcggcgtctgctatacgtgtgttgctcgcgcgccggaaaagatctggctgtggttttcttcgctgacgatccggcggctgcacatgttgctatcacgggtcttgggctgtttccggctgaagacgtccataatctcacggccttctga

SEQ ID NO: 71822 - DNA, 1947 bp, Vibrio fischeri MJ11
atgtacttaagtaaattaaaagctgaaggcttcaggtgttttgacaaaggcttcagcgtcaaactaactgatgagctaaacgtgatagttggtgaaaatggcgctggtaaaacagcggtcataagtgcaattcggcaactatttcaagactctgaatcaggtaggtatagcgtcactagcgatgattttttcaacccattcgtcgcagggggaaaggccgccacatccttctctatttgtgctgaatttgatggactggatgtaaaggataaagtagcttttcttccatgggttggctcttcagatactgcgttattaaacctacaagctgaaaataaggaaatacgtgggcgattcaaaaaagtcatatggggaggaaaatccaagagttcccaatttgatcccgagttactagatctagtccagtgcatctatttgccaccgctaagggacgctgagtcaaaattgtcgaacggccgtcagtccagactatccaaattacttaaagctctgaatcgcaagcaactaaaacaatgtagaaaagacgataaattacaccctcttgaagcaagcctaaaaagtttcaatgaatctttagctactgacgataaattgagcatcaaggacgccaataagcttataacggaaaacttgaccaaagcaattggtcaccactttgggcaaaagactagtattcaatttgcagaaagtgactttactaaaatttcagaaagcctaactttaatgttctttcctgacttgtcagctgaggatcaggaactgttccgtgatcttagtcaaaatagtttaggttacaacaacctactctacattgcttcaattatggcagagcttacgctagacgaggatgatgaagagcaacctattttcaagctactgcttattgaagagccagaagcacatttacatccacagttacaaatcaggctgttaactcacctaaagtccgttgcagaaaagaacaaaaatgttcaggttattgtgactacacactcgacagttttagcctcttcggttgaacttgaatccatcatccatttatctagatcacctgagccagtagcaacacctttacgaacttgtggattacctacagccagcagccagtttatcaaccgttggctggatgtaacaaagtcaaatctactatttgctaatggtgtaatcctagtcgaagggattgcagagcaaatgataattcctactttggcaaaaatagttctaaaagagcaaatggacggacgtaatagccttgaagaccttggtatttcaacaattaaccttaatgggatctactttaagcacttcatgcaattatattgcaacgtttcaacgtcagatgataccgaagaagaaactgttggtgagagcattccagtaaggtgtgctggaataaccgatctagacccaccaaaaacaataaagaaacaagtacccaatccccaaaaagatggggagacagtagaagtaacccaagacttcatcccttacgaaggaaatatgcaagacgggaccaaccatgcaattaagctggtagactccatcaataagtcaaccaacgcaagactatatgtgagcaagtacaagacattggagtacgatttagccatggaaggtaacaatgctgcattgatgtatgaggttatcgcttctctttggccaaagcctcaaaaaggagagagccgcataatccaacactgtaccgcactgtccaaagtagattggaccaagaaaaccccggaagatgttgctgtcgctgcccataatattttaaaaaggattgatgacgataacattggaaaaggtttgtttgctcaagttctaaccgataaaattagtgctaactatgctactttttctattccgacttacatcaagaacgctattttatgggcttcttcagtaaacgttggagaggaagtataa

SEQ ID NO: 71823 - DNA, 1758 bp, Vibrio fischeri MJ11
atgaaaatagagtttaccagcgaacaacttgattatataaactcgagcatcgaagagcatattttcttggaagcctgcccgggaagtggaaaaaccgaggtagttgcaacgaaagtggctaaagaaatcgactcttggaagaagaaccccggtggattcgcagcactctcatttgccaacagtgcgactgacgaattaacgtcccgagtgtcaaagcacttgcccaacggccgagaaatgtttcctcatttcttaggtacttttgatagtttcatttacaagaacatcgtttcccccttatctatagagctaacgggatatgcaggggaaggcggtgacgcttctattcgcattatcgaacctactgcacacatgggctatagaacgaaatatagttacgcgaaaagagggaaagttaaagcacaccactactctttcgatctaattaaggactgtgtggttttcgatacaggagactctatattaaatagaactcttagctctatttcattaaaagattggcaacttgatgatctcatagcaactaaaagcaagatgcttaaaggtggtttcgcaacttaccgagatattgaatatttggctatcaaggcaattactgaaaagaagtatgagcactttgttcatttacttgtaaaacgctatccattaatcattattgatgaatgccaagacctttcagaagagcagttggcgattcttcaagtacttgctgataaaggaatcaagctacatttcgttggggacctccatcaagctatctatggctttcgtgacgttgaacccgccaaagttaaacaattcgtagaggataataacttcagcacattgcagctaactcgaaactttagaagctgccaaaacatcgtcactctgtgtgccaaactaacaggtcgtactggtattgttggaaatgtatcttggttagaacctaggtgtatcgttcttcaatacaataattgcccgactgaactaacagacactcttgaggataagtgcgatggatttagcaataatgttgtggtctcgagagggcattccattcttcgtaaatttcaaacttctgtgaccgagccaaacaatattcagaagctagccctcgctgttaagctattccgatccaaagatatggaagctctcaatcaatctttacagtacttttccgaatttcttcgctaccacttaaaggaaagctataaaccaaatagtttcaattcccctcagtccataacctccaacctttcatggcgtaagtttttgtatgaatctttaaattacttgatttgcaataacctacagaagattgatattaagtggtctgattggactaaaattgcaaaatcgttaattcgggatctcccaaagcagagcttttgcccggaagatatctcaagcatattagttccactggaagtggtaaatttaacctccccatctggttctgcgaaactcgaagtcgcgttatcactaggagctactaagatctcatcgttttcgtacaaaaaaacaacaattcatggtgcgaaaggggaaactcatgatgtcactatagttgtatcatctgctagtgcgggaaatgattctcactggaaaagctggcttaaagaccccgatagtgaagctgcaagatttgcatatgttgcgtcatcccgaccaaaagaatttctgatttgggttgtaaaaactcttaagcgaccagaaaggaagcaattagaagctgttggatttactattatttaa

SEQ ID NO: 71824 - DNA, 1707 bp, Acinetobacter baumannii AB307-0294
atgcatataagttcaataaaagtaaaaaactttagagcaattaaagatgctgaattaaaactagatcctaatcagaaacaggatttaactttaattgtgggaaagaataatagtggaaaaacctcatttattatggtttttgataaattctttaagaaggaggataattttaattttcacgacttttcaacgcatcttagagaaaaaatttataaaattgatagcgagactattgaagaggctataattggtctatttttggaaatatcatattctaaagatgataatcttgaatatttgtctgaatttattatagatctaaattctaaaaataatactgtaaagttatattttgaatgtttaattgatgaggaaagattgcgaaatgatcttatcaatattgataagaagtataaaaaaaagtttattgaaaaaaatattacttcttacttaataaaaaatttatatatatatgagaaagatgaggatatcgaaaataataaacaaaaattaataaaaaaagaagtttcagcaattaacagtttgattaattatcaagtaattcatgccaaaagaaacttggcaagttctgagacaaaggaaaaatctagtcttccattatcaaaattaagtactgaatattttaataaagaaaatatgttcagtgaaaaagattttattaagattaataatgccatattagaaatggatgaaaatttaaataatttatatgatactcactttgaaggtttttttgaaaacgttagggattttttaggaagtacggctttaaaagtattatcaaatttagagtctaggcaaataatgtctaatagttcaaaagtagtgcaaatagatagtgaagaaaattttttacctgaatcattaaatggtttaggaaatttaaatattttatatctattattgcaaattgatttaaaaaaacgcttttttatccaagaagacagaagtattaatttactttttattgaagagccagaagcacatacacacccacaaatgcaatatatattttcaaaaaaaattaaaaaaataattgaaaatatccctaatttacaaacattcatttcaactcattcctctcatatcgtgtcacagtgtaattttgaagatataagatattttcataatcataatggaaatgtgaaaataaaaaacttctatctagaattggaagaaaaatataagttgcaaactgagttatttaagtttttgaaacaatatattactctttattcagcagaattattttttgcagaaaaagttatatttattgaaggagtctcagaaaagatactacttccatattttataaagaattttgatgagaaaaataaaggaaaacaagactatattccaattagttctcaaaatattacatacattgaagctggagcaaattctaaagcctttcagcatttattaaatttttttgaagtaaaatcacttattctgactgatattgattccgttggtggggaaaacagatcagcttgctctgttgataagggaatagctagcagtaatgcaacaattaatcattatttaaattataatgaaaatgatccggattggtttaatcttttgaaaaaagaggtattaaaattactgataaaaatattaatctattctaccaaacagaagagaatggatatcacgccagaagttttgaggattcatttataa

SEQ ID NO: 71825 - DNA, 2094 bp, Acinetobacter baumannii AB307-0294
atggatcaatcaataaaagcaattgaaagcgttaaagagattattataaataatcaatttcagaaagacggttttagaaattttgtattgcaaggtggggcaggtagcggtaagacagagtcacttaaggaagttattgaatttatttctaatagttatccaaatcaaaagattgcttgtattacacatacaaacattgctgtcgatgagattagatcacgtattaagaatgctaatctttgggtttctacaattcactcttttttaaatgaacaaaccaaaaattttcaaaagaatttacaagaggttttaccttatattttttatatagataatagtgatattaatgattacgaagattataaaaaaagatatgaaaaattatctaaactaagttataagcttaataatagaagaatggataaagttgtaggtaagagagattataatgcagatataatcaattacaataatattttacttggtgagataaaatccataaatagcatgattcttgaggtaatttcctcaaaagattttagagatataaaatataatgaaactgtatttgattcaataagtgatggaactttttctcacgattctcttataaaagtttcatattttcttgcagaaaaatatagcttattttctaaaattataagtgataaatttgactatatttttattgatgaataccaagatactgataaagttttagttgatttattgttgaaaaaaattgcaataaataagaaaactactattggtttttttggcgactcaatgcaaggtatttatgatggcataggtagccttgatgattatattagagattttaatctgatttatatacctaaagatgataattatagatgttcacagcaagtaattgattttttgaatataattaggaatgatgatattaaacaaaaagttgcacttaaaaaaggtgagagtttagattcacgacaaggatcggttaagatatatattaataaaattcaaaaagttaagtctaatggtcatcaagaagataaagaaaaatatattgctttaataaatgacgcaataaaaaaagtaaaggaaaagagtgatattttaaatcttaatatcttgcagttaacaaataaatctatagcatctgagttaaaattttcaaaattatttaaagtgtttgaagatagatatcttaacttggagcagactcagatagaatctaacttgaagaaaatacaagttaaagatgtagttgacttaatttttctatataaaaacaatagacataatgatttaatattaaagcttaagaaaaataatttaaaaattaaaaaattagatgataaaattaatattatttctcgattaagttatatttgtgataatgatttaggcttaaatgaagctcttgattattgttatgaaaataaattacttataaagtccccacaaagaatcgactttgaaagtcaatcaaagcgtcattttgagcaatgtgattctgatcctgtattcaaagacttaaaaactcttttagaaagagataatctaaatacttacaatagagctaagcaacattgcacatatgatatcgatcaatatgattatgatgattttatgagttcttatagaaagattaaatttagtgattcactgttatcaaataacttacttctgagtgaggttttaaattattttaattatattgaggaaaattcaaattcaaacgaaaaatatttaacaatgcataaaacaaaagggacaggtattgaaaacgtttttgttgtattagaagaatttttctggagtaattattcattcagaagtatatatgactctagttactctaattttaaagttaaagaaaaatctgagaagttattttatgttgcatgttctcgtaccataaaaaatctaatgattttaataaactatgaaacgaatgatgagctggaattgatacgagagaaatttagtggttttgaaattattgaattaaatagcagtgatactaatttattgattactaatccagatgttgaaaactttactttacctgctgctatagaaagtaatatacaagtaagtatttaa

SEQ ID NO: 71826 - DNA, 1671 bp, Acinetobacter baumannii AB0057
atgcgattagtgattgatcaaaatctttcagattccgctagacaattaaaactctctgatttttgggatggttgtgatttatttacgaaaccacaaattgaagtacatttagattttactgattttgaaaatgatccagatttaactgcattacttacggattatagactggcctccgatcctcatacagtccgtttaagctatatatttagatgtaaagccgagtgtactggtttacctacaagtagtgaagatttcgaattcttgatttatgggggcgacgtagaagaaaagcctattaataatcaagttagaagaagaatttcactagatttattagacgctttacgagatgcagagaatcaacttggttcatggagaaactctccattaagacctcttatagaaaatgctatgagagcaatcgatagtacaactttaaccactatttcagctgatttagaagcagcaaataaaaaaatagtagagcagcctcagataaaagttttagatagttcattaagtaaacaaattctgagtctttctggtaaaggacatgatttaaagccttcgctccgtttttctaatgcagatcctttaagactatttcgttcattaggaatgtacattgatgagggaaaacgtagtattaatgaagctagtctaggctcagcaaatgttatcttgatggcattaaaacttgaggaattttcttggcgtaaagaaaaaaatgaaagaaattattctttactatgcatagaagagcccgaagcccatttacaccctcaacttcagcgaagtgttttcaaaaatatatttaacgaaaaggattcagctcaagctcttattattaccagccattctccaactttagcagcagtagtaccactacgttcaattgttaatttaaggcagataaataatagtacgaaagcattttctctagctaatttaccaattgatgaagatgagaaagatgatattgaaaggtatttaatagcaactcgttctgaaattttattttccaaaggcataatttttgttgagggggatgctgaagaagctttgattcctagctttgctgaattattaggatatgatcttgatgggtttggtattactgtatgcaatattggtggggttaattttaagccttatgtcaaacttgcaagtagtttaggtatcccttttacgattattactgattgggatcctttagatggtactaaacagccgttaggaaaaaaacgcacagttgaaatttgggatgctgctggtgaggtcaatttatctacttttaggcttactcaagaacagcgagaatggtgtgataatgcttcatatgatcagttttcagctcaatgggcaaaatatgggatatttcttaatgatcaaacttttgaagttgctatagctcaaactccaaatttaagcgagatattattagatattttagatgaacagggttttggaccacaaagaactcagagaattaaagagtggagaggcgatcatacaaaaataaataatgaaaatttactttctatgattaaagatatcggaaaaggacgtttaagcggaaaaattaaaaagagaataactgcatctggaactataaatcctcccgcatatattactaatgcgattgagtatatggtgaaaaatgtctaa

SEQ ID NO: 71827 - DNA, 1782 bp, Acinetobacter baumannii AB0057
atgtctaattattcgagattaaaacaagcactactagagcttgaaaaaaatgaagaacaatttgcagctgtaaattgtagaaatcattgtgttgttttagcaggtcctggtagtgggaaaacaaaaacgcttacaaccgctattgctcgtactcttcatgaagagattattaatccaagagcaattgcatgcataacttataataatgaatgtgcaattgaacttgaaggtcggttatctaaattaggaattgaaaataatagtcaaaattttattggaactgttcatagttttgctttaactcaaataatagtaccctatgcacgttgcttacaagggctccttcctaatgattttaaaatagcaaataaaaatgaatgtaatttagctgtcgaaaatgcctataaagctatatataacgatgggggagaccctcacgcacagtgggaatttgctaaagaaaaaaggaatagagaagtagacagaacgcatcctgcttggaaaggccataataaagaactggctgaatttattgaagaatatgaatctgaattaagaaaaaaaggccttattgatttcgatgatatgcctctcatagcatttaaaatgattaaagaaaacctttggatccggcatgctttagaatgccgatttccaattttatttgtagatgaatatcaagatttaggtcatgtgcttcatgaactagtacatctactttgttttgatggaaaaatccggctatttgctgtaggagatgcagatcaatcaatttatggatttactggagctaatccagagttattacaaagtttgactgagagagatgacgtagagacaattcaattaaggtataactatcgttcaggaacaagaattgtcaaagcatctttagctgctctggatgaggaaagaaattatgaaactccagaaggtactccagagggggaaatcatttttaatccggtgaaagggacattagaggaacaagcaaattttatagtagataagcttttgggtgaattagcttcgaagggtttgaaaaatgaacaaattgcaatcttatataaggctgcttggttaggtaataaaattgtagaggccttagaagcaaaaaaaataccataccatcgaactgatagtaattcactaattaaaagaagttcaaagttagcttgttttattgaggattgtgcaaaatggataacaggagggtggaaacgagctgaaccaccttttaataaactatcaaaacaggctttaaatatagtttatggaaataactatacacaagctgaaaaacaaatattagacctgcaacttattaattttctacagaagagtagatttgtttctgaaactgcaaatgcatggttaataagatttgaaaaagaacttatggctcattggtcaagtatttgtcgtaataatatacaagaatgggaggtatgtttggatcttataaaaaaaacttccccacaaatgaataaagatatgtctcttgagttattttccggaaaaactgaaggaactggaagattgatcctaactacttttcatagttcgaaaggtcgtgaatttgatgctgttattatttttggtgcaaacaaggggatattgcctgataagagagatcttaaaacatttaaatctttaaaggaggtaaaaagattattctatgttgctgttactagaccaaaaactatattacatttagtctatgagtcaaaaaaacattctgaatttttagatgagttttatagacgtactcagcaaagttag

SEQ ID NO: 71828 - DNA, 1848 bp, Oligotropha carboxidovorans OM5
gtgcgtgttcgtcgacttaagatcaccaattttcgcgggatctctcaaggcagcgtcgatttcgacgggcatacattgctcgttgggggaaataacatcggaaaatcaacgatctgtgaggcgctcgatctcgttctcgggcctgagagattgtttcgccgccccgttatcgacgaacacgactttcactgtggcaagtatctcgacgacgacggtgcgccgatcgaggttcggatcgaagccattctggtcgatctatcggacgaggccaagcgccgattctgcggccatctcaggcgttggaacgacacggcctgcgtatttatcgacgacgccgacgacgcgcttgaccacgctgatgcagcagatgcgatgtgggcgctgccgctgctgttcgtgggacgttatgaccgtgatgaggacgacttcatcggcaacacgttcttcgatcatccctcgaaggacgtcgaccccctcgacgaggaaaccgaaattaggcttgggcagggacgtgtgccgttcacgcgaatgcacaagcggctgtgcggctttgtcttcctcagaacgctacgaaccggatcacgggcactgagtctccagcgagggtcgctgctcgactcggtgctgaagcttggcggcacaggcgctgtcgagatgtggcaggacactcttgccaggcttcagagccttgatcccgccattggtgagatcacgcagctgaagcacatacgcgacgaaattcgcgcgcggatgggacgtttcatcaatctggcgccgggcgacgagtcgaccgggttctttgcctccgacttaacacgggagcatttgcgcgaggtcgtgcggttgttcgttgccgcgcagcctggtcagcatctcgtgccattcggccggcttggcactgggtcgatcaatctactggtcttcgcgctgctgacgttcatagcggagttgaaggacaagcagtcggtgatcttcgcgatggaggagccggaaatcgcactgccgccgcacactcagcgccgcgtcacccgcttcattctggcggagatgggacagtcgatcgtcacctcgcactcgccctatgtgatcgaacagttcgacccggagcagattgtcattctcaatcggaatgaaaccggcgcgctcaccggacagccgatcaatgtcgatgcagtgaagccaaagaccttcaggactgagcggcggcagttcgctgaggcgatcctcagccgcgcggtgctggtcgtagagggatcgaccgaagcatcgctgttccccgttgcatcatcgatcatggaggcgagtctcggcgccgacgcttatacccacctcgacctcgccggcgtcagcatctttaacgccggtggagatggatcggtgccgcgccacgggtcggtcttttcggcgctcggcaagctctccttcggcttctacgacaaaccgaatgcggcactgacaccggcggccaccgaaaagctgaaagagtacacccaattctgggagtcgccggagaagggcatcgagaccgtcctagtgaagcagatgcccgtcgctgtggtgcgtcggttcctcgacgaggtgaaggatcgatcggactatccggctgtgggcacctatgacccagcggccgtggatgcagacgtcgtcgcgctagcgagcaaagtactgaaggcgcgcaagggtgacgcccatggctatgccgccatgctcgtggcccaatgtcagaacgctgacgaactgcccgcgacaatccgcgaaattctggaaacgatccacaaagcgctgagtgctgtgcctgaagacatcgcagcacctccgatggacgaacttgagggtcttcttggatga

SEQ ID NO: 71829 - DNA, 1704 bp, Oligotropha carboxidovorans OM5
atgaagatcgaactgtgcgagaagcgcaaggcgatcatcgcacagcagggccacctgctggttttgggcggcccgggttccggcaagacgacgatcgcgttgttcaaggcgcagaagcggttcgctgatctgaagccaggccaagagatcttgttcctgagtttctcgcgcgcggcgatccgccaagttctcctccgttgcaaggaaatcctgaccccagctgaacggcgcacggtgaccgtacagacctatcacgccttctgtatggaaatgcttgaggctcacgggcggttactcggcgggaagcctatccgcttcctctacccaggagatgagcggctgcagaagtcggcgtttgaaggcgactggagtgtagagcgtcggcggcaggcggctgagatgggcctctacagcttcgatctcttcgcggctggaacggccgagttgttcgagcggtgcggggcgttgcgcgacctcatcgccgatcgctttccgatgatcatcgtggatgagttccaggacacggacgacaatcagtggcggatagtgcaggcgctttccggcgtaaccgacgttttctgccttgccgatcccgagcagcgcatctttgactatcgcgacgatatcgacccgcgaaggctcgagattctgcgcgagacgaccaaggtctcggaattcgaccttgggggagaaaaccatcgcagtccgaacgccggcatcctgaagttcgcggatgcggtgctacgtaatcaagccccgttgccggcaacacccgacgtcaaacaggtggcctactggccaaacgcgttcgccgccacagcgcatgctgctgtgatctggacgttctctgtgctccgcaagaagggcgtgacgaatccgagcgtagcggtgctgtcgcgtagtaacgcgctgatttccgacctgtcgacgatcctgtccgagccgcatacctacaacaatcagccgctcccggtcatagagcacgacgtcgtgtgggatgcagagctctccgccgccgccgcgcttgtcgttgcatcgatactcgaatggccgacaagcccggccaatgagagcctagtccggaccctccggctcatctgcgcctactacaagctgaagaacgctgaggacccaacaaaggcagcggccgatcacgcgcgcaagtacgacgaggccgcaggaaaggtggagaagggggaagcgccgaggatcaatgcagccaaagcgctggtaacagcccatgccaacggcatcgatctgatcggcgaacccgtagccgactggaaggccgctcgtaccgttctgcaggatgttcccgcgctggccgaactgttccgcgaggtgcggttggttcgcctcttcagggcgaccgacgcgcttgcctctggcttgggcgagcaatggttggctttgggcagctacgccggtgtgagcgatctcgtgaagcgcattctcgagcaagagcggctcatcgctgtggagcgcgacccccaagggtgcgtgctgatgaatatgcacaaatccaagggcaaagaatttgacggcgtcgttctcgtcgaaggcgcgttcaagtccggcttcttcaacgaacgtgagaagccgcctttcgagccgagccggcggctgctgcgtgttggtctgacgcgcgccagggccctagtgacgatcgtacggccacaaaacgcgcggccactggtcgactag

SEQ ID NO: 71830 - DNA, 1785 bp, Rhodobacter capsulatus SB 1003
atgcggatttcgcgagtaagaatagccaactttgcaaatttctccgatctcgacgtcgagacgggcgagagcatcgtcatcgtcggtgaaaacaaggtcggcaagagcaacttcatccgcgccctgcaactgatcctcgaccccgggctctcggaacgagaccgccaactcggactcgaacatttctgggatggcttaggagaggacaagcttggcgaggcgatcgaaatctcaatcgatctgacggatttcaccaacgatccgcgtctgatggcgcatctcaacgactgcgtggtggacccgggcccgccaatggtcgcgcgccttacgtaccgcttccagccaaaggcaaatctcggccgtgatcccgaaagtctggctgactacgagtacgtcattttcggcggcgacgatcccgatatggcgatcgggtcatcattgcgccggatgctcccgctcgacgttcaggtggcgctacgtgacgcagagaaagacctgtcgatctggcgaaattcgccgctaaggccgttgatcgaacagttggcaacttcgctggacgaagacgctcgcgacgaaatccaggaacaagtaaacgaggctcaagccgagcttgccggtcatgccgaggtggttgctaccgcgcagcggatcagcgaccgcctgatcgctattgcgggtgagcagcatgccgttccgctcacgctaggcctagctccgacgcgggtcgatgcgctactgcgtagcctgcgcctgctgatcgacaatggtgcgcgcagtattggcgatgccagcctcggcaccgccaacctgatctttctggcgttgaagagcctcgagttggatcgtttggtgactgacggcgagcgtgaccacaccttcttcgtggtcgaagagcccgaggcgcatcttcatccgcatgtccagcggctggtctatcggtatttcctcggcggcgctgcagatgaccaagaagatgctccgcctcttacgaccatcctcacgacgcactcgccgcatatcgccagcgtcacaccgatccgctcgatcgtcctgctccgctacgacgccggcgaggatgcgacgaccgccgtctcgacagcgacggctccgctgacggagcgcgatgaggccgacctccagcgttacatcgatgtcagccgcggcgagatcttctttgcgcgaggcgtcatcctcgttgagggcgatgccgagcggtttctcattcccgcattcgctgaggcgctggacatcccgctcgacatgctgggcatcacggtctgctcggtgagcggcaccaatttcacgccctatgtgaagctgctgggtccgcagggcctgaacattccgcacgtcatcctgacagatcgcgatccgaacggcacgaggccgccgctggtacgccgccgcctcatcgaggtgctgaatctggtcgagaacggggtggactacacgccgctcgacgccgatgccgtgatcgcccgcgcggagccactcggctatttcgtgaatggcaacacactagagccggaactgttctgtggcggcctcgcggacgcgatgcaggagatcatagaagaggaactgccaatcaatcaggcgacccgcgacctgctgcaaggctgggtcgacgacaccgacacgctcgatgaggagaggctgatcaaactcatcgaacggatcggcaagggacgcttcgcgcaggcgctggcgccgtacgtcgaggaggatacgtgcccggactatatccgcaaggcgctggagtacattcgcgatgcccttgcgtag

SEQ ID NO: 71831 - DNA, 1818 bp, Rhodobacter capsulatus SB 1003
atgcccttgcgtagtgtcagcgccgcctatctcgcgcaagcagcggacttggccagtaacccgggccagcaagccgcctatgactcgaccggccattgtgtcgtgctcgccggccccggcagcggcaagaccaagacgctggtgctcaagcttgcccggatcatggctgaagacgtacgcgcgccacgcggcgcggcatgcatcacctacagccaggagtgcgcgcgcgagctgacgcgccgactggagcggctgggcctgagagaggcgccgaacctcttcatcggcacggtccatggtttttgtctgaggcatctgttgatgccctatggccgtcttgccaatctgccggtgccgttcccgcttgcggtcgccacgcaacgacagagcgaccaggcgatgaatcgggtcggggacaggctcttcggcgtaggtcatccgaacaagccgatggatctggggcgtcatcggcgatcgatattggacaggacgtcggaagcctggacagatgaggaggagcttgcggcatgggccgagggctacgaagccgagctgcggcgaacaggtctcgtcgatttcgatgacctcgtgattttcggccagcgtctggtgtcggaacacgactgggtgcttccgctgctccaagcgaaattcccagtcctagcggtcgatgaatatcaggatctcggcgttgcgctgcaccgcatagtcaagcgcgtcgccttcgacgggggtgtccgcctctttgcggtcggagatccggatcagtcgatctacggcttcacgggtgcggacggagctttgctggaggagctagcggagcgcgacgatgtcgagcgcgttcagcttcaactcaattatcgctcggccacgcggattgtcagtgcctccgaaatggcgctcggcgaggatcgcggctaccgatcgaacgacccggatcgccaggcggtgatcgccttccttgaatgcgacgatggcctggtaggccaggccgcgcacgcggtcgccgagatcatcccagcggcgcttgccgccaaaccgggacgtgcgctcggcgacatcgccatcctctaccgggactatcgtgccggcgacgtggtggcggaagcggtcgcgtccgccggtctcgactttgtgcgggtcgacacggccgcgccttatcgcaaggtcgcactcacgagctggatcgaggactgcgccgcctggtgctcggggggctggcgcaaagcacagccgcaattgcgtggcttgttggaccgctggatcggtttccatcgcgcacggatctcggacgcgcaagccagcgcggaattgcaaagcctcacccggcttctctggtcgctccgggttgaagaggggctggcccgaaacttcgtagcggcgctgcgagcaggaatgctcgacgcgctgatggtggacgagccgagccttgccgatcagcgcgaacaggtcgagcggatgtcagcggcagtggccgtgggtgggccgcttgcggaccttgacctcgcaagtcttgctgggcgtgatggctcaccacttcacctcaatttgttgacgctgcactctgcaaaggggtgcgagtacgatgtggtcatcatggtggggctcgatcttggcagcctgccatggcgtaacgaagcacctgcggcccagcgtgagagtcgacgtctgttctatgtggggctaacgcgggcccgcgatgaaatccacatgctatattctggtttcgtcgatacccgcttcgggaggaagtattggggacgctctccgttcctgaacgagcttgaggcgcgaatgcgggaagccgaaggcgactag

SEQ ID NO: 71832 - DNA, 2016 bp, Desulfatibacillum alkenivorans AK-01
atgtatctctcaaaaatcacaattgaaaattttcggtgctttggagaaagagacaaaaaatttgaaatgtctctcaaaccggggttgaccactttggtaggggaaaacgatgcgggaaaaagcgctatcattgatgccatacgatatgttttatgcacaactgaccaggaatggctccgaattaaggaaaatgattttcatgtcggagcaaacccgaaagaaatcagaatagtgtgcaagtttgatgaccttgaagcacaccaccaacgtgcctttatcgaatacctcacgcatgacgcttcgggtgcaaaacctccagttttctttctccactggactgcaaaggaaactggagaaatcatgaagggtcgcccctatcgtagaattgaacttcattcaggtgaaaaaggagaaggcccctcaatcgaccctaaggttagagaactgctttctgtgacctatttaaggccattacgggacgccgaaagggccttatcggcaggacgcggctcccgtctctcacaggttttatatcatactgaggaagtaaaatcctctgggaaaccatatggagaaggtgttgccaatgaggagctaagcgtcactggcattggtgagttggcagacgcccttataaaaaaccaaccaggtattgtggagacaaggaaacaaattgacaaccacttggaaaaacttacccttttgggcaatccaatctgcagtaaagtggaggtcagcggggctgcggcatccccggacgttcgtctaaggcaattgcttgagaagctcgacctctctctggatgaaattggcaaacctgggcttggttccaataatcttctgttcatggcttgtgaacttcttttgcttgctcaagaaaatgaaggaaacaggatgctgttaatagaagagcctgaagctcatctccatccccagcgccaattgcaggttatgaaaacattgcaagaggaggccgaagagaaaaaaatccagattatagtcactacgcacagcccaaatctggcttcggcaatcaaattgaaaggccttaccctgattcatgagaataaggctttttccatggcagagggagaaaccaaattggaaaaatcggactatcaattcctcgagcgatttctggatgttactaaggccaatttgttttttgcccgaggagtgatgatagttgaaggggatgccgaaaacatccttattccaacattggctaaattgatcggccgagacttcacggaaaatggtgtgtctattgtcaacgtcggaggagtgggactacgccgttatgcacgaatttttcaaagagtgcatattgaaaaggatgggctattaaaaataccggtagcgtgcgttactgatctggatgtaatgcctaactgtgctccagccataattgacaaattagataaggaagggcatgtgcctgaaataaagaaacgccagtggcgcatgaaacacgattacaatgaagagaaacctttggaacagaaatattttagtactgaacaaaaggcaactggacaatgcgtccgaacttttgtttctgatgaatggaccatggagtacaatttagcgataggcccacaagatgataatggagaatttccaggtggactgggatatcaaacatttgcagctgcctatttggcctctaaggatgactcactatacacaaacaaaaaaaccacctcccaatggcaagaagaaatcaaaaaaaactataaaaaaatcatcctcgaatcagaggcacaggatggatgccttgttgaggaagtaattgcctcaaaaatttacaatttttttgttaacaaaaaagcctcaaaaacaatcgcggctcagcacctatcatacatacttcaattgcatgttcaaagaggtgatttgtcagaggaccagttgagagcagttctccctacgtatcttgttgaagccattgaatatgttaccggcaaccttatccttgaaataaaggatgggaaggagggacatgatggagaataa

SEQ ID NO: 71833 - DNA, 2031 bp, Desulfatibacillum alkenivorans AK-01
atggagaataatgctcctttcgttcctccagagattacggatgcggacattgaatgggctacggagcttttaggccttcctaaaaatgcctttctgggagaggatggcgacgaccccaggaaggaagtcctaaaggatatgaccacctttgatgtgtctgcttgccccggaagtggaaaaaccactcttcttgtagcaaagctggctatcttagcaaataaatggagtcacagaacaagtgggatatgcgttctttcccatactaatgctgcgagagatgaaattgaaaaaagactcggctccagcgcagttggtcggcaacttttgaattatccacactacataggaacaatccatggcttcgtggaccagtttcttgctcttccctggcttcgttcaaagaactgtccgattaaaattattgatactgatatttgccaaaatttcagatggaaatatgtattttttcgaacttcaaaatggtcctcccaaatgcaaaaaattctaaaagagaagagtttaagaggggataaaatattaattcaatcttcggattttactcttactaatgtcaaatatggagaaaaaactaaactttataaagtaatgaaagattcatgcgtattgtcaacagagaagggctatttttgttttgaagaaatgtttatgtgggctaaggaactcatggataccaccccatcaattattttgactattcgcaaacgttttccattgtctttcatcgacgaagtgcaagataacagcgactctcagacagctattttacagcgtatatttactgaaaatggaaactctgcaatacagcaaaggtttggggatgagaatcaggctatctatagctctcctgagtcccagagtgctccaggaaacattttaccaattgatgaaaaaaataaaaaagttcttcctaacagtcatagattttgtcagcatatagcagatctgtctggccctctaagcatgactgcagacacttgttctcttgaaggccatggaccaaaatgcagacacatttcttgctattcggaagacggcaatcatacaatttttctttttgatgataactcaataaacagggtgttggacgctttcggtcatttgctcattgctacgttttcggacgagtctctcaggcatggggttttcacggcagttggccatattcataaacctaaaagagatgagccgaagccttgccacgttcagcattattggccggattataaccctgaattatgcaaaaaggagccaaggccatcgtctttactgcaatatatccatgtcggactaggaaaatcacaacgagcgggaatatctcatcctgcagccgaaaaaattgcggaggggctgttccgcttagctggaatgtcagaaaaccccacacgtgttagcaggcgtggattttgccatcgttcagtattgaaggctctggaaaaccgtcctaaggcaaaaggggtatatttggacttgttgcatagccttgtggttgacagaaatctgccaacaagggacgaatggaaggctcaaagccccatatattataaacttgcgtcaattattgcagaagcacctatcaataaacccgaagcgaacagttttttgcaatggcatgaatttgcagcaatcccccaacctgatgaagaacctacaacttgcatggataacatctatcgctattcccatgatgggagggaagtcccgattagggtgggatctatccattctgtgaaaggtgaaactcacaccgcgactttagttttagagacttactggcacaaacacaacttggaatcaatttttgactggatatgcgataataatgcagggtgctgcaaaaaagagaagcggaataatccaaggctaaaaacgcactatgtggccatgacacgccctacccacctcttatgcttggcgatgaaaaagtcttgttttgaggatcaagaaggaaaccttaatcaagaaaaaattgacaagttaactgaacgtggctggaaatatcaggttgtataa

SEQ ID NO: 71834 - DNA, 1806 bp, Desulfitobacterium hafniense DCB-2
atgaggattttctgtgttaaggtttctaactaccgaaatattgacggaataactgtcattttccacccggattgcaattacatcatcggggagaacaatctggggaagagcaacttcttgtcgctcattggcactgtttgcgccggcaaaggttttgacgagaaggatttcgcggaccccgataaagccatcgaggttgaactggatattaagctactccaaaacgagcagggctttttcggcgataacttttcgccggaagatgcctctttgttgaagattcgttaccgtcagactattaaagaagcctatccgacaattgtcagcgttgactcaaatgaaagcattcaggcgaggcttctcaggaaaatcaacttcttaaaatacgagaccacagctgtgccgagtcgggagttgaggcttgattcacaaaagggcgcggggcttcttatcaatggtattattgagagattcattgccgatggcgagcctgcatttcttaacgatgaacaaattggcggtttaatgaagtttatcaacgaacatttgggtaaaatccgtagttttcatgattattccattaaggctacgatagccccaaatccaacagaaatgctgacgagcctgttctatttgtctgacggctacagaaaaatcgatacaactggaagcggtgtccagtatatggcgatggcttcgataaatatcctatgccagattatggagttgtataaaagcaagtcatccccattcggggaacagctttatacagacgacgatggaagaaaactattgccgcttgttctgtccattgatgagccggaagttcatctgcacccatatctgcagaggtcactcattggctactataagaagattctctgcaatgaggacgtcaagtttgtagaattgttaaaaagttgtttcggtgtagatggccttgatggacagcttgttattgttacgcactcaacggacgcattggttggagattaccgcaaccttatccgttttcataaaaacggagacagaactgcggtcattagtggctatgccttgcgtccaatcgaaggagcgaataacgaggggcgaattaaaagcgaaaacgagaaacatcttattatgcactttcctgagataaaggaagcgttctattctaaatgcgccgtgctcattgaaggcgaaacggaatacggttgcattcacgcctttgctgacaagataggcgtggcgttggatgattgtggaatttgcgtgataaacgcaaagggtgaaaagtccattaagccgcttcgtcaattgcttacactgtttgccattccgagtatagccatctacgacggagatgttagggaggggcataccgctgccgctgatgaattcttcaccaacgaatcctgctacgaaatcgaaatcgtaaaaagtctatattcgcaaaacaaacaagatattgttaagcaaattgcaaaggaattagactcgcaatacgctacagttcctctcgatttcgactttgtaagcaagcattttaagaaaatgggcatagagctatattcgcaaaaaacatgtgagaattgtggccatacaaaaaaggtcaaagatgcaagtggttatacgcccagaagccttgctgatgtggacgacaatgatgaagaggatttttgtcgtatgtattcggcttggtttatggctaagaaaggggttctccttggacgcattgtcggtgagtctcttcctgtcgaacttataccagcttgttacagcgatgcgataaaaaaagcgcaggaggtggcttcgcatgtctga

SEQ ID NO: 71835 - DNA, 1809 bp, Desulfitobacterium hafniense DCB-2
atgtctgatgccaatcttgcagaaataaaaggaaaaatctcgtcccagcacgaaggcgacgaaaaacagcttgaggtcatcttttctggcagccatcgtctgattgtcgaggcacccgctgggtacggaaaaacgaccacaatgattagtcgcattgcctatctgtttgcttcgggcggcatccctaacccgaagcgtattctcggcttaacgttcagcgtaaacgccgcacttaaggtcaaacgggaagtcgccgagaaactccccgcgcttcttggcacacaaaacagccctatcgcaattagcgagaaggtaaccgtcacaaactaccacggattctgtaaaggcgttattaaaaaatacggctttcttatcgcagatgcactgcggaaggatgtcaatctattcagaaccgttagcgatagtgaaatagaaaggcaggcgactctgaaaacggctctgtcagcagatgaatacgaagaactcaaatccgtggaaatagcagtcaaagaggctcacgttcccgattcccagacaatccagggttacaacgagatagtcatcaagaagttgctgccgttggggtacattacccataacgcggttattttattcgtcttggagatgtttgaccgctttgctgaagtgaagaagttctaccagagctactatccgcttatcgttgtagacgagtttcaggataccaactgcattgcgtggaatttgcttgaagcgataatatcagagcgtacccagttgattttccttggcgacccacttcagaggatttacggcttcataggcgctttgccggacataatgaccacagtagcggacaagtacgggatgaccaaagtagctctctcgaaaaactaccgattccgtaataactctgaaatgcttaaattggacagaaatatcagagcaaatgcagcgacttgttttgaaccgaacattcaagatgatgatgtggcgagggtgcccgcattctgggggagtacccagcaagaagaggcacgacaggtggtggcaaaagtacagggtctgatgggcgatgggacggataaaatcactatccttttcagaggtcgtggtagaaacgccgaaatcgtagagactgaacttgctgataaaaaagtgccgtacttctatggtatgtttactgatgaagatgccgactacgttgattttcacaacaagtgccaagaaatgttcataaagaggttcgggaagtcaaagaacatcaataagaaagctctaacagctttttctgatcgcgtgaaaacggcttatgcatcagcaacagggaaaaccgttgattcgttacttcggctacttgatgcgcttgtcgagaaggtatccattgattactccgatcttttagcagatgataagtataatctgctgctggacattttcgagaatcggcagttgaaacaggctatggagtatgtggattctcaagtcattctctccaccgtccacggtgcaaagggacttgagtgggactatgttgtcctgtgcgatgtagagcagtgggtatttacgttcctgtgccgtgattgcccaagcctaagagcgagtggcaattctactgcttgccgattgccgcaatccataccagaccagatgttgaaccctctcctagatgatttatgtgtgttctatgtcggattgacaagagccagaaaacaggcattcatttcggcaagtggtgaaaggttcaatgcacggggacaacggtttaccaatggaaaagtgtgttgcttggctctggttcaaggtgtgaaactattacaacatacataa

SEQ ID NO: 71836 - DNA, 1872 bp, Methanosphaerula palustris E1-9c
atgtttttagaaaaaatctccatttcgggttataaaaattttaatgaaaattttgagatttgtttttcttcgggtctaaatgttctagttggagagaacggggttggaaaaagttcgattattgatgcaattcggttaatactttcagaagatgaatacggacgatcagggatttctgagaaggattttcatagaccattcgtcaaagattcagttgcttcaaataaaattaaaattgttgctcattttgacgaattatctgatttcgaagaaattgcatttttaccttggagagaagacaaaaatgaggctcggctttcattggtgattgatgacactcaaaataatcgaggacgatacaataggaaaatttgggggggggtatcgcaaagtaatccatatgaaaaagaacttgttgaactgataaattgtatttatttgcccccgttgagagatgccgaagcaaaattacgcgaaggccgtggatcccgtctagcacgattaatattgaatttaaataaagaagaatttttaaaagcaaaacgagacggaaaatctctaaaaattgaagaaaaagtgaattcattctataatgatattgtaaatgacaagaatgaacccatttttaaagctaatgaattgatcaagaatagtcttaaaaatgcgattggaactgtctttgggcaagatacccgaatacaattttcagaaacaaatattaatagaattattgaaaatctaagattgtttttctttccagaaataaaccaaaatggacaagaattcaactatagaagtcttgaagaaaatagtttaggatacaacaatctgatttatctagcaactgtgcttgcagaattaagacctatcaaagaagttgaatccgatgaaccagaatttttaaaaatattacttattgaagaacctgaagcgcatttacatcctcaattacagataaaattactgaagtatcttcagaaagagacagaaaattcaaacattcaaataattattacaactcactctcctgtactcgcttcagcggtttctattgacgccattattcatttatcgttcagtaaagataggaaaacaattgccacacccattagaaaatgtggacttccttctccaagtaaagcatttcttacaagatggcttgacgcaaccaaatcaactattttttttgcaaaaggtgtaatattagttgaagggattgctgaagcgatgctaattccagaactagcaaagagagtgataaaaaagtataatagtgaatataagacaaaattacctggaactctggaagaacagggaatttctgtgataaatattaacggaattaattttaagcatttcatgcaactattctgtaatattaatgaagattctcaacccgcattttcaattccattgaggtgcgttggaattactgataatgaccctccttcaaactctacacatctagaaccaattgaaggaaacaacccgatacttcaattggtcaatcgtataaataaatctgagaattctcgaatattttcaaatttaaaaacctttgaatatgacttggcattggaaggagggaatcttactcctatgatccaaatattcttaaaatgtctagatacgaacggaccaattcggaaagagttcactgattatttagaagtcaaatgggaagacgcttcccgtgatacaaaagagatagttgcgcaaaaattacttcttcgcatcgattcatctaaaatcggaaagggacgatatgctcaagaactcgcagatttattattgaaagattgtacatcatttgaaattcctaaatatatcaaagacgcgattaattgggtttgtgagataaaaaatgtctaa

SEQ ID NO: 71837 - DNA, 2010 bp, Methanosphaerula palustris E1-9c
atgtctaaaagaaaagaagaattatttcaacaaatttcatcgatactatgttataatcatcacttgtctcatgatgattgttatttacttcatagatattcagattctccatgtaaaaactataaaatgtgtaggattgcagaaaaaacacttgagcaacttgaattcatcgtacattctttaaatgaaaacagttatttaaaggcatgtccaggaagtggaaagactgaagttgttggtttaaaaactgcatatgagatcgggaaatggcaaaaaaaaacgagaggaattgcagttcttacatttactaatgcagcagttgatgtaataatcgagcgagttctccaatttaatggctcatcaggaatttctcatccccatttcataggaaccattgatagttggttatatgggtatattttaagcccatttgctcatctgattacccattatcctggggataatgaagatcggagcatcaaaataattgaaaattccagccaggctcattttttacaaaatcgaaaattttctatattttcccccacatttaaaaaaggtggcaaaatttttgcaaatcagtattatatgaatcctgaatgcgataagatctatttctcttctggaaatattcccaccgatacaatcagaaataattcctccctaaccccaggattagtagagaaattgagtcggatgaaacaggaattttggaaatctggatatcttactcatcaggatactgaaataatttgttataatttattaaaagaaaatatagagatatgcaaattaatcgtaggtcgatttaatcatattataatagacgaataccaagatatgtcaccaataaaaattaaaatttttaatttattggaaaatcaaggaactgtttttcattttgtcggagatatcaatcaatcaatttttaattataacaacgtaaattttgaaaaaaattcccaactcactcaaaaaagagaaagcaaagtttttttgttaacaaaaaattttagaagtgttcagagaatcgtagatacttgtagcaaaattgttaacaatactgaagatataaaaggagaagatgataaacccagacaagaccattgcttagtttttagttataaaaaagatacaattccagaaatatcaaatttatttgaaagttatttatcgagaaataattatgatgtaaaaaaatctgcaattttagtaaggaataactcaagaaaggaagtaatactcggacaagttgtatccaacattccaaaagcaaaggtccccccaattgcgatttatttctggtctcaaatggatatcagattgaaaatagagtcgttaaatttgataggaaaatatcttgcagcaaatctttttttcgacaaagatcttaattatcgaaattatcattgtccaagagaaattaaaaattatcaatggagaatttttttagcaaatgtattagaaagttgcaacaaatcagatgtaattgcagatttttcaaaaaaatggacagattggaaaaataattataacagtatttttcctaaaatactcgaaaattatcaaacacaatacgattggatagattcatcaagatttgataaatccaagattaaatccgctcctaataatgaaaaagattcgagggtgatagatacaattggtacaaataaaccgcaattaaactctgagaaatcaatccaagtatcaacaatccattctgcaaaaggaaaagaatttgatgcaattctgttgttttcatctgatcgttcctcgtcatcaaaagaaggtagtggatattgggaagactggcttaacataaaaaatgccaaaggtgaatcagcacgtttagcatatgttgccagttcacgtccaaaatttttacttgcttgggcaattcctgaaaaagattacaaagatcataataaaattgagaaattaaaagaatatggatttgtcccagcgggcccttttaggaatgaagaatcattgtttagttttaattaa

SEQ ID NO: 71838 - DNA, 2025 bp, Thioalkalivibrio sulfidiphilus HL-EbGr7
atgaagctgcgtcatgcaaagatcaagaacttccggttactcgcagacgtgcagcttgctctggaggatttgactactgttgtcgtggggcgaaacaacagtggcaaaacttcactgtccgagatcatacggcgactactagccgaaggcagcgcagcatttcaactcgaagatttctccagtgcctgctacgacaggttctgcacggcactggaagctcataataatggccaagatgacgatgtagtcagggctctgattccgttcatcgagttgcgtttgacgtttgaatatgaccctgctcagccacagttggggcctctcagtccattcgttatcgacctcgaccccgactgtaatgaggtactcgctgtagtccgctacgagttgaaggatggacagctcgcccaatttttctcgggtcagccggatacccccctgaccgatgaaacgaggatagctttctttcgctcgcttcgagaacgtattccaaccagctttgccgtcagggtatgggcggaagatccgaatgatgcggagaacaatcgtcagttgcagccgagtgcactgaaggctctgatcaaaaccggcttcatcaacgctcaaagaggcctggacgacataacatcccgcgagtccgatgtactcgccaagactgttgaactcctctttgccacagcttcttcatcttcggcagatgaggctgacaaacagattgcccaagcgctgaaagaggccgttcaggacattcaatctcagatagacagcagcttcggcggccaactgaacaatctgataccggcattgaagaactttggatacccaggattgggaaatcaggaactgcataccgagacattgcttgatgttcgcaagctgctctccaatttcaccaaggtgcgctatgccggctacagcggtgtgactctgccggagtcctacaacgggcttggagccagaaacctcattttcatccttttgcagcttgcgggattctataaatcgtttctggccgaaccaaattctccaggggtgcacctggtcttcattgaggaacccgaggctcatttgcaccctcagatgcaggaggttttcatacgtcagctcgcgaagactgctcaactgctggttgaaggcacggaaagtaagacggcttggccggtccagttcgtcgtttccacgcactcatcgcatatagccaacgaggccggatttgaaagtatccgctatttcctcagtggcgaagtacaaggcgcagccgctggcgttcggcaaacgagggtcaaggatctacgcgaggggctggacggcgtttccgaaccggacaagaagtttctgcatcagtatatgacgttgacccgctgcgacctgtttttttccgacaaagcgatcctagtagaaggtttgagcgagcggctcttgctccccgcgatcatcgaaaaactggaaaccgcagagccagatcggccaaagctatcaagccagtacgtaaccactatggaagtcggcggagcatatgctcatcttttcttcgggctcctgcgctttcttgaattgccaaccctaatccttaccgatctagattcggtagaaaaaccgggcggaagcgcgtgcgaggtccacaagggaacctactccagcaacgcctgcctgaaagcctggttctccgatgataatccattcaccctcaatggcctcttgaccaaggatgaatccgaaaaggcaaagcatggcaactgcatcgcctatcagtgcgcggaggaagagaacgggccatgcggtcgcacctttgaagatgctttcattctcgcgaaccgagcattattcggcttgaatggagccacacgggaagagcttgaagcgggagccagaagccaagccagtaagatcaagaagtccgagtttgcgctgaagtacgcaatagaagaaaaagcctggacgacccccaagtacattctcgatggaatacgctggctagcggctggcatcgagccagccatccctgacccaatccacccaagttaa

SEQ ID NO: 71839 - DNA, 1740 bp, Thioalkalivibrio sulfidiphilus HL-EbGr7
atgcctgatccgcagtcaccggccgaggttgccagccagcgcgctcttgatgccatgtttcgcagcctggatgccggagagcacttccggctagaagctggagcaggcgctgggaagacctactccctcatcaaagcgctccactatttgatcgagcgccacaaaagcacatttccaaggaaaaacaagcagattgcgtgcattacatttaccaatgtggcccgcgatgaaattgccgcccgtactgacagaagcccaatggtgtactgcgacaccaatcatgccttctgttggtcattgatcagtggcttccagaaacaactccgtggtttggttgaggcgatgccggcatggcaagagagaattgcggaagctggaggcggcctgggtaaccgtgtaatcgagtacaactttgggcaccgctccattcgtgaagatcgcgtgtctctccatcacgatgatgtgttgcccctcactgtttcattgatggagcatgccaaatttaggcatatagtgacagatcggtttccaatcattcttgtggatgaatatcaagataccgataaggattgggtcgaggcgattcagcggctgtttttggggaatccgccttcacccctattcggcttcttcggcgaccattggcagaagatatatggcaatggatgcggaagacttgagcatccgcaagtcaaagagattggcaaggaagccaacttccgatcagtcaaagccattgttgactgcctcaaccggatgcgcccggagctacaacaatttgtcgaagaccctgacgctattggacaggtcagcgtatttcatacaaatgcctggactggaggacgacaaaccggtgcccattggggaggagatttaccttcggaagtcggccacgacacacttgagggagtgaaggcctcgttgacacaagagggatgggatttttccccggaaagtacaaaggtactcatgctgacgcataggcttcttgccagtgagcagggctatgccagcttgccatcagtctttcgttacaacgattcctttgccaagaaggaacatccgtatattgccttcttcgtagaccagttggagcctgcgtgcgatgccttctccgcgaataggttcggcgccatgttcgatgcgctgggcggtaacacgccgctattgcggagtcaggccgataaggcagcctggcacgatgcgatgagccagctactggcgattcgcgaaaatggcacggtcggagaagtcatcgaccacctgctcaaccggcggaagccaagactcccggaagccatcgagaagcgtgagcgggaactacgcgagttcgatcgagcaagcggcgaagagatgccggccgcactggcggagatagagaagctacgcgcggtcagatacgcagaaatcaaaacgctacggagctatctggatggtcactctccctttgaaaccaaacacggagtaaagggcgcggagttcgagaatgttcttgttgtcatcggtcgcgggtggaaccagtacaactttggagagatgctcgaactggcaggaagcgcagccatcccacccgggaagcaggcggccttcgagcgaaatcgaaacttgttctatgttgcctgctcaagaccgaaacgccgccttgccctgctgttcacacagcagctttcgccagatgccatcgcaacacttgaaaggtggttcttgccagagagcatccgtgctgtcgctttttcgtag

SEQ ID NO: 71840 - DNA, 2058 bp, Caldicellulosiruptor bescii DSM 6725
gtgtatattgataaaataaaaatcagaaattttagatgctttggtcctgaggaaacagtaattgaatttgataagctaactgctttaataggtgcaaatagctgtggaaaaacagcagttttacatgcattaatgaaaatatttgggagtgacaataaagagattaaacgttctgatttccatgtacctaaaagcatggatccgcaagaaattgaaaataacgacttatacatagaggtaaaattaagttttccagaattgcggcaagagaatactgaactcaatagtataccatctttttggaattatatggttattagagaacctggcgttttaccatatgtaaggatatgtttgaaatcttcatggcaaaaaagtaatactcctgatggagatattgaaacagaaatattatttattaaagccccggaaggtagagaaaaagacagcgattacgaaaaagcaaaacgagagcatttatcaagaattctatttgtatatgttccggctataagagatgtctctcctcaattaagaaatgtttcgaactctatactctggaaaatactcaatagcatagaatgggaggaagatttcaaaagtaagataagggagaagacggaagagattgacaaactttttgcaaaaaatccaggagtatctttagtaaaagaaattattagtaatacgtggaagaaatatcatagggattataggtataaagaggcacacatgcgttttagtaggggagacttggatactgttttaaagaaagttgaaatagaattttatccaacttctgaacctaagtcttatacagtaaatgaattgggcgatggattgcgctcgctattttatttaacattggtaaattcccttcttgaatttgagaatagaatcctacagtcaaaacattcttctaaaagtccttttaacaaagaaccttcgacacttgttttgcttgcaatagaagagccagaaaatcatgtttgtcctcatttattaggacgtattatggataacctaaaagatatttcctcaaagcaaaatgcacaggttatacttacttcacattcggcaagtattataagtagaattgagcctacagaaatacgtcacctaagaataaaaaatgaggatttatgtactaaagtttcaaggattattttaccagaacaaattgatgaagcatttaaatatgtaaaggaggctgtaaaagcttatcctgagatatacttttccaggttggtaatattaggtgaaggtgatagtgaagaactaataatcaagaaaatgattgaaaagagcggtttgtcagctgatagctgtgcaataagtattgtgccacttggaggaagatttgtaaatcatttttggagacttctgcaagatattggtattaattatataacattgcttgatatggatatcgaaagaaatacagggggatgggaaaagttgcattatataatgaatcagcttatacaaagtggctatgatgaaaaaagtgttttagcagatttatctaaagaagaatttgacaatatgccaaattggtcatatgacgaatatagcagagagaaaatagaaaagtttgcaaaacatcttcaacaatttgatatatttttttcatttccacttgatatagatttttcaatgttaagtacttatgaggaagcatataaaaaacttatacctaaaaaaggtggtccaagaattcctgataaaattacaaaaaaagaagactatgcacgttatattgacaatgttgtaaaaagtgttttgaaatcagataatgctactggtataacttattcagataatgaaaaggagttgatggtctggtataaatatttatttttgggtagaggtaagccaaatactcattttcaagctttgatagaacttggggatagtataaaatcaaacatgccagatgtttttaaaaaccttataaacagggctaaagaattattagaaaatgacccctactctgatatatctaatttaggagatgaaaaatatgctgataccaaaggaacaatggaaacctgctga

SEQ ID NO: 71841 - DNA, 1926 bp, Caldicellulosiruptor bescii DSM 6725
atgctgataccaaaggaacaatggaaacctgctgatggaattgaacttgaaaaaaatgcagagatagtagttaaaagtaattgcaactatttagtaatagctggacctggctcaggtaaaacagagttgcttgctcaaagggcttgttttttacttcaaacgggtatttgctattcaccaaaaaggatacttgcaatcagctataaaaaagaagctgccaaaaatttagcagaaagggttcaaaaaagatgtggtcagaaattggcgaatagatttgtatcactaacttttgatgcttttgctaagagccttttggatagatttctgtatggacttcctgaagtatacagacctgatgttaattatgatattaatccttctgtattaagagaggggaagcgaagcattttgttaagatttgagggaaaagaaccgaaacatttacttacaggtgattatgttgatggaattcatagtctttcaatagaaaatattattaataaaaaaatgacagataaaaagcttccctttaataatgaacctaacaatttagaagaatggatgattaacgaattatggaaattatttttgaaaggagataaagattttaaacctgctctgacttttccaatgatttcaagacttgctgaatatatcttgagggaaaatccttttgttcttaaagcattgcgagcgacatattcacatgtatttttagatgaatttcaggatataacaggagtacaatatgatttattgaaaacttgttttctcgggtctaatgccgtaataactgcagtaggagataataaacagcgaattatggaatgggcaggagcactaagaaattcatttgaattgtttgaaaaagatttcaatgcccaaagaataaatttactgatgaatcataggtctgcgccgcgtttagttgaattgcaaaaagtttttataaaagaagcatttggtgaaaaaatagatttgtccgatttaaaaatagagaatagcaaaaaatggagtaaagatgatggaatatgtgaagtttggatttttaatgattatattaaagaagctcaaattttatctgaaaacataaagaagtggctaaattcagaagatttaagtcatagagatatttgtgttttggtaaaacaacgtccttctaaatacacaaatatgctgattaaaacattagctgaaaatagcatgaatgcaagagatgaaggcgaagtttcagatttattaaatgaggaaataattcagtttataattaatttattttcattagcattaaatattaatggaaataattcatacacatttgtatacgattttataaaaatattaaatggatatgatgatgacactccagagaggtttttaattaaacttgaatctgaaataacagagttattgaggtttgcaaacgaaaaactacttaagattgataatcagaaacaaattgtagaattatataaaattataattagatatttaaaaatggatagattaatatcctattttccgcagtatagaaatacagcatggtttaatgatttaatgaataagtctattaaattattgtggaatgaatttgaaataacaaataattggtcaaaagcaataactaactttataggaataaacagtattcctattatgactattcataaaagtaaagggctcgaatatgatactgttgtattcattggtttagaagattcagcattttggagtattaaaaatcaacctgaacaagatacttgcgccttttttgtagctttatcgagagcgaaaagacgtgtaataataacttttagtaaatatagagatgtcggagcaaatccttgccaaactgcagaaaatgttaaaaaattttatgaattacttgccaaatcgggtattgtagaatatagagattttatgtaa

SEQ ID NO: 71842 - DNA, 2067 bp, Bacillus cereus 03BB102
atgtacatatctaggttgacactaaagaattttcgaacttttaaaaatgagactactgtccaatttcatgaaggaactaatgtgattgttgggcataataatgccggaaaaacaactataataaaggcattagaattgctttttgatgctaataaaagcaaacgactttctattgatgactttaataaaaatacaacttgtgaccaattaaaagaatctgctcctaaaataaccatttctgcgactttagtagaatcagaaaaagaagaaatctattcagatgatttagttacagtatcaacgtggttaaccaaattagaaaaaccatatgaagctaaattaacttatgaattcttcttaccagaaaaagaattagaagattattataacgatataaggaagattgaaggaacgaatattaatgattattggaatgaaataaaaaataattatttacgaaaatatgttcataaaatctatgtgggcaatattgaaaataagaatttaatagatacagatagtataaataagtttgcatttcaattcttaacagctattagagatgttgagcgtgatttatttactggaagtaatacgctgttgaaagaagttatcgacttttttatagattatgaaataaaaacagatatttccattaccgatgaagagaaaaaaattaaaattagggaaaagaaagaattattttctaaaggtgcccaatctctcattcagtctcttcaagatagaatgagagaaggaaaaaaacatatgcttcaatatgtagaaaacaccggagcagcttttgataagatgcaaccttcttttgaaggaggaattctagatacagaactgtattctgcactgaaacttattgttgaaaatgaaacaggaattaaactaccagcagttaataatgggctaggatataataatttgatttatatttcattgttattagccaaaatgcaaaaagatgcttcaggagaatatttaggaacgaatgcaaaagtatattcaattctagctatagaagaacccgaggcacatttacatccaaatatgcaatataaatttttgaaatttttaaaacaaaatcgagaaacagaagtaagacaaatctttataacttcgcattctcccagtattacagcggctgtggatttagatgatattatcgttttgtataaaaataaagaagagacaaaggttgcatatccagggaaggtatttaatgagagtccagatgatataaaatcgaaaaaatatgttaagagatttattgatgtcacaaaggcagatatcttttttgcaagaaatttaatatttgttgaaggattagcagagcagctagttattccagaatttgcaacagctttaggatatgatttaacggatactcatacatctgtaataaacattggagggcgttattttgaacattttttaaaattgttcgatacttctaaaaatcctaacgcaattgaaaagagaattgcatgtataactgatttagatcctgttagaaaagagaaaggtcgtaagggtgccaaatgggttacttgctcagtattggcattaaataacgatatagaaaaatatgattataattcatgttcaaatctttttgttaacaaatctaaaagtaactctagtaaccacataaaaactttcacccaaaaggaaaatgaaagctgtacatttgaatacgatcttatacttcataatataacttgcgagaaattgattacagattcaacttctaatcaagaagaaataagagatttaatgcttgcatataaagaagataaatcaattaacgatatgttagagtatataaaaaacaaagaatataaagcaaaaaaggagattgagctgcaaaatactccaattttagatgatgataagaaaaaacatattattgctgatagatatttaatgtcaatatccaaaggtgaattagcacaagagcttgcacatgaaatttcaataatggaaccatcagataacatgattgtttgtccaatttatataaaagaggcgataaaatggatttgtcaaccgcaataa

SEQ ID NO: 71843 - DNA, 1716 bp, Bacillus cereus 03BB102
atggatttgtcaaccgcaataaaacttaaaagtagtaatgataaaattcagatagacaatcattttaaactatgtgcaggtccaggtgccggaaagacgtcgtttttaataaatcatataaatagtatactctctcattctacaaggttatcaaaatcaagaagagtagcatgtattacttatacaaatacaggggtagaaactattcttagtcgcttaaataatatgactaatgagattgaagttagcactattcatagctttctatataaccatattgtaaaaccttatttatggttactagatgatattatatttcctttagataagttagatggtcatgatgatattaaacccggatacactttattaaagacatataaagaaaagagtaatcaaaattggattacagataatcaaaaactttcaaaagcattaaataaattaacttggtatattaatgaacaagatgtaatagaattaaagtttttaaaatcttatcatggaaaattatcggaaaaaacaagtgtaaaaagagattcttatatgttatataaggagctttgttgggaacaaggattattgagtcatgatgatgttttatattttagttatcttcttataaaacgaaataaaaagattagagaaattataagagcaaaatttccttactttttaattgacgaattccaagatacaagtcctttacaagtagctataatcaaattgttagctaaaaaagaaatggtagttggggttattggagacccttgtcaatccattttctctttccagggggctaatgtaagtactttcagtcaattttatttagagaacatgagtttatatgtattagagaataatcatagaagtactgagcaaatcatatctgtattgaattatgtgagaaaagatgaacattttgttcagcatagtccggataacaaattaggaaacaatccaactatattagttggggatgctcttacatgttattatcaatttaaacaggactgtaatgatgaagaatggtgtgttttagcttatcggaatgaaacaactaatggtattgaattcggtatagaagatttactattagatgatattaatgatttattatataaagatggaaaacgagggaaaatgatttattttctaatacatggaattgaatatgggagacagttaaaattaaaagaggcactcaaatttataaaaaaagcgtataaagatgagaaggggtttatggaaaaagatgcgattaaggttttaaagaatctgctcaatgaatatgaagtttttaattctatgagcattaaggaattttataacacatatatttttaatcaatatggagtaaaaaaacaaattaagtcgggtaatattagtgatttttatcaaaatctgaagtatataaacatggctgccctagtaaatgttgctgatgatgcaagtcttttcaaaactattcataaatcaaaaggggatgaatttgataatatattactaatcattcctgaatctaaatatcctacgtttcttacttttttattatcaccagatatgaataaggaggagcatagagtatactatgtagctttaagtagggctaaaaagaatttatatgtaaatcttccaaagctttctgaagaggaaatgaaattaataaagaattttgataaaaaaatacttagtaaggaattagtaattaattaa

SEQ ID NO: 71844 - DNA, 1848 bp, Acidobacterium capsulatum ATCC 51196
atgcgtgtacgacggttgaaaatcactcattttcgtggcgtagctgaaggctccgttgacttcactgggcacacactgctcgtgggcggcaacaacattggcaaatctacgatttgcgaggctctcgacctcgttctcggccccgagaggctattccgacggcctgtagtagatgagcacgatttccattgtgggcgctatctagacaaagacggcaaccccatcgagattcgtatcgaggcgacccttattgatctgtccgacgaagctcatcgtagattccgcggccatgcgcgccgctgggacgataagaaatgttcctttgtcgatgaagagcccgaaggcgtggacaaggccgataacgacggcgttatctgggcgcttccactgatcttcatcggtcgctatgacaaggacgaagacgacttcatcggcaatacatttttcgatcatccgaccggtgaagccgatgcgttagacgatgagcttgagaacaagctgggcagtgggcgggtgccgttcactcgcgctcacaaacgcctgtgcggcttcgtttttttgcgcacacttcggaccggatcgcgcgcgctaagtcttcagaggggctcgctgcttgacagcgtgttgcggctgggtggttctggttcagtcgaaatgtggcaagacaccctcggtcggctacaggcgttggaccctgccattggcgatattgcccagctcaaacagatacgcgatgagattcgggcgcgcatggggcgtttcgtgaatcttgcagacggtgacgaatcaactggattttttgcttctgatctcactcgcgaacatgtgcgtgaagtcgtgcggctgttcattgccgcccaaccgggcaaacatcttgtacctttcgctcgcctcggaacagggtcgataaatcttctggtcttcgcgttgctcaccttcattgctgaactcaaagacagacaatcagtgatttttgcaatggaggaacctgagattgccttgccaccgcatacacagcgacgcgtgacccgctttgtgcttgccgagatgggacaatccattgttacttcccactctccctacgtcatcgaacagttcgagccgacacagattgtcattcttgaccgcgaccatgatggtcaactgacgggaaaaccgattgaccaaacggcgatcaagcctaagagttttcgcgtagagcgtcgtcagtttgccgaagcaatcctgagtcgagccgttttagtggtggagggctcgacggaagcatctctgtttcctgttgcctccacggtgctggaagaaaacctgccgtcagacgactacatgcacttagacctcgcaggcgtcacgatcttcaatgctggaggcgacggtgccgtacctcgctacggggcaacattttctgctctgggcaaactatctttcggattctatgacaagccgaattcaccgttgacggacgacgctgtcaagaatttggcgaactacacgcaatactgggagtcgccgaagaaaggcatcgaggcgctactgctcgacgagatgccgatcgtcgttgtgcggcgcttccttgaggcggtgaaggataggtccgactatccgggcgagccgaagtatcaggaagcaatggatgagccgactgcgctcagtctcgcactcaaagtgctcaaagctcgaaagggcgatgcctacggatacgccgccctgctggttggtcattgtgcgaccgccgaggaattaccaaagaccatccgtgaaatcctcacgactatccatgacaaactgcaggctgttcctgaggacctcgacgctccttcactgctcgcgcccgaggcctccgcagaatga

SEQ ID NO: 71845 - DNA, 1701 bp, Acidobacterium capsulatum ATCC 51196
ttgtgtgaccaacgcaaagcaatcatcgcggagccaggtcacctgctggtattgggaggtcctggatcgggcaagacaactgtcgctcttttcaaagcgaagcaacgattttctacgctcaagccaagtcaggaaatacttttcctgagcttttcgcgtgcggcgatccgccaagtattgctccgctgcaaggagatcttgaagcccgcagagcggcgcgcagtcgcggttcaaacgtatcactccttctgtatggatatgcttcgtgctcacggaaggctcttattagggcacccagttcgcttcatgtatcccggagatgaacgtcttcagaaagctgcctttgaaggagattgggaagcagagcgtcaacgtcaagccaaagagatgggcatcttttgtttcgatctttttgcgcagggcgcggcggagctgctggagcggtgcgccgcccttcgcaagctgattggcgatagcttcccgatgattattgtcgatgagtttcaagacacggacgacaatcagtggcgcatcgttgcgcagctcgcgaaagtcgctgacattttttgtcttgccgaccccgatcagcggatttttgactaccgagatgacatcgacccgttgcgtattgaaggtcttcgtaccacattggcgccacgcgagttcgatctgggaggggagaaccatcgaagccccaacgccggcatcctcaactttgcaaatgccgtgctccacaatcaatcaccgcttccagatacttcggacatcatgcagcttcggtactggcctcgtgcattcgcctcgactgttcacgcatgtgtggtcttcacgttttcggagctgaggaaactcggagttgagaatccaagcgttgcagtcctttcacgtagtaatggattgatctccgatgtctctgccatccttgctgagaagcatgcctacaacgggcgagagcttcccatcgtcgagcatgacgtagtctgggacgctgagctttcagccgcggcggcggttgtcgtggcttccaccctggaatggcctacggcggcagcggaggtcgcggtcgcacgaaccctggctctcattgctgcttactacaaactcaagaatgcagaagagccgactaaatctgctgcagaagcggcccagaaatatgaggcagcggcttctaaggtggcgagtgaggagacaccacgtattaaggctgcgaaggagctattggcagcccatcagagcggtatacaaatggtcggcgaccctgttgcggattggaaatccgcacgtcgcgtgttgcaggagatttctgctttgggtgaactgtaccgcgaggtccgactcgttcgactattccgggcaacggatgcgctcgccagcggattgagcaacagatggctcgccacgggcagctatgaaggcgtcagcgatctggtcaaaggcatcctcgaacaagagaaactgattgctgttgagcgtgacccgcgtggttgcatccttatgaacatccacaaatcgaagggaaaggagtttgacggcgtcgtactcatcgaaggggctttcaaatcccatttcttcgatgagcggaaggaagtatccccatatgagcgtagccggaggcttctgcgcgtcgggttaactcgcgcacggcaccgagttacgattcttcgcccccaaggtgcgcgccccttagtcgatcccatctga

SEQ ID NO: 71846 - DNA, 2304 bp, Burkholderia glumae BGR1
gtgccggcaccggcagcactctcgtccggcagcattacgctacggtacgtcgaactgtgcaagttccgacgtctggggaaggttcaactggatttggacccgcagacgacgattcttgtaggcgccaacaacagcggcaagaccgccatcctcactgcgctacggcacttcttggccgaatcctcccccttcggcgcgttcgacatcagcctgtcggagtggcccactctgcgtgcgctgggtgtgagatgggaagccttgacggaggatccggtgactgccgcgccgaacgagggcgacaactgggaagaccagctcgcgacgctgttggcggcgatgccgacgctggatctgtggttcgacgccgaggccgggatgttccactacgtccaccccttcttgtccaagctggtctggaaaggtggcgctgttggggtccggctacgcctggagccggccagtgatgtcgcgtcgctcaaagaactggcctggtcctataacttggcgcgccaacccgtgaagggcatgagcagcgaatcgctagcctggccgatcgacctgctcgactactggctacgcgagcccaagaaactggggcaggtcaggccgtacagccttgatgccgccaacaaccccatccaggggatcaagacttaccggacccaggccctggcgtcggacgcgcagccagccgaccgcaaacatctggccaagctgattcgcgtcgacttcgtggccgcccagcggggcctcggctcggaagaggccgactccaaatccacgtcgtcgtcacatcccgtcggcctgttctcgaaccagctcctgaaattcgcgcgccagcacctcaacgtcgccgttaccgggcacgggcaacgcgccgacctcatccaagcggtcgcaaatgcgcagaaggacctggaccagaagatccacgatgccttggcctcctcggtggccgaggtgaagctgctcggctaccccggccttcacgatccccaagaaatccgattcaggacgcgcatccacactgccgatctgctcgaccacagcaccgccgtccagtacagcatgaaaggcgggaccggcgaagacatgctgccggagttctcgatcggcctgggctatcaaaacctgcagtcgctgagctatcagctcgtgtcgttcaagaccgcacgcatgaaccctgagaaaggctcgccgccgccggtccacctcgtcatgattgaggagcctgaggcccacctgcacgtccaggtgcagcgcatctttccggacaaggcgcacaagctcatcagcccaaccgacaaggatgccagcgcgctgcaaagccaattgctgatcagcacgcattccagtcatctcgcgcacgccgaggacttcgacagactgcggtatgtgcgacggattccaccctcggcggtccatcctacgccgagcaccgaagtcgtcgacctgggcgaggtgttcggcgacgacaacgaaacgcgtcaattcgcggaacgctactttcgcgtgcaacataccgatttgttgttcgccaacgccgccctgttcgtcgaaggcgttgcagagcgcatgctcgtgccgctcttcatggagttgaagtacgatagattaaacagccgctgcgtctccctcctagacatcggaggcagccatgctcaccggctgaggcccctggttgagaagcttcagattcccaccgtcgtcatcaccgaccttgatccgaccgagaagaaggctggtcctaaaggcaagatgcgctggatggccacggcaaacacaggccaggcgggcctcaggtgcggcaacgccacgcttcgcgaatggcatcccagactgcaaaacgtggacgacttcaaggcgccaacgcccgcccaactcatctggatcggtgcccacgattgcaaggtgcggttcgcatggcagttgccggtcgccgaggcgggtaaccaatggccgacgacattcgaggactcgctgatactgaccaacatcgattggttcaaggggctgaacaagttagctgaagaagccgcggggcaaggcgaggaaaggaaggtcaaactacctaccggcgcactggccgacgcggccgacgtcgtggcaggcgccgccacccatgcggacttactgaacgccctgcacgcgctgatgcgtgattcgtttagcaagggtgatttcgcggccagcatctttgagcgcgtcgccgccggtgaaaatgtgacctgtcccaagtacatcgccgacgccctcacctggctgcaggacgagctcgatcccaccgaaagtgtgatgccatga

SEQ ID NO: 71847 - DNA, 1959 bp, Burkholderia glumae BGR1
atgacctgtgctgccgcccatgaaggtaacgaccgcgacgccggcgtcgtcgaggaaatctgtggatacctgactgagccgccgccgcggagcttcttcctattcgcgggagcgggctcgggcaagacgcgaacgctggtcgaagtgctgcgccggctgaccggcgttgtgcctcacgaaaggggtggaaggctggccaaccgcctgcgcctctacggtcggtcgatccgcgtcgtcacatataccaagaacgccgttgcaatcatcggcggccggctgggcagcaacgacctggtcgccgtctcgaccatccactcgttctgctgggagctgatcggcggctttgacgaggacatccgcgcggcgctaattgccgacaaggcggtgcagctcgaagatgccaaaaccaaggcggcggccaaggtgaggggcatcagtgatactgaccgcaggaaattcgccgagatcgaggcggagatagaagccctgaggggcgtgccgacattcatctaccaccccgacaaggacacctacggtgaaggtgccatgcagcacggccaagtgctggatgccacggcttggctgctgtcgaacaggccaacgctacgaaccatattgcaagatcgccaccctatcatcctgatcgacgagtcccaagatacgatgaagtcggtgctggacgtgctaatgaaactggcggaacccaggggcagcggcctcacgctcggcctcctcggagaccaccgccaacgcatctacatggatgggcattccaacctgcccggcctcgtgcctcccggctgggccaagccggagctgaagatgaaccaccgcagccagcagcgagttgttcagttcatcaacaagatatgggcggcgaacctagcggggcgtacgcaacccgcctccggcatcgaacagcatcaccgtaccgagaagaccgggggcacagtgcgcctgtttgtcgggcgtacatccctctcgacaccagaaaagcgtcagaaggaagcctgggttgcatcacagatgcagcaggcgacccaaagcgatgcgtggacgacgcctgccggctatcagtcgcttgcgctggagcacaagctcgttgcggctcgcggtgacttcttgaatgtctacacagcggtgacgctcatcgacccgaacgccgccgcaccgtcgggcaggggtgagaacactgggccttcagccgctcgactggtgcttcaggatctcgcgcagctcgcggtctgcgtggctgcggacggtgccgtcgacgatttcacggcaacagaggtgctcaggcgtaccggctgccttgatcaactcccatctgatgccaatcagcgtatcgcgcggacagaggagatgcacgaggccctcgcggcgttcggggcagcgtgcgtcaaaccagacgctaccgtcgctgaggtcgtcgcgccgatcatcaaggcgcaggtgttcaaagtggacgctcggctgttgcaacagtttgccgatccgaccccaccgcccgctgctccgattccacgcaaggaaaccgagacggacgacgcacgacggcggagggggtggtgtggattgttcagagcgccatgggccgagctggagcggtaccggcgctacctggccggcaactccgaactcgccacgcaccaggtggtcaaggggtcggagttcacgcatgtcatggtggtcatggacgacgaccagtctggcggcaaccaaatctcttatgacaagctatttggcgcaaccgaactgggagagcgtgactgggacaatgtccgggccggcaaagagacgacgatcgaccggagcctgcgactgctgtacgtcacctgcagtcgggcccgcgaatcgttggcgcttgtcttatgggctgagaacccgaccgaggcgctgaaattcgcgcgggaaaggagcggctggtttgcaacagaggaagtcgtagagatcgcttag

SEQ ID NO: 71848 - DNA, 1890 bp, Methylobacterium extorquens AM1
gtgacggccttcgtcggcaacaacggatcgggcaagacggccgtcctggcggcgctcgggcggctcttcggggtgtcgccgtcgcagaggtcggtccgcaagggcgacttccacgtcgccaaggaccgcgacggggtcgagcgggacgccaagctggtgatcgattgcgtcctgggtttcccggatgcgggcgaggaagggctcgatgcgggcgtgccggaggtcttcggccacatggcggtggcggggccgggcgagcccatgaagctgcgcatccgattggaggcgacctggagcgatgacctgacctccgagggcgtggtcgaggaggacatccggtgggtcccggctatcgccgaggattacgtctgggagacgtgccagcggatcgccccgctggagcgcgggctgatccagctcatctacgtgcccgcgagccgcaacgccgccgatcccgtcacgtcgctcctgaagggccggctctggcgcgcggcccggtggtcggaggagatgaccggctcggcctcggaggccggcaccgcgctccaggccctcttcgaccgcgaggccccgtcgcgcttcatcgccgagcggctagagcggcgatgggacgaggtccatcgcggcgacaccacggcgcgacccgtcctgaggctggtggagaaccagctggaggacctcgtccgacaggccgagttcgtgttcctgccagacgagaccgggcatgcgcgccacctgcacgaactcagcgacggccaacgctcgctgttccacatcgccctcacagcggcgacgcttgagatcgaacgggacgcgttcgcggcgccggcgggggacgggcccttcgagcgggacaggctgcgacggacctacctgacgctgctcgcgatcgaggagccggagaacagcctgtcgccgttcttcctcgctcggatcatgtcccaggcgcgggacatcggcggcatggtcggggcccaggtcatcgtgtcgagccacagcccgagcatcctcggccgcgtcgatccggaagaggtccgctacgcccggatggcgcccgagacccgcacctcgtcgatcaggagcctgtcgttgcccagcgacgacgtcgatgccgcgaagttcgtccggctcgcggtgaaggcctacccggagctatatttcgcccggttcgtgatcctagcggagggagaatccgaggccatcgtactgccgcggatcgcacgcgctatgggcgtcgagttcgaccggtcgttcgtgccgatcgtccccctcggcggccggttcgtgaaacacttctggaagctgctgaacgatctcgacatcccgcacgcgaccctgctcgacctcgacctcgggcgccagcacgggggcgccaaggcgatcgagtacatcgtgggcgaacttgaaggggtcgaccggaacctggcggactcgttcctgatcgaaatcggcctcgtcgatcccgcggcggtcgccgcgatcgatgaggccggcctggtggctgagggatccaggcacgattggctccaggcgttatccgagctcgacgtcttcttctcctggccggtcgacctcgacttcgcgatgctgatggcgttccccgatgcctacatgcgggtggagcggccgaggcggggtcccaggcgtagcccggaggcggtatcgacgaagaggaacgtgacgctcaagaccgacggcaagcccgccctctacgaagggcaggcgcggttcgacgccgccttcgtctggtatccctacctgttcctcggggagagcaaacccgtcgcgcacctgtacgcgctcgggtcgatggaggacgccgccgtcgccgcggccgcgccaccggagctgcggcggttggtcgaacacgtgcgtgggcaccttgcctga

SEQ ID NO: 71849 - DNA, 1848 bp, Methylobacterium extorquens AM1
atggcgaccgtgcgtcccgaggactggcggccgcagggcatcgatgacctggaggatcgcgcctggacggcgttgagggagacggggcgcagcgtcgccatcaccgcgggcgccggcgccggcaagaccgagatcctcgctcagaaggccgcctacctcctccagactggcatctgcccatccccccgccggatcctggccataagcttcaagagggacgccgcggcgacgctcggcgaccgagtccgccttagggttcccgaagcgcaggcacgacgcttcgtctcgctgacctgcgatgcctggacgaaggggatgctcgaccagttcaggcgggcactcccggccctttatgtcccgccatccgattacgggatcgcgcttcccgatagggacgagatccggagcttcctcgacagggtgggatcacgcctgaaccgggatcagttcgagaccctgctggcggagacggcgatcccactgggggagcaggggctcgacgacgccgtcctggcgacgctgcgtgcctactggtcccagcagtacggggccgttcccggtccgatgctgacgctcccgatgatcaaccggctcgtcgagtacgtgctgcgtacgaacccacgcatccgggaggcgctccgggcgacctatcccttcgtcttcctcgacgagttccaggatacgaccagcgcgcagtttggactcgtcacgaccgccttcgatccgataggcacgcgcgtcacaacggtgggggacgtcaagcaacgtatcatgggcttcgcgggcgcgatgccggacggcttcgcgacattcaggcgtcttttcgatgcccgcgaggtgaccctgctcttcaactggagatcgcacgaggaactggttgcggtccaacgcgtggtggcgagccagatcgacccggccaccgaacccgtccgtgcgaggagggcgaagtcggtcgatggcgcgcactgcgctatatggtcgtttcccgatcggaccgcggagatcgatgcgatcgcggggtgggtggcatccgagttggccgagggacggctcgaaccgcagcgcctcgcgatcctcgtccggttctatgccaaccaggtggagggtgagcttcgtcccgccttcgaggcgcatggcatccgcctgcgcaacgtcgccaggtcagtcggcggcgtcgcgatccaggatctgttgacggaggaactgacgatcctcctcctgccgcttctccggctcggcacgagcaggcacgagcccggtgcctggaccgcggccttgcggacggtgggcttggtacgcgcgatccgcgatgacgacgaacgccgcctcggccacgtgatgcgcgacgtcgaggctcttgccgtcgctttgcggcgcctcatgaccgatacgccgccggatcccgcgctcgctagggacctcgtcgccatgatgctggagggtgtcggcgaggcgagcgtccggcaggccacggccgcctaccaccgcgagacggacttcctccgtatccggtcaggcttcacagcgctgctgggggaatgcctcgcgcaggcgtcgtcatggtcggacgcgctcgatcgcttcgagggcaaggggcaggtcccgctcatgaccatccacaagtcgaagggcatggaattccacacaatgatcttcttcggtctcgacgaccggagctggaaggggctccaccggggcgaggccgaggagctgaactcgttcttcgtggccctgacgcgtgccgaacagcgggccttcttcacctgctgcacccagcgcggcggcccgatcggatggctcgaaaccctgctcggcgacgcggtgcccaaggtgccgggcggtccttag

SEQ ID NO: 71850 - DNA, 1953 bp, Tolumonas auensis DSM 9187
atgtacttaagtaacctaaaaattcaaggttttcggtgctttgacaaagactttaatgtccaactaaccaatgggctaaatgtgatagtcggtgaaaatggtgctggtaaaactgcgatcataagtgcaattcgacaactatttcatgactccgaatcaggtcgatacagcatcactagcgatgatttttatagcccattcatcgcaggtggattagctgctacttcattctctattggcgctgagttcgatggactggatgtgatggataaagtagctttgctcccgtgggttggagcttccaatacggctctgttaaacatacaagctgaaaatagagaaatccggggacagtttaaacgagtcatttggggggggaaatccaagagttcccagtttgaccctgaattactagatctaatccaatgtatctatttgccgccactgagagatgctgaatcaaagttatcgaatggtcgtcagtccagactatctaaactcctgaaagctttgaatcgtaaaaaacttaaacaatgtagaataaaaggcgaattacatcctcttgaagaaagcgttaaagaatttaacgaatcccttgccgccgatgacaaactaagcatcaaagatgcaaataagctcatcacagaaaacttgactaaagcaattggacatcactttgggcaacaaaccagtattcaatttgctgaaagtgattttaccaaaatagcggaaagcctgactttgatgttctttcctgacttatctgttgagggagtagtttcgttccgagagcttagtcaaaatagtttgggctataacaaccttctatacattgcttcaattctagccgaactcacattagatgatgaagatgaatatgaagatcaacctctctttaagttactgcttatcgaagaacctgaagcgcatttacatccacagttgcaaattagattgttgaaccacctaaagaaagtagctgaagagaataaaaatgttcaggtcgttgtgactactcactcgactgtattagcttcctcggttgaaattgaagccatcatccatttatctaaatcaccagttcctgtcgcaacacctctacgtacttgtggcttaactccggacagcagtaagtttatcaatcgttggctagatgtaacaaagtcaaatttactatttgcaagtggagtaattcttgttgagggaattgcagagcaaatgctcattccgattttggcaaaaatagttctggaagatcagaaagaagggggaaagagccttgaagaccttggtatctcagtaattaatctcaatggaatctactttaagcactttatgcaattatattgcgatatcgaaagtgcagatgattctgaaggaaaaactataactgaaaatcttccgataaggtgcgcggggcttacagatctagacccgcccaaaaaagtaactagacaagtacctgactcagacaaggaaggtgagacaagagaaatcatagaagacttaattccttacgacggcaatatgggaaaaggtacgaaccatgccattgaactcgttgattctattaataaatcggctaatgcgcgactttatgttagtaagtacaagacattagaatatgatttagcaatggaaggtaacaatgctgcgttaatgtccgaaataattgcttctctatggcctaaaccgaccaaaatggaaagtccagtaatcgtagaatttacagcaatgtccaaggaagactggacgaaaaaagaaccacttgaggttgctgaggctgctcacaaaatcctcaaaaaaattgatgatgacaaaattgggaaagggctgtttgcccaagttttgaccgataaaatccagagtaatggatttaatttttctgttcctaaatatattaaacatgcaattttgtgggcatcattattagatatggtaaaggaagaatga

SEQ ID NO: 71851 - DNA, 1758 bp, Tolumonas auensis DSM 9187
atggccccagagtttaccaatgaacagcttgattatgtgaattcaagtatcgaagaacacactttcttagaagcttgccctggaagcggaaaaacagaagtagttgctgctaaagtagctaaagaaattggctcttggaagaataatcctggtgggctggccgcactctcttttgctaacagtgcaacagatgaattaacaataagggtatccaaatacatcccatatggcaggggcatatttcctcattttttaggcacatttgatagtttcatctacaaaaatatagtatctccgttatctatagagctaacagggtatctaggggaaaatagtgatgcatctatacgtatcgttgaacccagcgcaaacttgggctacagaactaaatatagttttgcaaggcggggacaggttcatgcccaccattactcgtttaacctaataaatggatctgttgtttttgatacgggagaaccagaactagatagagtatttaattccacggttctaaaagattgggaatatcagcaccttgttgagactaaaaacaaaatgctgaaagggggatttgctacctaccgagatattgaaactttggctgtagatgccctatctcaagacaaataccagcattttgttaatttacttgtaaagcgctatcctctaatcatcatcgatgaatgccaagacctctcagaagaacaattaactattctgcaaatacttgcagataaaggaaccaagcttcattttgttggtgatctacatcaagctatctatggttttcgtgacgttgaaccagctaaagtgaaaaaattcgtaaatgacaattatttcaacaaattacagttaactagaaactttagaagttgccagaatattgtcaatctttgtgccaaactaacaggacgtgttggtattgttggagatgtatcttggctaaaaccaaggtgcataatcgttcaatacaatagttgtccgacggaactaacagatatttttaaggaactgtgcaatggctttcacaataatgttgttgtgtcgagaggtcactctatccttcgaaaatttcagacctctgttgatcaaccaaacaacattcagaagctagctctcgctgtcaaactatacgaccccaaagatatggagtttctcaatcagtctttgcaatatttctcagagtttctccgctaccaccttaaagaaagttacaaaccaagtagcttcaattgtcctcaatcaatcgactcaaatcttttgtggcgtaaatttttgagcgactcgttaaattatttgattagaaataatctacaaaagatggatattacgtggtcaaattggacaacaactgcaaaattgttaattcgatctctcccaaagcagtgtttttgccctgaaggtattgtaagtgtattggcatcactggaagcagtaaacttagcgtctccgtctggttcagccaagttcgaagttgcttcttcattgggaacagctaaaaccccatcactatcgtacagaaaatcaactattcatggggcgaagggggaaactcatgatatcaccatagttgtatcatctgatcgagctggaaaggattctcactggaaaagttggcttaacgacccagatagtgaagcagcaagatttgcttatgtcgcatcatcgcggccaaaagaatttcttatttgggcagtgaaaaaactaaaaccactcgaaaaaaagcaattggaagctgtcggctttaaaatcatttaa

SEQ ID NO: 71852 - DNA, 1788 bp, Tolumonas auensis DSM 9187
atgcggatctcacgcgttaggctgatcaatttcgccaatttttcggatgttgatataaagactggcgatagcatcgttatcgttggtgagaataaagtcggaaaaagtaacttcattcgtggattacagctgattctcgacccaggattgtccgagcgtgaccggcaattgagcatagagcacttctgggatggcctggttgaagacaagatcggtaaaatcatcgaagtctcggtggacttgaccgacttcactgataacccgcggttgatggctcatctcaacgattgtgtgattgatccaggcccacccatgacggcccgtctcacctatcgcttccagcccaaagccggactgggacgcgctccggaatcgttgaaagactatgagtatgtgatctttggtggtaacgaccccgaaatgcacgtcggtagtgcgtttcgccgcatgttgccaatagacgtccaggtggcactgcgtgatgctgagaaggatctcgcgagttggcgcaattcaccattgagacccctcatcgaagatcttgccgagtcgttggacgaagacgcccgtgaggagattcaaaatcaggttgacgacgcacagcgggaactagctggccacgcccaagtggttgcgacggcgaaccggatcagcgagcggttgatctccattgctggtgagcagcatgctgtgcctgtgtcgcttggactcgctccaactcgggtggatgcgctgcttcgcagcttgcgattgttaattgacaatggaattcgcggcgtcggtgacgctagtctgggaaccgcgaacctgatcttcctggcattgaagagcctcgaactcgaccgcctcgtgtctgacggagaacgtgaccatacattctttgtggttgaggagcccgaagcgcacctgcacccgcacgttcagcgccttgtctatcgttatttccttggcaccggaggggatgaaaacgaggaagatgctccgctaacaacgatccttacaactcactccccacacattgcaagcgttacgccgattagatccatcgttctgctacgtcatgacgtgggggcaggcaagactgtcgccgtttcaactgcgaatgcgccgttcacacagagggatgaagaagatctacagcgctacattgatgtcacgcgtggcgagattttcttttctcggggggtcattctggtcgaaggcgacgcagagcgtttcctggtccccgcgttcgctgaggcgcttgatatccacctcgatatgcttgggattaccgtgtgctcggttggcggaactaacttcacgccgtatgtgaagctcctaggccctgaaggactggatattcctcatgtcatcctgacggactatgatccggtcaatggcaaggctccgctggttcgccggcgactgatcaatcttcttgacgtggttgaagacgagtacgaccactcggagatggagacagatgacgtaattgagcttgccgaggagttcggatacttcgtgaacgagaacacactggaaacggagttgttcgccggtgggttggctgagtcgatgcgggatgtaattcagcaggaattgccgcaactgaggcaagcaacccgagaagcattgcagcagtgggtggatgacttagaccaggtcgatgaagaacggctgctgaagcttatcgaaagaatcggaaagggacgattcgctcaggcccttgcacgctcagtgtccgaggatacttgcccgcactacatccgttccgcgctggagcatatccgcaatgccgtcgcgtag

SEQ ID NO: 71853 - DNA, 1815 bp, Tolumonas auensis DSM 9187
atgccgtcgcgtagtttcagcacagcctacctggcccaggctgccgagctggccggaaatcctggtcagttggcggcgtacaactcccagggacattgcgtggtgctcgccggccctggaagcggaaaaaccaagacgcttgtgctgaagctggctcgcatcttggccgaagacgtgcaggcaccgcgtggtgctgcgtgcatcacctacagtcaagagtgcgcacgcgaattaacccgtcggcttgaaatgttggggctgcgggaggcgccaaacctgttcatcggcaccgtccacggattctgcctacgccatctgttgatgccatatggacgcttagctgatctaccgattcagtttcccctctcagtggcatcccagcgagtgagtgatcgtttgatcaggcagtccggagacgagctctttggggccaaccatccttacaaagctatcgatcttggacggcatcgccgatccgtactgaaccgaaacagcgttgcctggcgtagcgaggaagaacttgccgcctgggccgaagcctacgaggcggcactgcgccaaggggggctgatcgactacgacgacatggtggtctatggccagcgcctgatcgctgagcatgattgggtactgcctctggtgcaggcgaaatttccggtgctggcggtagatgaatatcaggatttgggggttgcactccatcgcatcgtcaagcgcctggcttttgatggtggcgtgcgcttgttcgcagtcggtgatgcagaccagtcgatctacggtttcacaggggccgatggcgcgttgctcatggagctagctgagcgtgaagacatcgagccggtcagacttcaattgaattatcgctcaggggcaggcattgtcagcgcttcagaaatggcgttgggtgaggatcgtggctatcgggcgaacgacccgacccgtcaggcgactatcgagtttgtgctgtgccctgatgggctcgcagatcaggccgcacacgccgtcgcgcagatcattccggtggccttggactccaagccaggacgaacgctgggcgatatcgcaatcttgtatacggactatcgcgcaggcgatattgtggccaaggccgtggcagccggcggtttcgattatatccgcgtggacaccgccgcgccttaccgtaaagttgccttgacgagttgggtagaagactgcgccgcatggtgtgcgggtggctggcgtatcgcgcgtccgcaactgcgtggattgatcgaccgttatctcgcatttcatcgagcgaacttggacgatgcgcaggctcgacgcgaggggcaggagctaaccgctctgttgtgggcgttgcgcgccgatcagcagtccgcacgtgattttgtcgcatcactgcgcaacggcatcttggatcgtctgttggttgctgaatcgtcgcttgccgatcagaaggaacaactggatcgcatgacggcggcgcttgccgaaggtggcgcgctggctacgctggacattgcgagtctgggcggacgtgatggttcgccggatcacctgaacctgctgacacttcattccgctaagggatgcgagtacgacgtggtcattatggtcggtctcgactatgggagtttgccatggcgaaaactgagtccagagaagttgcgcgagagtcgccggctgttctatgtgggactcacacgcgcccgcgacgaggttcacatgctgtactcgggattcgttgaagggcgctatggtccgatgcgccatgggcgctcaccattcctggatgaattagaggcacgaatgcgtgctgcgaacctctga

SEQ ID NO: 71854 - DNA, 2292 bp, Rhizobium leguminosarum bv. trifolii WSM1325
atgagaatcaagtttgttgaggtctccaattttcggaaactgaaatcgacccacatcgatttcgacaagaagaccacgatcttcgtaggggccaataacagcggaaagacttccgccatggttgccctacggtatttcctcctgtccccgaaccggcttgcgttgcgagacatcaccatcgcgaactggaccaagatcgatgctctgggagacgcttgggaaaccgaagcggaaaccgatatcaatctcgatgaccttctgcctgctctagatgtctggcttgacgttcccctttccgagatccagcacgtcgtgcatattcttccaacgcttgattggagtggaggcctccttggcgtgaggctgaagtatcacattgaggatattggcagcctcaaggccgaatacctgctccaacgcaatgccgcccaggccgccgtcacaaagggccttggcggtgaagctgtcaaaatcgacatctggccaaagagcctaactgattttctggaacgtcgtcttcgggctcatattggaatcgaggctttcgcgctcgacccctccgcggtcgtcgcgccggcgaaaggactggcagcaccgcagattctgcccaccaccgctttgccgctcgataaggcgcctttcaaaaacctcattaaaattgacgaaattgccgcccagcgagacttcgcggattcgcatgaaaaaagtcagagcggcgacgagggttccgaatccagcactcgccgctttaagcgccgactctccgaccagttgcgctcctactacgatcgtcacctcgacccggcgaaaacgccgtcagagcaagactatgaagccctcggcgcgattcagacagccgagcgaaatttcgataagcgattggaagtcgggtttgcggctgcctttggagagctcgaagagcttggctatccgggaatggcaaatcccaaacttaaaatctctactcttttgcaagccattgatgggctgaagcacggctcggcagtgcaatatcaggtcgcagaccccagcggagacggcaccaaaaccctgaagctgcctgaagactactcggggctgggttatcagaaccttatcgctatggttttcatgctcatgggctaccgcgacgagtggatgcgtgtcggcaaggcatcctttgatagtgggggcggcgcgcaggagcaaattcaacctttgcatctggtactcgtcgaggaacccgaggctcaccttcatgcgcaagtgcagcaggttttcatcaacaaggcctataaactccttcgaaaacatgatcggcttggcgataagaccactcactgcacgcagttggttgttagcactcattcgagccacgtcgcgcacgaggctgatttcgccaacctacgctatttccggcgacgaccagcaccctcaatgggcgatacgcccaccaccaccgtggccaacttgtcgtacattttcggcgaaggcgacgagacaaggcgtttcgttcggcgttacctcaaggctacgcattgcgatctcttctttgccgacggcatcatcttcgttgaggggcaggccgaacgcattctcgttccccattttatacgccatcaatttcctgacctctcgcgtcgttacgtgacgctgcttgagcttggtggcagtcatgcccatagttttcgtgaactcgttgatgagttgggccttgcgaccctgatcatcgccgaccttgacgccaccgtcgcgaccaaggtcccgatcaagggcggaggcgaagccattcgatggaaagcggcgaaaccaaagcgtggggctgaacagaaatccgcaaaccaggtgctcaaggagtggcatccgtcaaaagtcctgatcgacgaactgatcgcgctcgatcctgctgatcatcaatcttccggttcggacggctacgagctgtatgttgcctatcagaagccggtcagcgttttagctcctgacggtaaaactcaggaagtcattcctcggacctttgaggacgcgcttatccttgaaaacctgactgtcgtcgcagatgttgaaggatcgacgaccagcgccaagataaaagctatcgtgaatgataaccccaatggcgaggagcttgaagatgaacttttcgagctattgaaaacagctgagaaggccgctttcgccctcgactgcttgatgttgagcgaccccaccgcgctcaagccaccccagtatattcggcgaggtctggaatggtttgagcgcgctgtcggaaaagacatcgcggcgagtgaaccgaagggagccagcgcatga

SEQ ID NO: 71855 - DNA, 1920 bp, Rhizobium leguminosarum bv. trifolii WSM1325
atgagtccactcgccatcaaacgtggtgcgcctgataccgaccgcgacgccgatctcgcgatcagcgcatgtttgaacccaaacgatccgaaaagtttctttctctatgcaggcgccggttcaggtaaaacgcgctcgctcaaagaggcgctcgacggtttccgcgatagacatggggacgagtttcggcgagccgggaaaaaggttgcggtcatcacctataccaatgcggcagccgatgagatcgctgcgcgcgttggccaggacaccctattcccgatatcaaccatacacagcttttgctggtcgcatattggcacgtactacaccgatattcaggcttggctgctggcaacgctccctaacgatctcgccgacttacgtgaaaagcagtccaaaggacgcgctggcacaaaggctgcggacgaccgcgaacgagcgattgccgcgacgatcaaacggctcggctggctcagcgtccctcggcgtttcacctacagccctaacggcgataacttcggtgcggattcgctgtcccattccgaggttttaaagatcacggcgaccttcatcttggcaaagcccgcaatgcaggccgtgctggtgaataggtttccatttttgctgatcgatgaaagccaagacaccaacaagatactcattgacgcattcttcgctttggcagcaacaaacaggggcaagtttgcactcggtctttttggagacaccatgcagcggatctacgctgacggcctcccagatctcggacggaacattccaccggaatgggcacggccggtaaagcgcatgaatcaccgatctccccaacgtattgtgcaattaggcaattcactgaggtccgccgtggataaccaaatccaactggcgcgcgacgacagcatggtgggcaccgtcagactcttcatcattgcggcggatgcaaccgacaaacctgacaaggagcgaaaggcgcgcgagcgcatggccgagctatgtggtgacgccggttggaaagaggatgccaccgtcaaaacacttacattggaacatcatatggcggcgtcgcgtcgtggcttcgcgccgatgttccaggccttggacaaggattcccggctctcgacgggcctgaggaccggcgaactcgctggactgcgtctctttaccgagcgcgtagcgcctctccttgcggcatcgaccgctggcgaggagttcgccgtcatggctcatctccgcaagaactccccccttttaaaacggtcggtgctagccaatagcacgaccccggacgatcccctcctgcctgcccgagtagcagttggggcgcttctcgcgttagacccggagaatccctcgacgcggcttctcgatattctcgagtgtgttgccgaacatcgactattcgaaatcccggcagcaatgcgtccatttatcgagactgaaccagcgccagttgcgccggaaacgactgttcaaaatctcgaggataatgaggccgaggaggaagccgagacctccccttctagtttgcaggcatggcgggccttccttgagacgccctacaatcagatcgctccatacgccgagtatatcagcaatcgtggtccatttggcacacaccagggcgtcaaggggcttcagttcgaccgcgtgctagtcatcctcgacgatagcgaagcgagaggcttccttttctcatatgaaaaactgttcggtgccaaaccactctcagaccaagaccggaagaatgcagccgagggcgccgatacaggcatcgaccggactaggcgacttctctacgtcacttgtacacgcgccgagaaaagcttggccctcgttgcctataccgagagccctgacacgcttgctgctgcggtgatcaaacaaggatggttcagcgccgatgaacttgagcggctgtga

SEQ ID NO: 71856 - DNA, 1662 bp, Ralstonia pickettii 12D
gtgcttacgctcaacgtacttgttggccccaacaacgcaggcaagacggcggtagttgatgctttgcgcgtgcttctctcggcaggggatgagggcgcgctgcgggtcagcagctatgaccttcatgtaacagatgcaggtgcgcagtcggcgcaggcgacgttcagctacgtcttcgctgggctgagtaagtcggaagaggcggattttctgaccgcactgaaaccgacgaccaacgcgaagggcgaaacggaatacgaggcgcacctaactgttcgctattcgaatccagacgacagtggacgcttgcgggtccggcgttggtgcggagaccacgaggacaatcccattgcatccgagatgctggaggacctgcgggccgtatatctgccacccctacgggaccccgctcaaggtctgagaccaagtcgcagcagccaacttgcgcgcctggtgcaacggctgtcggacgacgcaagccgtcaggaggtcgtcgaaaccctcaccaagctggacactgaactgcgtgcgaagaagcccatcaccgacacccaggccgcgattacgaagaggcatacggacatgctcggcaaggtgttgagccaaaagctggccgttggcttgagcccgagtgatttccagcgcgtcgcggcacgtttggcgttagcggttgccgacttcgacgtcgagcagaatggactcggcttcaataacctcatttacatggcggtcgtgctcagcgagctttcgttgaacaaagaggcagcctaccgcgcactcatcgtggaagagcctgaggcgcatttgcacccccagcttcaagcggtgttgttgcagtatctcaaatcagtcgagacacccgctgtcaacgagaatccagtccaggtgttcgtgaccagccactcgccgaactttgctgcgctcgccgatattgactccatcagttgcatctatgaggcgtcagaagccgttggctgtcttgcccctagggaaatagcttttgagaagcggaagaaggagaagctccagcgttatctcaacgtgacgagagcggaaatcttcttcgccagacgaatcatcttggttgaaggcactgcagagctttttttggtcgaagccatggcgcacaaactcggcatagacttgaggaagcactccgtcagtgtcatcagcacggatggcctgaatttcgatgctttcctgccgctgtttggtgagacggcgctaaaagtaccagttgctgtggtcaccgacggtgaccccacaggaatctaccctcagcctggcgagcatcatgagccgtctgcaacggcaaagagcatccaagcgcaatcagacacctttgtccgtccgtttcttgccgcgaagacactggagtacgacttggcaatgactgccacgaatcgtgcgacgatgcttgaagccctcaaagacctgcatcctggcatcgcaaaggacttggcagcggacgtggaagcagccaaggacgaggataaggccaaagtgctcttcaaaggaatgttcgagcgaggagaaggcaaggcgaacgtccagaaaggtgcctacggtcaagcgttggcccaggcgattgtttcggacgggcttgatatcgaagtgccggattatcttgccgatgccctcaatttcattacggccgaatga

SEQ ID NO: 71857 - DNA, 1722 bp, Ralstonia pickettii 12D
atgggcttcatcgcgacgccagagcaggaagccatcattggaggggacctcgtcccgcaatgtgtgattgcctgtccgggcagcgggaagacagtaacggcagtgcgccgcttggtcgaggtgcggcgacggctcggcgacagtcatggatatgtggcgctgttttcttactcgaacgtagccgtagacaccttcaagcaagaatttggcacgctgttgcgcacgctgccaggcttgtcgcagcgtgtgcttattgggacggtcgactcgttcctgaccacctacgttttgcgaccacatggagcaaggacaatgggtgcatcaaggagcccgttcctggttcatggaactgagccgtttctcagggggttcaccgttttcgacggcaagtatcctcatcccatcagtgagcttcgtgtccaattcaaaagcgatgggacgcttgagtacttactgcaggcggcgggcaagccccctgtaccggtagaggcttggaaggctcaggacgttattgagaaactcggtaaagcgggcgcctacacacatgagcttggacgctattgggcgttgcgtgcactggctgagaaggattggctcctgcaagcgttgtgctaccggtttccgcatatcttggtcgacgaggcacaggatgtcgggccgctacatggggctttactcgatgcactcgccgggggcggttcgaccgtctcgctaatcggggaccccaaccaaggtatctacgaatttgctggagcagatggcagcttcctgagggagtacggaacgaagccgaaggtggtgaacttctccctgtctcagaatcgtcgctcggtgaattctatagtcaatgtcgccaatcacctcgccggagccggctgcacgccgattcgcgaacctggcccgaggaggcatggcgcgttccacctgccatacgatgaagacaagctggacgacctgatggcgacattcgcgggaatcctcgaagccaatcagtacgacaaggaggacgcggtggttgtctgtcggggtaactcgacggttcagcgtctaactgggggacagagcgatatcggtgtcggcgcgacgggcctgtttgcgcgcgccgcgatttttcgcgaccgtggtggcgatattgctgaggcgttcaggtgtgtcgttgacgcgttcgtcagacttatcgagaacgcgcccaacgatttcaaacaagacgtgcttacgtcgactgcggaagggagcgcgcgacaagcgcgtcgattgctttgggagtttcttcggtcgcccgctgaagggctgccagccgccacattgcaagccaaatcgacttggcacccacaactcaaggcgcgcgttgaggcgttgctggaagccgtggagagtcaaaccgatattgcacggtcgcagaactgggggcgcaaccttaccatcaaggacctcccagataagcccttatgggaaactgatttggttgcggctgggggtgcagggattcgcgtcgatacggtgcatcaggtgaagggggagggggtgacggccgttctctaccttgctcggacggctgacatcaacaagttggtggaaggcacaacaactgaagacggccgaatcggttatgtcgcagtaacacgggcgcgagacctgctcctgctcgccgttcctaacactgccaaaaaggccttattgcaggcaatcgaatccaaaggattcgaggcctgggtggaatag

SEQ ID NO: 71858 - DNA, 2034 bp, Ralstonia pickettii 12D
gtgaagctgtccgaaattgccatcatgaacttccggctgctgcagtacgcccgtatgcggctggacacgacaggcatcaccacgatcctcgtcggccccaacaatagcggcaagacttcggccatcgaggccatgctgaccttcctgcaaaggccgatcaagcagctgtcgatcaatgatttttctctggggtgtcgcgatgccctaaagaagtttgagcagcacgtcctagcgccgcctgcggcggccgcacccgcggggggcgaagctgcagtagccgcgccaccgcccctccccgacttgccggtcttgtcgttgcgcctcaagttcgactacgacgacacgggcccagatttggcgattgcaggggagttgctgatggatctggaggatgcgtccgcctcggtgatggtcgaaatccgcttcgcgcctgcgaatcccgagcaactggcgcaggcctacctgaaggaccgggacgacgatcagtcgcttttcgattatcttgcggccaccctgcatgaccactacaagctcgaccaattcaagttgagccctgacggcagcgaagccgagcgcctgcccgaccgaggcatcttgcagcggctgatccgcatcgacgtcgtcagcgctcagcgccacatcgacgaccgtgaagaaggcagcaaggccacgcgcctctcgacattgctccacacgcactacgagcgccgctacaaagtcgatgctcccaacgatttcaaggcactcgagaagacgctgcgggaccagtccaccatccttggccctcagtacgtcaaggctttcgacggcctgatgaaggggttggcgaagttcggccatccggaatcccccaagctaactgtgcgcgctgagctcagcgccgatggccttttcaaggacacgacgcgcgtctactactcggcggccagcgcaacgacgccaccagccgagggacccgcggcagcgcttgatcaggccttcgagcttcccgagcgatacaacggactcgggttcaagaacctcatctacattgttctgtgcctcaagtccttccgtgaggacgtggagtctgacctcgagcatcgtccccgtgtccacttggtcgtcgttgaggagcccgaggtgcacatgcatcctcagatgcaggcggtcttcgtccagaaggtcagcgagttcctcacacccgctgcgggtgagaccggcgtgcaactgctgctgacgacgcactcatcgcacatggcggccaactgcggcttcgcgccgattcgctacttccggcgaaacaagggaacggtcgagatcaaggacctgctgtccttcgagtgctctgcaacgaccgaccccgaaaaggccgcgatggagttcctgcggaagtacttgacgaccactcgatgcgacatgttcttcgcggacaagctcgtgttcatcgaagggcaagtcgagcgcatgcttctgcctcgcctaatcgccgccctggatatcgcactgcgcgacaagctaacctcgacttatgtctgcacggtagaagtgggcggcgcgtacgcacatctcttccgcaagctgatcgagttcttgcagttgccggctctggtcatcaccgatttggattcgatcgatggcacaaccaagaagaaggcgcccgtcgcaaacgggcatgtcagcagtaatgcaaccctgtctcagtggcttccaggaagttctgatttgcctgtgctgatggcggctggcgaagcacaaaagacctctggacgtgtccgggttgcctatcaagtcccggaagcagtcggccaaccgtgcgctcgcagcttcgaggaagcctttgtctacgcgaacgcggcatggctgaccgccaacaaagccaagatgttggccaccggagaaacattcactcatgctgacgccgcagccctgaccgcggacgcctacaacgtaagtctgccgaaggtcgactttgcgcttgatctgctggccaacgaaggctgggccacaccgatgtacatccgcgaggggctcgaatggttggcgaagcagtag

SEQ ID NO: 71859 - DNA, 1758 bp, Ralstonia pickettii 12D
atggttggcgaagcagtagccgcggccgcgcccgaaaagacagcggacgagcgcatcgccgaatgcctcgccgagggtcgcagtttcgttctcgacgctggtgccggcgcgggcaagacttactctctcgtcgagggtctgaagaagctctgtgcaccgacggtcgccgaccggctcaggcgtgacgggcagcagatcgcctgcatcacctataccaatgtggccaaggaccaggtgattgaccgcatccagggcaactctttggtgcgtgtctcgactatccatgacttcctatggagcacgttgcagccccaccagcaagcccttcggcaggctctgctcgatttcaatgctgcactccccacggggagctcgcgtcgggttgatcaagcggaactagcagcaagggtcgccgcccggcttgaggtgaagtactcggaccggggctccaagttcctcgagggtcggatctatcacgacgacctgctttcgatcgcgcgcatcgcctacaccagatacgacaagctggcgcgcatcgtggcgagccgctacccctacatcttcatcgacgagtaccaggacaccagcgaagcagtgatcgacatcctgctttgccggatgctaccgctggctggcaacaagctcgtgctcggatttttcggtgacaagatgcagaacatctatcaccatggagaacacaaggggatcggcgaacttccagctgagctggcagcgccacttgaggtcatcgtcaagcgcgagaaccgtcgttgctcgctgcgcgtcatggatgtgttgaacaacatccggaccgacatcacgcagatacctgggagcaacaacgcgcaaggcgacgtagcgtacatccgcgttgcggctggtgccgatgaagcgggtcttcaacgcgcacgcgacctgctgaccgacaccttgaactgggacctggcaagccaaggaacacgcgagctttacctcacccatcggctgattgcccgcaaggctggttttgctgacttgcttcaggccttcacggatcgtgggtcctttgccaaggatgccctcaccgacggctctgatcggcggattgcgttcttcttggagaaggttgaaccgctggccctggcctgggagaaggggcagatcggcgagacgctgggccggctccatggcgcggggcaccgactagccagtcgcacagcaaagtctggcgtgcgcgatgcgcttaatgccctgacggcaaagcgagctgccggcacagtccgtgaagtgcttgagacgatccgcgaccgccagctattcccactgaccgatgacttggccctccggcttgtaaacacgcagcccatcctcactgcggagatggatgatgccgcgaaagagcgcgagcaactggaggcgacgctgtacggggccttcttcgcgcttccctaccagcaggtcgccgccttcgcccggttcttcatgaccagcacgccgtttgctaccaagcatggcgtgaagggagacgagttcgataccgtgctggtcgtgctggacgactccggcgccgcgtggaccttctattcgttcgacaagtacctgtccggtgcggatgagacggcgaaaccagagcgcgcaaagcggtctcgcaatgtcttctacgtctgctgctctagggcccggcagaggctggcggtgatcgatctcaccggtgcttccgcggcgaaggacgagcgaatgcgcacgctgttcggactggaccgctgctatgaggtatag

SEQ ID NO: 71860 - DNA, 2034 bp, Ralstonia pickettii 12D; identical to SEQ ID NO: 71858

SEQ ID NO: 71861 - DNA, 1758 bp, Ralstonia pickettii 12D; identical to SEQ ID NO: 71859

SEQ ID NO: 71862 - DNA, 1713 bp, Zunongwangia profunda SM-A87
atgttagacatttcagactttaattacgagactattctggaacttaaaaaagcaatccttgatacttctattgaaccaaagaatatttcatatcctaaaattgtaataaaagctacacttaaagactgggatttaaaacaagaggctgtaataacagactggatgagtaattctgattttacagaggccacacttacttatacgttcgcaccaatatcatcttttgataaaattgaagaaataaccctacaaaggcaatttcttcaggattacgaaaaagaaataggacctgaagaatttaaaaaaataccccaaagcgaaatactaattctaataaattttccaatttcaaaataccattatcgcatacacggtggtaaccaaaatgaaagcttggcaaacgcctaccatctaaaccaactaaaatttgagctacttgatgcattgagggatgcaaaatccgaactttcggcgagtagaaataatgggctgttgtttagagttttaaatgcaaatgaggaaaccgattatcaagatttgaaaaagcggttagtgggtcttcaaagagctatcgaacaaaatgtggctatttcaggtataaaaaatcgcatttctgaacaacttgataaaatttcattaagtacggaaacgtccaataacgttgttgacctaatattctctcttccaaatgtttcagacttgcttagaaaattgagcttaatttacaatgataatcctataaaaattgaacgtaatggaactgggcgaaataaccttttgttcatttcgttgatactatcatttatagaagacccagagcgtgcacagtccactttttttagaatcgtgggacttgaagaaccagaggcacatcttcacgcaaatcttcaaaatcacttagcctcaaatcttgaagggctcataaaaaaagaggatggtacttatagaaaggatatacaactgatcctaacttcacattccaaccatattacaaccaaaatagatttcgataacaccgttgtccttcattacaaaaatggcaatgttcaagctcattatatattagatggttttggaactacagctgaagagaaaagacaggtaaactacctcaaaaaataccttgatagtgaaaatgtcaatttattttattcaagacgattggcattggtagaaggaatttctgagaaacttctctttcctttattctataaaatccagactggcgaaacaattgaccaatctgcaactgccgtagtaaatgtcaatgggcttgcatttaagaattttcttcaaataattgtgaatggttttcatactaaatgcttagttcttacggatagcgatattgggactcaatctgaaaatagagcacaagaacttaaaaataaatatgatggcgtaaacgaaatagatatccaaatttctcagttatctacatttgaaaaggatttaataaactgcaataaatctggaagtggtaagactattttgtgcaaagtgattccaatagtacgaccgaatgcaggaaaaaaatatgtagaagaattaggcacaaatgatattgatatcgaagaatattttgcattgattgaagattataaaagtgagtttgccttacaactttctttgtcgttgactgaagaccaaagcggtttttcaatcccaaaatatatagaggacggaattaaattcttagaccctttaatgtaa

SEQ ID NO: 71863 - DNA, 1566 bp, Zunongwangia profunda SM-A87
atggtaaatgtgggtaaaccaaaacttgtaattgctggacctggtgctggaaaaacccacggtatggttgatgaaattatccaagctctaaaattattggaacgacatcgctatatgatagttgttacctataccaattcggctacaaaaaatataaagaaacggctcggtaagaaaatagccataccacctaatttatttatcgggaccatacattctttcttgaataaatttattgttataccgtattcaagtttacataatgatgatgtcaatggtgaaaaattatttattcaatgtggaacggatgatgttctaaaaagaatgtttgataatagtggcgagacacctgactacaaagccaaaaattatataaaaagtagattgacaacttctcttcataaaaacggctacattacttacgaccaaacgctcagcttagctgaaaaagctataacgaacaaaagaataaaagagatgttgtctaacagaattcagtttttatatgtcgatgaatttcaagatactggaaataagatgttttctattatagagtctcttagaaaggaaaaaaagacaataatatattgcgtaggcgacccagaacaatacattcaaagctttgattcttccattaaaaacttccaaaatatcccgattctcaaagcttcacgaatgaatcaatatgagaccgagctaaataaaacgaatagacgctctgtaaagacgattgtaacttttttaaacaactttagcaaacgagtttaccaggacaatacatttgagcaacattgccataacgagatacctggcacacctgtaaagtttataaatgcaacccaaaatattacatcgatgctacctgaattttttgcccgatgtgaaaaagaaaatattccgcataaagaacgcggcataattgccaaaaaaaatgacgtagttaaaaaagctattgctgctttaaatgggaatgttcttgcccctgataagtctgcaaagatctcagccgtttctgaaataaaagacacactactatcatcgttgggaactaatcaaagtgcgttttgtgaagctcacggattaacaccatttgatttaagaataatggctgttcaaatcatacgtgctattcgctcagaaatgataactaatgaaaattctttcgccatttttgttaaagatacatttggctatattataaaaaatgatattcctttcaaattagaaaacctgcgtcaaatcatcgtttctaataccaatgcagaagccataatggtttcaaatattcataggtttaaaggacttgaattagatgccatccttgcagtagcaaaaaatgaagccgagctcaatctatggttggaaacgagtacagatttcagagatgcacattctgacaggggaacaagtgattatcccaggttaggttatgttgcttttagcagagcaagaaaagtattatgcattgcttgtttagagtccatttcagataatacaaaacaaaagttaaataatttgggtgttgaaatcgatacaccaaccctacagtttcccagcttaatttaa

SEQ ID NO: 71864 - DNA, 1932 bp, Zunongwangia profunda SM-A87
gtgtatctagcaaaactaaccatagaaaactttagaggtatcaaaaaaatgatactggaatttcagaagcgcattaatatcttaattggagaaaatggcagtaataaatctgcggttattgatgccatacgcttgctctacaatatgggagaacaattaagggatctatctgttggtttttcagattttcacgaaagtgtgacaactaatactgacggtagtattacaatagatcgctctagcaagattaaaatctctttcgaatttagaggattgtctgcatctcaaaaaggtgcattgtatgaatatatggtcattgatcctgaagatgatgaaaatgaatatgcagggattacattaacctttgaagataagggaggaaaatatccagtatcatcttattatacaggaaatgtagaaggtcaacgtgcagattataaaacatttgagatttttcagcattattatttaagtggattacgtgacagtacaaaggatcttttaagcaatagaggcaacgttttaggacgtgtcataaaaagacgtgttgaaaaaaacgagtcagaagcgaaaattgaacaaattatgacagatgctaatgataggttgctagaacaaccagaagtatctgaaactcgttctggggtaaatgataatctatctagcatttaccagcgttttagagacaatcagatagggcttcaaattgaacaatctaaaacagagtacattgtaaatgctattaagccttatttacctcacgatagggtattgttaagtggagatggtttttctctttggcaaaatagcttaggacaaaacaaccttatatacattgcaacagttttaggagatataaagcatcaaatagaagaaaataaaattcctcattttgcgctattgatagaagagccagaggcgcacttacatccgcagttgcagttaagtttgtgtggattcttgagagattctagtacttcaaaaaatagccaactttttattaccagtcattcgcccaccttaacttcaaaagttcctttaaaaaacttgattctgttagataaaaaagctttcagactttctaagcaattcaaaaacagagaagatgaatctatcattgaaaacacgcgagcaggaactaagatcacaaatgctagatttcaatttaggcaagaccagctggagcgttatatagatgttactaaatctcaattattgtttgcaaaggcgatactttttgtagaaggaatttctgaagaattgcttataactgcgtttacggagcttaaaaattatcgtttagaagattacaggatcgaacttgtcaatgtaggtgggacaagtttctatccttttatgcatcttttcaactcttcaaaaaatgaaaaggccattttaaagcccataactattctcactgataatgataagtttcctaaatcaaagcgaaaagaatttaagtttgaaaaacttatattggatgattacgatgtattagatactctcgatgcagaaattcaagatgcagcacctaattgtagagtcgcaaatttgaactctgttgcaaatgctcaagctcatataaaaatctttgatgcagaaaaaacttttgaatacgaacttgcacttgccaatgtcccaaaagataagaatgaattagagaataattttctattcaaatacatccgaaaaaaagataaaaataaagccgataatatattagaatacacagcgactatagatgccgatgattgggatgatgcatcaagacgaaaaactgcaatcctaatgtggaaaacgattacttctaagggtacgtttgcccaaaatttttccatctacttactaaagcacatcaagagagctcgcaaagaatttgaggttccaaaatatatacttaaaggcttgaaacatttaaaacaaggtgtatga

SEQ ID NO: 71865 - DNA, 1083 bp, Zunongwangia profunda SM-A87
atgaatatagatattacttccgaacttcaagcctatctggatgctagcggcaaagtagttttaaatgcttgccctggcggaggaaaaacaacagctatcgctcaaaaaattatcaaccttgaacctcaatacttaaaaaaatacgatgcatattctggtatcgcttgtttatcctttacaaacgcagcaaaagatgaactcaacgaaacatactctagactctgcggaaaaaccttgagctacccaagcataattagtaccatagatagctttataaatatctatattactttaccatattattacttattacaacgtgattttgctcgaccacgaattcttgagaataataagaaactcaataaattctggaacattacctacactcaaaatggaaaagttaaacaaggcataagccgaccattattggaattcaaaaataaagcgggcaaatatttatattttgtttatccacctgctgacattcgcatagagccagatggtactttctctttaaaaggtattgtaccttcagaagataaagttgaccctgaaaaatttattaattactgcaaatacattaagaattggcaatttaaaagaggactaattacaactaacgattcttcattcattgcgttaaccttgcttaagaaatttcctaaaattgcaatttggctttcaaaacgatttcctcatatcatagtagacgaagctcaagataattctttattacagcatcaagtatttgataagcttcaagagcacggacttaaaaatattgaatttattggtgatccctatcaaagtctttacgagtttagggatgctaatccacaattgttcttatccaaatttcagaacgattcgtaccaaggtttagagcttacagataatcgaaggtctccgcagcatataatagactgcttttctctactgcgacctgatactgcttcaaaaataaatactgcttgcacagaggatttaaaagagcctattttaatatatagatacagcacagaagatcgtagtaaagtggttcagcattttgatgattattgctatgtaaataattctgactaa

SEQ ID NO: 71866 - DNA, 1980 bp, Dickeya paradisiaca Ech703
atgaaaattacacaaatggagatcaaaggttttaagagctttgataatgtagggcaaactataaatataaattcattcaccagcttaattggagggaacggaacagggaaaacggcagttttactcgcattaacaagaatgtttggcgtcaaaagctccgatagaattattcaagttgatgatttttatgttcctcctggggatgaaatcgatactcaagatgaaagagagctatcagttcgtgtaaaattcgaattcgcagatttggaagatggtgaggacaatacagttgcagatttctttaagcatttagtttcaagtgaagcggcagagatcccatactgtactgcaaaattaaaagcaaaatggacaaagactaaccttgcagaaggagatatagaaagcgacctagtgtgggaaatcggggagtatgaaaaaaatataacagcatatgaaagatcgaaaattcatgttcattatgtccctgcataccgagatcctgcccaacaactgaagcaaacagccggaaccatcatgcaccgtctgataaatgcagttgaatggtctgatcaaatggcgtcaacagttgatgaggttgctgtatcaatcggaaaccagttccaagaagaagttggggttcagacgataacatcgtcattaggtagaaattggaaaaccctcttcactgggggttactttgaaaagcttcaaattaagccagtagtgaatggaattgaagatgtattaaaacatatcgacactgtctttttacccagtccagatacacaaccattaccaactgaaagattgagtgatggtatgaaatcattattttatttatctttagtcaaatctgcgtttgacattgaagatgagataatcaattctgatgggaaacagttatcaatatcagtagaagcattagcccccccaaatctaactataatattaatagaagaacctgaaaaccacctttcacctcaatatttaggaaggatagttaaactgtgtgaagagatatcagagaatgatcgggcacaggtagttttgactacacatgcaccatctttacttaatagggtggagccagagaatataagatatttccgtcttcatgataataaaaatacaattgtcaaagaaatattattaccaagggaagataaagatgatgccgagaatgttgatacttttacatatgttaaggaagctgtaaaagcatatccggaaatttattttgcaaaagttgttatacttggtgaaggtgatagtgaagagatcgtcattcctaaaatagcacaagtaaatggaatagagattgacacttcattaataacatttgcaccattgggtggtcgatatgttaatcatttttggaaacttctaaatgagctttcaattcctcatgtaactcttctcgattatgatttcaggagagggggtggaggttggggaaggattaaatacgcggtaaaacaacttatttcaattggagtagacaagaatatattgcttaaaatgagtgatggggttttgtctgacgaagatttagaagtaatgcattcatgggatgaagatagggatgaagaaattgcatggatagagtcgttaaaggaatatggtgtgtacttttccttcccttatgatttagattggctaatgctaaatgaattctttgaggattacaaaaaatttgcacctgaaaatggaggaccaagattgccaaaggatgatgatcctgaatataacaagaaagttaaagctgcaatagcttcagttttgaaaaaagaagaaaaagatattgatattagtaagtttgatgacttcgagaagtacttttggtaccgctacttatttttaggaagaggtaagccattatcgcataattatgttctatcaaaaatggaagacgataagttaagagataacagtcctgaagttctcaatgaacttatcgaaacagtaagaggtcttctgtga

SEQ ID NO: 71867 - DNA, 1848 bp, Dickeya paradisiaca Ech703
atgccaataataaaagatgatgattgggttctaaaagacatccaagaagtagaagacgaggctatgaaagtaatacggaatagcacagaacataatcttgttcttgctggtcccggtgcaggtaaaaccgagttattagctcagaaagcatgtttcttaattgagacaggaaagtgcagggataaaagaataattgcattgtcctttaaaaaagatgctgcgcaaaatcttcaagatcgagttaactcacgacttgacttgaaatatagacaaaagtttgagtcaacgacattcgatgcattttgtaaaagcattgtagatagatttaagagtacacttccagtggcgtatcggccttcagatgattatgaaatatattttcctgaaaataaaaaattcgtagaagaggttaaacgagatgccgttggttttgagggactaactgcggaggaacttaagaaattaaaacataacaatttcgaaaataattatattgttaggccttataaaaagggtgaagagcattcggtagatgctcgtattaaacgatttgtttggtatcgtttattggagggaaaatccaaagtttcgtttaaaatgataaacttccttgcgaattatatcataagaaacaataagttcctttcaaatgctattaattcgacttacgaatatgctttcattgatgagtttcaagatactacttatcaacaatacgaaattttcaaaagtatttttttagataaaaaaataaaaataacagctgtaggtgatactaaacaaagaataatgggatgggcgggagcattgcatagtgcatttgagatttttaaaaatgactttgcgattgaacatcataatgaattattaagtaatagaagatcgctgaaaaatcttataagttatcaacgcatgatggaggcattcatgaatcatgctgataacaaacctgagatggagttaatcgagaatgaaggttcagcaaagttaatacaatttgatgaaagcaatatagaaggggcatacatagcattatgtatccaaaaatggattgaaaaaggggttgatgaaagagaaatatgtatcttattcagaaatccgtctaaacattacacggataaaatcatctcatctctacaagacttggatataaagtgccgcatcgagaatacctatcaggaattactcaatgaagcaatagttcagttaatcttaaaaatgctaatgtttacctgcgataaaaagtctattgaaggctggaattctacaatggaacttttatgcaacataagaggggtaaataaaagcagagatattactcgtttggaaaaagagcttagtcgttttataaaatcgaacaaggacatcaatggaaatgttgttgattatatatatggattaataagtatatttggtatcgatgagatcaagtcttacttcccacaatatataaatggaaatggcttggactatactattaattctctttcacaacatctggaaactttaggtatcaaagataataaattagcagctattgatatgttactcggaaataaaacgataccacttatgacgattcataaaagtaaaggtttggagtttaaaaaagtcatcgtcgtaggtcttgaacctggtgcgtattttggcgatgaagaagagcagatagaaaatcaaaaaacagtctttgtggcattttcacgagcgattgaagaggtcatattaactcgctgtgcaaaaagagctaactggtgggatgaagtatgttcacaaaatttttctgagatcccattgataacggatatgctaacctattgtggtcttgaagctgagatttataaagattaa

SEQ ID NO: 71868 - DNA, 2088 bp, Paenibacillus sp. JDR-2
atgcgtattgaaaaggtgaaaattaagaattttagattgctacatgatgctgagattacactggatgagaaaacaacggttattgtaggtcgaaataactcaggtaaaacctcatttactgaggtgtttaggagactattatccgatacgaccgcaaaatttaaacttgaagatttttcaattccagttcacgaagatttttggagagctttcttacttatgaaagaaggacaagaagaccaacaaattcgtgaagtacttccttacatacaagttaccctttcgcttaagtatgatattgaaactgataacttcggaccaatgggtgaatttgtgatcgacttagatccagactcgactcattgtgtcacattgctaagataccagctgtcagatgggaaaatctcctcattatatggtgacatagaatacactggagaacctgataaaacagaaatagagaaaatgaatttttatagagttattaaagaaagagttccactgttatattcgacatctgtgtatgcaattgaccctcaagacagttcaaatcaaaaaaagttggatttaactctatttagggaattgttgcaaacaggatttatacaagctcaaaggggcctagatgatacgacttataaagatagagacatactaggaggaattgtagaacgcatgttagatatagctaagtcggataactcaaaatcagcagataatacgacagtatcactattggaaagcgccgtaaaagagatccaattgaaaattgattctgattttaatcagcacgtgaacaagctacttccggcactttcgttatttggatatccaggacttagtactttgccgttgcttaccgaaacaacacttgacgtaaagagattattggagaaccacactaaggtgaattatccaggaataaatggagtgaatttacctgaagcctataatggattggggtccagaaatctcatatatatcctattccatttatttgaattcttcaaaatgtataaagcaagaaaaactgctgcgaactttcatctcatctttattgaagaaccggaagcccatttgcatccacaaatgcaggaggtatttattaggaagctcacagaaattgctgatgaattctcacgacagtttaatagtggccagccttggccggttcaatttgttataacaacacattctacgcatattgctaatgaagcatcctttgattcaattcggtacttcctgaataaggagatgaatacacatgtcaaggatcttaatttaggctttaataacgattctcaaaatggagataaggagtttttacataagtacttaaccttaacaaaatgtgatcttttctttgcagacaaggctattttaatcgaaggtccaacggaaagaattttgatgcctaaaatgattgagaaagttgaaaatgaatcttctcatgtgagacaactgtcaagcaaatacttatccattattgaggtaggaggagcgtatgctcatcattttatatatatgctcaattttttggaaatacgtacattaattattacagacatagattcagtagaatcaacaaatcaatctaggaggaagaaatgcctcgtttcacaaggtacatttacaagtaatgcgtgcataaaatactggtttaacaataatgatatctctcctatcgctcttttgagtaaaaatgagacagagaaaacaaaaggattagttcgtattgcatatcaggtgccagatgagattgaacatggcatgatagaaattaataaaatgttgaaagaaaccgctgcctcagtagaatctattgcaaagaaaggcaaagataagatggcaccggaaaagattgtttatggtccgactgggagaagctttgaagatgcttttatgttggcaaacacacctcaatttgatattgagggaaataccatctttgaactagaaagttcagcttgggaaaaagcttctaatgttaataaaactaactttgctcttaaatatgcacttgaggatactacttggaatgtccctatatatataaaacaaggcttagtatggctatcagataaatag

SEQ ID NO: 71869 - DNA, 1731 bp, Paenibacillus sp. JDR-2
atgaaagaaagttatgtgcttcaccctgccttactggcagctaatcaagctatggaaaaagtaagtatctgtatccgcgataaaaaaagctttgtattagaagctggtgccggtgcaggaaaaactcatactttaatacatacgttgaaacaagttgttgaagtagatggtgagatttttgtaagaaataaacaaaaaattgcgtgtattacttatacgaatgttgctagagaagagattgaatcaaggacagatcatcatccagctatttttactgcaacgattcatgcgttttgttggtcattaattaaagattatcagactcgtctgcgtaatcatctatatctattggaaaaatggcctcagagattagaagaaatcgataatattgcttcgtatataatctcttatgatttgggcatcccaaaagtcaaagataaacaaatcatgctaggccataatgatgttatttcgcttacaattctcatgttagatgatttaaaattccgaaaaatatttatcaatcgctatccaatattattcattgatgaatatcaagatactgataaacattttgtagaagctttaactacccattttttagataatgaaaatagacttctcttgggtttatttggggatccttggcaaaaaatctacccatcaggttgcggtaaggttgagcatcaaaacttagaagagattgggaaaagagcgaattttcgttcaagtaccaagatagtagagtctttaaataggattagaccggaattaacacaggaggtttgtgacactgaaaaccatggtgaagtgagcatttttcattcaaatgcttgggttggtaaccgaagaacagatggtcattggaaagatgatcttccttctgagatagcacaatattatcttgagagaactaagaatgaactaattaaggctggttgggacttttcacctgagaaaacaaaaatacttatgttgacacataatttgcttgcacaagagcaaggatatcgtaatttggcggaagtttttccacgtaatgagttatttattaagaaagaagatccgtatattgctttctttgttgaaattttagagccgttttgtattgcctacgaaaatcgtaaatttggtgaaatgtcaaaactcttaggtggaaacattccattaattcgctcacacaaggacaaagaaaaaagggctatgcaaatgaaggaattactatcgatacgctctcgaggatctgttgggatggtaattgatcatctattaaaagtaagctaccctccattaacagaaaatgttcaatcactcgaagaactattcaaatccacagaagaattgaccggaagccaaaacgaattgatggaaagaataaaaaaactgaaagaaatatcctaccaagaagttgtagctttggcacagtttattgaggataaaacaccattcgctacaaaacatggagtaaaaggtgcagaatttgagaatgtgttagtagtgctaggaagaggttggaacttatataattactcccaaatgctcgaatatgctgttatagggcctcctccagataaaagagataacttcgaaagaaatagaaatctgttttacgttgcttgttctagaccaaaagtgaggttagcgttactgtttacgcagaagctatcagacgtagctcttaatacactcgaagcatggtttggaagcgaaactatagtatcattgcaataa

SEQ ID NO: 71870 - DNA, 2025 bp, Chitinophaga pinensis DSM 2588
atgaaaatatccacattaacaatcaaaggatttaaatcctttggcccgcaggaaaccaggatcacgctgcgcaaaaatctcgctgcctttattgggctaaacagtgctggcaaaaccagcgcgcttgaagcactgaagcggctattcggctcttcattggcagaaagggagatctacagagaagatttccatattggcaaggatgaaaatagcgacgaaataacagaaagggagctttctatcgaagtaagaattgattttacggaggaggaacaggaagccgtgccgcacttcttttccaatatggtggtagacgatatggatatggatttgtatatccgtatcagactggaagctacctggaaaaaatcggacatgacgcctcagggagaaattgagattaaaaactatttcattaaagtgccggaaggctcgaccgaacaacctgatagcaaacaacctttccctaatcatttcaggagcctgattcaaattctgtatgttcccgccatcagaagaccagccgaacagctgaaatatgcatctggcactatcctctaccgggtattgagaaaaataaactggaaggatgattttaaagaggagtttgatgcgaagatagaagagataaacgaagcgtttaaaggcttaccagagttcgccaccgtacaaacgtccattacaggcttttggcagcagtttcataaggatgaacggtacagagatacgcagatcggatttagcggaagtgattttgaaacggtactcaaacggctggaagtatcttttaatcctacaggcacgcataaatcgtttggtatagatgaattgggtgagggttatcgttccatgttttatctcaccctggtatgttccctcctggatgtggaagaaaagatggctgacactgaggatgaagagtcgatcggcgtcaacagaccgctgcttacgatcctggctatcgaagaacccgaaaatcatattgctccgcaactgctgggaagggtaattaaaatacttaaaaccattgcagagaaggagaactcacaggttgtattgtcatcacatacacctgcgattataaaacggctggacccggaaagtattttgcacttccggatcacagaaaactatgaaacggaagtaaataaaataaaacttccggtaaagaaaagtgaggcatataaatatgtgaaggaagcggtgcataattatccggaaatttattttgcccgcctggtggttatcggtgaaggtgatagcgaggctgtaatatttaaccggctgatggaggtgatgaatgttgattttgatgacaacataatcacgtttgcgccgctgggacaccgttttgttaatcacatctggaaattgttggatgcgttgaaaattccgcatattacgcttctcgacctggatagggagagagaaggtggtggatggggacgagttaaatatgcgatagaacagttacttgaagtaaatgttgaaaagaaggacctgcttgaattaaaagatgggtcagttctgccggatgaagactttaggaaaatgcacacatggtcaataaaggataaagatgatatcaagaaactgaacgactgggttaattcgcttaaagagtataacatcttctattcagtccctttagatctggattttttaatgcttacccattatactgatgcttataaaaaagccatacctaagggaggtggtcccgaaataccggataaagagaaaaatgagcagggatttaaagacaaaactgaaggtgccgtaaaagctaccttaaaatcggaaaaggccactggctttacgtattcacaggcggagaaagaactgatgatttggtataactatcatttccttggaagaggaaagccatctacacatattgaggtgctatcgaatatgaccgatgaggagattattaaagatctgccccctgtatttaatgatgtttttaatgctatttcttccatcttaaaaccaacttcaaagaatgaaaagagtaaagcctga

SEQ ID NO: 71871 - DNA, 1848 bp, Chitinophaga pinensis DSM 2588
atgaaaagagtaaagcctgaagattggcaaccggcggacgatatgacgcttgaacgtacggcgatgaatatcgcaaggcggtctaataacaagctggttgtggcagggccgggagctggcaaaacagaattgttggcgcaaaaggcttgttttcttttgcaaacgaatacctgccgctttccttacaagatcttggccatcagctttaaaagagatgctgcgcataatttgaaagaaagagtgcgcgatcgttgcggagatgatctttcaaaaagatttgagtctttaacgtttgactcctttgcaaaacaaatactggacagatttaagcaggccctgccagaaggatataagataagcgatgattatgatgtggagttaagcgaccggaaaatacttgataactatcgtttcgaggatgagaattatctgaacagcacagatccggaggtagtattgaagctgcatgctgccaccttgcctcattcggccaggactaaagcggaaagaataagaaataagatctggaaggaaatgctcagctcctctccttctcaattatctttcaaaatgataatgcgattggcggagcttattattaaaaccaatccaaagattaaaaaatacttacagcaaacatatcattatgtttttttagacgagtttcaggatacgacggacatacaatatgatctgtttaaaacatgcttcctgggtagtggatcccattttacggctgtaggagatgataagcaacggattatgatatgggccggcgcccagaatacggtgtttgaagatttcatggacgacaccggtgccgctcgtgtggcactgagcacaaatttccgttgcgctccccgcctggttaccttgttgaaccatctgactgaacacttgctcgagaaaacagattttgctactccatcggacaaatggcagccggatcagggcgagtgctcaatctggttgtttgagaacgctgagaaagaaacgcagattcttttcagggaagtaaaagagtggattacgacggagggcattaatgcgagagacatctgcattcttgttaagcagcaattaaccatgtatgcaggaaatctcatagagtattttaacagaaacggaattaaggcaagagatgaaaacaagtaccaggatatgcttacccaggaggtatctgtcttcatcattaatgtattatacctcatctatgatcctcaaaataccaatgcgaaaaaggatgcattcgattttctgagcaatattcatacggagctggaagaccagcagttgcttaaactggagtttgcctttaccaagtttgttaaaacccttcgtaaggattatccgaatcagttctttggtggagacgaaattgaaacgatgatcgctgcaattgtcgatttcgctggcaaggatcgcattcgcgctcattttactcattataagaatataggagtgctgaacaaagcaatagacgatctggaaaaggaactgctccactgctacgatgtaacgaatgatatagtagatgcattagacatgttaattggcaaggataccattcctgtaatgactattcataaaagcaaaggtcttgaataccataccgttgtatttatcggtttggaagatggcgctttctggtcttacgaaaagcagccggatgaggataagtgtactttctttgtggcgctttcgagggcgaaggagagagttgttttcacattcagcgaagtaagacccagcaagtttggaccacgggaacagtcgatgcacactatcaggcagattgtggaagaactggaaaaatcaggggtggtggagattgttgaaaaaaactga

SEQ ID NO: 71872 - DNA, 2343 bp, Chitinophaga pinensis DSM 2588
atgtatctaaaaacgatatgcataaaaaactaccgtaggcttaaagacgttaaaattaatatacaaaaggacacaacaatttttgtaggagccaacaatagtggtaagacctctgccactcatatatttcagtcatttctcagtggaaaggctgacttttccttacatgacttcagcgtcgattgctggaaactaattaaggatatttcccagtcaaccaatattgtcgaagatatttacaagctgccaacaatctccctcgatttatggtttgaagttagtgaagatgatttgaactatattattgacctactacccaatctggattgggcttcgcaaccggtaggaatacgactaatgtatgcgccgaaaggacatgataacttacttttagaataccagactgccaaggcagatgcccagaaaaaggggaaagatatgtttcagccctggcccaaggatctgtccgactacttaaccaaaagacttaaccaggaatatgaaatcaattattttgttttagacgctacacaatttgatcggaactataacatcattgatccctcctacactccccatgctctacatgaagataaagacaacaagaaaactggtgctgctataatcagatctttgatcaaagtagacttcttaaacgcccaacgtcatctctcagataacatatccacaggcagatcggaggatctgtcgaaaaggtttaaccgattttacgatcgcaacctagaaaaaagagaaaacgatcctgagatctataaggctttgtttgattccgaatcactgctaacccagcatctggaaaaggtatttcagcccacattagatagcctaaataaattaggctatccaggttttactaatcctaaacttgtcatcaaagccgcctatagtcaggaatcagtaagccagtacgcacaattgcattattctattggcgatttagaccttccggataagtataatggacttggatttaaaaacctaatctatatggtgattgaaattctagattttcatgagcgatggaaagaagatacagatactaaagcaccattacatttgattctcatagaagagccagaagcacatctacatgcacaacttcaacaggtatttatccggcaaattctaaatatcattaatccaagcgggcagaatgacggcttcaatacccagctgatcgtcagtacccactctccgcatattatttatgaaagtggatttttaccgataagatacttcaggcgaacttccgaagtttcaaaatctccagtgtctgaggtattgaacctgtctaccttttacaatgagagtgaaaaagactctcgggagtttctcgagaagtatatgaaattgactcattgcgatttattttttgcagatgcagccatcttggttgagggaaatgtggaaagattattattgccactgatgatcgaaaaatgccaaaaaagcctgcaatccaattatctatcagtaattgaggtgggaggggcctttgcgtatcgattcgagcaattgatttcttttcttggcttaaccacccttgtcataacagatctggatagtgtgtttccccctaaaccactccctcctaacaatgaaacgacagaaagcgcagataagagcgagaaaagtgaagaagaggataatgaggaggatattgaagaagatgattacgatgatgaggaggatagcgaagaagaggagcagaaaggtaaaacgaaaaaaaagactggggcatgttcgtacagtacgcccgatgccatcacgtcaaattatactttacggcactggttacctaaaaaaacaaaaatagctgagatcctaacctgttctgaacaggagcgtacccgcatccaatcggccaccaaccgcgcttctgttcaagtttgtttccaaaacaaagtggagataaattgggaaggtaaaactgatactaattgcgggcgcacattagaagaagcatttgctttcgaaaacctagaatggacgcaaaaaattgaaaataaacacctcaacctaagagtcattctaaagacaaagcaactaaccgttagtgaaatttcagctcgaataagccgacgagtacagtcatccaatttcgaaaaaacaaattttgcattgggtctattaatggcaaatgcggacgaatggaacgttccagtttatattaaagatggcttatattggctagataaaatgttaaatccaccccacccattcaataccctacctgaatacgtcaatattcatgaggatactatactacagccaacattccctgctgaggaaggagaaaaagaacccaatacttttgaatga

SEQ ID NO: 71873 - DNA, 1887 bp, Chitinophaga pinensis DSM 2588
atggctaccagtagaatcaataaacccgacacttcagctgatcacgaattaaggaattgtattgataccaagcaaagttttgtgatgattgcaggtgcaggatcaggaaaaaccacctcgcttattaaaggactggattacattagaagtagatacggcaatcaacttagggcaaaacgccagaaaatagcttgtgttacttatactaccaatgctgttgatgaaattatcggagatgtgcagggagattctttatttcatgtatcaacaatccatagcttcctttgggagattatcagcccgtttcaaaaagacattaaagactgggttaaacagcgggtacgagagaaaatagcgaaaattcagcaagctatccaagaatatggccctagggtacagcaaaaaactaaggataaagaccaagcagagttcttgcgactggaagaggttagcagattgatagattccgtgaacaattttcgctatgagactggggcagattacacaaagggcataattggacatgctgatatactcagaatggtaccagaattaatacaaggtaagaccctactaaagaaaatagttatacaaaaatttccgtttttactcattgatgaaagccaagatactgcccccaacgttgtcgaatgttttcttagcgtagacgcccaaaagcagtcggatttttgtttaggattttttggagatcccatgcaaaaaatctacttaacagggattggaaaaattcctgaccgagataattggaaaactattgttaagccggaaaattttcgatgtgcttctgccgtattggaactgatcaatctgataagaaaaccggcagatcaaattgaacaaacaggtggtaaaatggaaaacgttggcggtatgctaactccggttgtaggttcagcacggttattcatattacctgctaacgaagagaggtcaacgaatgtggaaaaggtaaggaattttattgctcgcgaggaacaagatcctgcctggcgcgatgatagtggctccgatctgaaaattttagtattggaacaccgaatggcagcaaaaagattaggctttgaacaactgcatgctgcttttaaggatggaacgccagagtccatcggaagcggcttcagcgaaggaaatagctgggctctttccttattccagaaatatatactccctttaatcgaggctcagtcaattggaaaacagtccaacgtgatgactctgcttagagcattttcgccgattttagaaaaagagtatttgcagaagcataaaattagtgcagaagacctgaaggttttggatcaaactataaaagaactagttgccttgtttgctgacccgaacatttctgttgcccaaatcttagatcttattgaaacgagacgtttagctgttcttgatgaaagaatagccgccaagctacgtgatgaacctttattgattgagaatgcagaagctatatcacgtgtacttgagaaatactttcaatgctcagtcaaccaattattaggatatgataagtatataagagaagagtctgtgtactcaacgcagcatgacgtaaagggatccgaatttaagcgtgttatagttatattggatgacgaggaaggcaaaaggtccactttgtactcctatgagaaactactcggacttaaacctctttcggataccgataccgaaaatatctcagagggaaccgaatccgttttggaccgtaccaggagattgttttacgtttgttgttcgagagctcaaaaagatttggcagtaatatggtttgtccaagacgttgatgaggcgctcgcggtattaaaagatagtatattttcagatgatcaaataattatggagcataaactaggttga

SEQ ID NO: 71874 - DNA, 1986 bp, Kangiella koreensis DSM 16069
atggaaattgaaaaaatatcaatcagtaacttcagatgcttttcagaggctgaggctgtcatatttatggagtctgatatcacatgttttgttggaaataatggaacaggaaaatcagcgctaatactggctttaaaaagaatatttggatcaactagagaagagagaaccgttattcgggaagacttttatgttgggtcaggtgaagattacaaagaaatatctggtcgagaactgtatatagaaatcattttttcatttccagagcttcaaacagctgttgatgagtcgcgggaggtgtgccccgcattcagttcagtaatttatgctgatcaagatgataaaagacttaaagcaagaatgcgattagagtctaaatgggatgaaaacgaatacgaagatgaggtgcaatcccagttgtattggataacaacttctaacaaagtagacttcggggatgatgctgaaaataaattccctgtttcggtatatgatcgaaaacacatcaagctaagatacatccctgctttcagagactcaaagtcaacacttaagaatgaagtgaaatcgttaacaaatctacttgatggatatacagatttaaatatttcttctcaagaaaaaatagaagctataagcagagaccttagcaatgaaatccaaagtcttgaatctatcaaaacagccacaagtttattaaaacaagtctggaataacactcatgacaaaacgctaaagcactatcaagagcctaaacttgaagcagcatcaactgagattggggagcttctaagaacaatgactgtgaaactttcaccctcagaagatggtggaagcagagatattaacgaattaagtgatggtcaaatatcacttctttattttacgctttcggttgttctatatattctagaacaaaagcatcattcaggagaattaagaggttttaaatctcttgatagagatattcctgtatttacaatatttgcattcgaagaaccagaaaatcatctgtctccattttacttgggacgggtaatagaggttttgtccactcaaacaaatagtttaaaagcaacaggtattatcacgtcacactcaacgagcgtggtacgtcgaatgcagcgagtggagcaaatccgacattttaggcaagaggtaaactcaactgatcgctactcaattgttaaccaagttttacttccgtcagaaaaagcagaagatgattataagtatataaatcaagcaatacttgctcatccagagttatattttgctaaacttgtaatactgggtgaaggcgattcagaagaaatagtcattccaaaattggcagaagcgttggggtttgacctagatccatcatttgtttcttttgtaaaactaggtggcagacatgtaaatcatatgtggaggttattatcagacttgaatattcctttcttaaccttagttgatatggacttaggaaggagcggtgctggtccattacgaatcaagtacataattgatgaattagaaaagatagataggccctttgcctttccagaaggtgtaagcactcaaaaactacaagagaagcaattaacatacaggcaattaaatgaaatggcgatattgcttgaagaatatggcgtcttttactctttccctctcgatctagatatggctatgattttcgcataccctgactattatgatgcctcaaatgcgcaagatagcgatagagaagtgctagatagagccgtcttaggcgagaattacgatgactatgatgataatggggtagaaatatactcggatgaagaattaaaaaaatatagatatctgttttgcaccaagagtaaagtcgcatcccactataaagcaatagctgatttattagaactggaggtagacgatgtcgtgacagaatgccctgattttctaaaacgtctgattaataagtcatcgaatttgctatcggaatcaaaagagaatgagtaa

SEQ ID NO: 71875 - DNA, 1833 bp, Kangiella koreensis DSM 16069
atgagtaagtaccagtctgtagaatcatggaaaccaagtgacggctttatatctacagaagtcgcaaatgaggttattaaagaaaaaaataacaatctagcaatccttgctggtccaggggctgggaaaacagaaattttagctcagcgcgcaaattatctattgcaaactggactatgtaaatctccacaaaaaatattagccctaactttcaaagtggacgctgccagtaacatcaaaaataggattgatttacgctgtggaagagagctagccagtagatttgaatcatcaacattcgatgcgttcttcatatcactggtacgtagattttctaccctcttaccaagttggattgatataccttctgattttgatgtttatccttttgatcataactggtggtcagattatgagcaaaatcaattagggggtcgtccttttgtcttcaaaaataactattctccgcttgatttaacagctagacccaatgatgaaataacgagactttggaaatactgtgctgagaataaaattgcggattacaagatgtgccgctcaatggcttttaccattattaagaactatagccaagtaaggtacttaattctatcaacctacaaatatttattccttgatgagtttcaggatactacggacgaacagtttgcatttatacaaacagtttttaaaggtagtaatactataattagtgcggttggagatacaaatcaaatgataatggcatgggcgggagccaacccccaaaattttgaaaaattagcgaaggattttaattccaaaactgttcatttgatggtaaaccataggtcaaataccaaaatcattaatcttattaatcatgttattcaagatttaacaacttcaatggaaactccagtcgtttatgtagggactaggaaaggagctccgccttataactgtataggtgcaaaagccttcgatagcccggagagtgaagccgcgtatatctccaagcatatcaatttaactctgagtgaaaatcccacattagcacctagtgattttgcactcatattgagacagagggctcaggattattataagaatgcaattggggaatttctaagtaacgatttaagcctcagaaatgaggacgcattagttgttagtaatggcgtcaaaatacaagacctgatggttgaaccgttatctatattttggatgctactgataagatataaggcaggtcttataaactactcacaagagaaaaagcttgataaaatagcgtcgttttttacaggatataacttaggtcaagagcgagagcgcaagaagttaaaggcatacatcgcacgcctgatgtcttgcattaatttctcagagccagtagagaatactataactaaaatttttgatattgttggaagtgcaaaaattaaattggtgtaccctcaatatagatcgcagtatttcaataaggttaaagagtcattctgcattctttttcaagatgcgctcaataacaacccgaaagatcttaaacaagcaataaatgattatgaaggaacaaatcaagtcaaactaatgactatacataaaagtaaagggttagagtttgatacagttttttttgttgacttccatgatgactcctggtggggacttagacgtgctgtgcaggagaaaaatgaaaagtctcaaagagaagaaaaaaacacctttttcgtaggcctgtctcgtgcagaggagcgactatattttaccaagaatcgtggaaactggccgcctgttcttgtaggtttactcaaggattcaaacttggtagttcaactgcctgatatataa

SEQ ID NO: 71876 - DNA, 2091 bp, Anaerococcus prevotii DSM 20548
atgattttaaaaaagatgaaagtcaaaaactttagattattaaaaaattttgagttaaattttaaagatgaattgtcgctagttataggtaaaaataattgtggaaaaacatcatctattattgttttagataaaatgctaaattcatctaaattattttgggaagatataaatttagaatgccagaaagatctctataaaaaaataattggttttgatataacaaagctggatgaagttcaattattagaaactattaatatgcaattattcattgagtataatgataatgattcatatgagaatattcaaaaattcatgatggacttaaatccagataataacataatagttttagaatttatttcggtaatagctgcaaaaaaaatcatagaattaaaaaacattattagtgaaaaaaatattgaagattttaaatcattttccaaatttatgagtaagaattttgcaaacttctttgaaacgaaaaaatattcaagagggtttgatgttgaagcaaacaaaacaacgcaagatagatcagaagaaattgataataaagatattcaaaaagtcattaaagtggcaggaataagagctgatcgagcggtttctaatgatgatcgtaatcatgttttatcaggtttaactggtaaatatttcagttcttataaagctgcaaaagatgaaagtgaatcggtatttacaagacttgaagaaaaattggaggaagccgataaagaattatataagatttacaatggagaaaaaagtgaaggtgaagaacccattgatggtatttttagtgatgttatagatgttattaaaacttatggtggtgcagaaaatggaattgatatagcaatagagtcatctatttcagagaaaaatttattgtcagataatacaaacttaagttatagacaagggggagattattcgcttccagaaacatataatggattggggtatttaaatttaattggtattttatttgagattgaaaccaatatacaggaattgtttgaacaaccagcagatataaatctcttatatattgaagaacctgaagcacatacacaccctcagttacagtatatatttataaggaatattaaatctcatatcaaagcacatagaaataagttgttgaaagaaaagaataagcagttgcagattttaatcacttcgcattcatcacatatagtttctgaatgtaactttgatgacattatatatttgaagaaaaacgggaatacggtcatagctaagagctttaattctttaaaagaagagtatggtggagatgaacagaaaggatttaagtttgtaaaacaatatttgacaatgaatagaagtgaactattctttgcggataaagctatttgtatagaaggagataccgaacgaattttaatgccagtgatgatgcataaaattgataataaagaaaagccaagagcagatattataccactattatcacagaatatttctataatagaagttggagcgcattctcatatatttatgcctttattttcctttttaggaacaaaagttttgtttgttacggatattgactctgttaaagctgaaaagaaaatagataaaaatggaaaagaaagaactgtatatacgagttgtcaccccgatgagggaacacatacaagtaacgcatcaataaaagaattttttaaagatactggaattgatacatcgaataatcaatttaaggaacttgtagggaaaaatgctgaggataaaattaaagataatatgagaatggcctatcaaataccagaatcttatggtgagtatcaagcgagtagttttgaagatgcatttatagcactaaataaagactttatattaaaaaacaaagaagggttttatcaatatggagctttaaaagatttttcgaatgatgaaatagaaaatggtgattattataattttgctttgaataatgtgaaaaagaaatcggcatttgcatcaagcttattgtattttgataatgagaatggcgaagaagatgaaaaatgggcagttccacattatattgaggagggcttattatggatacgctaa

SEQ ID NO: 71877 - DNA, 1905 bp, Anaerococcus prevotii DSM 20548
atggatacgctaacattggaaaaagaagtattagaagctcttgaatgtataaaaaatggtgaaaattttattttagaaggtggagcaggtagtggaaaaacatactccttaatttccttaataaatgcactcacagaggaattaccagatataaagatagtatgcattacatatacaaataatgcagttgccgaaattttatcaagaatagaaaatgagaatatttgggtttcaacaatacatgagtttatatggtctcttatcagaaaatatcagaatgaaataaaaaatattttagttgagcttattaacgatgataatgaaaagaactttaaaaagccaaaagatttttctgaggatttaatttctaaagaatatttcgaaaatctttatgtagattatgatgagtattattctgtaacgccaaatgaagaaaatagagttaaaatcagccataatcacattttgattgttgcggagaaaatgtttgagaaatataaaaaaatagcggacattttaaaggatattgcagattgtatttttgttgatgaatatcaggatacaagtcctttagttgctgatattttactaaagcatcttgagcaaagcgataagaaaaatgtaattggtttttttggagattcaatgcagtctatatatgacgacggagttggtaatttaaatcaatataatttaactaaaatagtaaagacgcaaaaccgaagaaatccaagagttgtaatcgaagtagccaataagtttagagatgatgatattgagcaaagaccttcagaagatataaatgcacctaatatggaaaatggtactattagagaaggtagtattaaatttttatatggaactgaaataaatgattttataagtgtaaaggggaagaatatttttgaatcttgggatttttctgatggaaaacaaacaaaagagttaaggctaacacataaatataatgctgaaatgactggctttaaagacttatatgatctatataatgctgatttgataactaagcttataagtgggataaagaaaaaaattgataagggaaatttagactgtaataagactttgggagaaataacgttagaggtaaaaccgacatataacaaagtggagctgttagatcaaattaacggaaatgaaatttatcagtcaatatatagtgttttagaagatatgtcatgggaagaagcttacgaaaaatgtagaatcactaaggaatcactcatgtcatataaattaaatggaatgagtggtagatatgaagctaattcttatagagataggattttacgcagattagatatattagaggagattattgaattatatgaggctaatagatttaatgattttctacgaataacaaaattttctattcataatagaaatgataagatttgccttaagcaagcaattgattatcttgtaagtgaagataatcaaacgatagaaaatgtattaaaatttgcggaagtaaaagggttactcaaagaagatgaattgtttagtgattatatttcaaataaagggttttatttatgggagagaataaaaaagataacatttaatcaatatagaaaaagtgttttatatttaaaagaattttcaccaatttgtactcaacatagtgttaaaggtagtgaatatgacaatgtattgcttgtattagagtctgattggaataaatatgactttagaacattatttgggaaaggatctccgaactctaatgttcagaaacgtacaaaaaaattattttatgtatgtataacaagagcaaaaaagaatttaataatatatatgcctactgatgattctgacatattagaaaaagctaaagagtattttggagaagaaaatgttatagaactctcttcgatttaa

SEQ ID NO: 71878 - DNA, 1143 bp, Meiothermus ruber DSM 1279
atgttgacccggcttttggttcgtaactataagagcttggggaaggttgacctcgagcttggtaagctggccgtttttgtaggccccaacggctcgggtaaaagcaacctgctcgatgctttgcgcttcgtttcagatgccctgagtctcaacctggactatgcgttgcgagaacgagggggtatcaacgaggtacgtcggcgctcgagcggtcgccccaacaatttccgtatcgaactgcacctaaccctcgagcactgggctgctaaatatgcttttgacatcgaagctgtgcgcggctacgattatcaggttgctcgggaggagtgccgggtgttttcactgcagaccgcagtctcgtctgagcggtattttgtgctagagcgcggtgagttgaaagcgtccaaccctcggttgagcgcggctagcaaccgtcaagacctatacttgagggctgtttcagcagaaaagggcttcaacgaggttttcgattatcttaccagaatcgccgtctacaaccccaaccctgcggctattcgcaacctgcaggatcccgatgcctaccccatcctgcgccgggatggtagcaacctgcccagcgtcctgcgccagatgcggaatgctccccaacgcttagagcgggttcaggagtttctctcaaagattgttccgggtgttacaaaggttgagcctgtgatcttgggtcacaaggaaaccctctatttttttcagcggatggacaacaagaacgactggcgcttttacgccagctcgatgtcggatggaaccttgcgggcgctggctgtgttggtggctgctttccagactgccgttacggtagcgggggtcgaagagcccgaggtggccctgcatcccggcagcgcttttgtgcttgcggatgccttgatcgaagccagtgaaagccgtcagattttgttgacgacccacagtcccgaccttcttgaccatgagggcttgtctcccgatgctcttttcatggtaggtatgcagcggggaacaagtgaggttcggcccataccagaggaacaaaaacaggttatccgggataacctttttaccgcaggggagcttttgcgccagcgacaactggaactgcccacagtccaagacgcacttctatga

SEQ ID NO: 71879 - DNA, 2430 bp, Meiothermus ruber DSM 1279
atgcctgatttgcgactaaccgacgaacaacaggccatcgtagcccacaacgaggggccggcgctggtgtttgcggtggccggggccggcaagaccaccgcactggtgcaccgcctcgagcgcctggtgcgggagcgggtcttcgagccccgcaagattctggctacctcctttagccgcctggcggtggacgatctcaagcgggcgcttgcgcgctggccccacacccaggccatccaggtctccaccctgcacgccctgggctaccgcatcgtgcgcaaggcggcctcggaggggcttttgaagctggccgaggtcagggatgagggctctgaacaggccctgttgcagcgcaccctgcgacgggcccgcgagttgaagctcgagtgggtctccgagctggagaacctcgaggccgaggactttttgagctacgtgggggcctgcaagggcaacctgcagtatgccgatctgaaaggggccgggctgcccccagcggccctgcgggtggcttcgcaggcccaggcgcccgaggaactcgagtggtacctggagctgtacaaactgatggagcaggtgcggctcgaggagggcctgctcaccttcgacgacatgctcatgaccggctgggaagtgctggtgcgccatccgggcattctgcagaccgtgcaaaaagcctttcaggcggtgctggtggatgagtttcaggacgtaaacctggcccagtcggagatgctcgacctgattacccagccccaccgtaactacatggcggtgggcgacgacgaccagaccatctacgagtggcggggggccagcccgcgctttatcctcgagttcgcccagcgctatggggccaaaaaatatctgatccgcgataccttccgctgccccgcgccgcaggtggtgctggccgggcgggtgatcgcccacaaccagcagcgcgaacccaagcgcctgagcctgaccaagggcttccagggccgggtgcaccttcgcctggaaccccacacgcccgcccaggcccagggcctggtgagcgatatcgcgggcctgctggcccagggccgcaagcctggcgagatggcggtgctggtgcggctctatgcccagaccccctacatcgagcagtgcctgatcgagcggcagattccctaccgggtggtgggcagcacgcccttctaccagcgcccggagatccaggggctgctggcctacctgcaactggccctgaaccccaccaagcacctctggctgcaggtctacaacacccccaagcgctacctgagccgggccctggccgatgcggtctggcggcgggtggagcggggggcttcgctggtggaggcgctgcgggccgagctggccggggccgaggagcgggtggcccggcggctgcgcgagctagccgagctttttgagtggctgggtggggctatagcgcagggcccggcccacgcggtgctggtggccctcgaggcccgcctggactattgccgtcatctgctgcgttcctcgggcttctatgaggtgggggtgggcagggccgagggggtgcgggccttcctcgagtacacccgcgacaagggccgcgtgttcgagctcttgcagcacctcgagcggctggcccaggagcacctgggcgacgagcccgcgccggagacccgcgaacgcctgagcctgatgaccatcttccgggccaagggattggaatggcccctggtcttcatccccgactgcaacgagggcaccctgccctacagcggttcggagaacctcgaggaggagcgccgcctgttctatgtggccctgacccgcagctcgcagcatacttatctttatgccctgtccagcctcccgctctcgccgttcttgcaggaggccgagtaccagcaggtgctgggggcggtcgagcgggtgggggaggccctggagatgaaggccgaggaactctccaccgcccagaccctggccctggcccggggcgcccacgagctgggcctcgagcgcttcttacatcgttggtggaaggccgagcaggcccagcccatcgccgccaaggtgctgcgcctgttcgcccacgccgagcgggcgggctggctcgaggcgctgggcctcaccccggaagccaggggcctttgggaagccttcgatatagagccgggggaggggatggcgggcgagtttgccgacctcgagcgcttcctgctggagcccaaagcccccgaaaagccccccgggctgtcgctggggcaaaaggtgcggcattttcagtttggtgtggggcgggtggtcggcctggaagatggcgtggccacggtggcctttgccgatggggtgcgcaagctggtcctgcgctatgcccggctggaggtggtgggcagtgcatctctgggcaggcccaaaatgggcttgcagggccaggactga

SEQ ID NO: 71880 - DNA, 1791 bp, Pectobacterium wasabiae WPP163
atgcggatttctcgagtccggttaattaatttcgccaacttctccaacgttgatgttgaaacgggtgaaagcattgttattgtcggtgagaacaaagtaggtaagagcaattttattcgcggcttgcagttgattcttgaccctgggttgtccgagcgcgataggcaactgggctttgaacatttttgggatggattaggcgaagaaaaattgggggagacgattgaaatttcagtggatcttactgattttactgacgatccccgattgatggctcatctgaatgattgtgttgttaatccaggcccccccatggtggctcgtcttacctatcgctttcagccaaaaaccgagttaaatcgtgcccctgaatcgctaaaagactatgagtatgtgattttcggtggtactgatcccgatatgcatattggcggagcgcttcgccgtatgttacccatagatgttcagggcgcgttgcgtgatgctgagaaggatctttcaagctggcgcaattcaccattgagaccacttattgaagagctcaccgcgtcgctggatgatgatgctcgtgaggaaattcagactcagatcgacgaggctcaacgggagctggctggtcatgatgacgtagtggcgacagctgaacgaattagcgaacggttggtagctatcgcgggtgatcaacatgccgttccagtatcgctggggcttgctccggctcgcgttgatgctctgctacgcagcttacgcttgttgctcgacaatggtatccgtggcattggtgatgccagccttgggacggccaatctgattttccttgccctgaaaagcctcgagcttgatcgtcttgttgatgacggagaacgagaccatacgtttttcgtcgtcgaggagccagaagcacacctacatccgcatgtgcagcgccttgtctatcgttacttcttgggcactgatggagataatcgtgatgaaagtactccgctgacaacgattctgaccacccattccccacatatcgccagcgttacgccaatcagatccatcgttctgctgcgtcatgacccagaggaagaggagacaattgctgtttcaacggtaaatgcaccattcacgcagcgggatgaggatgatctacagcgctatattgatgtcactcgtggcgaaatatttttttcgcgaggtgttgtccttgttgagggcgatgctgagcgtttccttgtcccagctttcgctgatgcactgggtatcccgctcgacatgcttgggatcactgtgtgttcggtcggtggaactaatttcaccccgtatgtgaaactcctagggccacaagggcttgatattcctcatgtgattctgacagaccgtgatccagtgaacggcaggcatccacttgttcgcagacggttcatcagtctccttgaattggttgaatatgagcactaccgcgactacgaaaatatggatgctgaagatgtgatcggacttgccaacgattacgggtatttcgttaatgagaatacccttgaaactgaactgttcgaaagcggactggctgaggagatgatagatgtaatccgacaggaacttccacaactgaggcaagaggctctaaatacattgcagcaatggctggacgatggtgaagtcgatcaaggtcggttgttgaagctaattgagcgaattggcaaagggcggttcgcccaggcgctggcctcctcggtgtcggaggatgtttgcccggattacattcgtgaagcactggagcatatccgcgatgccgtcgcgtag

SEQ ID NO: 71881 - DNA, 1821 bp, Pectobacterium wasabiae WPP163
atgccgtcgcgtagtgtaagtgcagcctacttagcccaggcttccgagttggctggaaatcctggtcagttagccgcgtataactccctggggcattgcgttgtgcttgccgggcctggaagtggcaagaccaagacacttgtactgaaactggcccgtatcttggccgaggatgttcaggcaccacgtggtgcggcatgcatcacatatagccaggaatgcgcgcgtgagttgacccgtcgtcttgaagcgctggggctcagagatgcaccgaatctctttgtcggaaccgttcatgggttctgtttgcgtcatctgttgatgccttatgggcgattggccgatctgccaatctcatttccgctgtcggtggcttctcagcgtgtgagtgatcggttactgcgacaatctggtgatcggctctttggctcaggtcatccccataagaccattgatctcgggcggcatcgccgttcagtgctggaccgcaacagcactgcttggcgttcagaggaggaactcgctgcctgggccgaggcttacgaatcggcattacggcaggatgggctaatcgactacgacgacatggttgtattcggccagcgtctgatcgtcgagcatgattgggttttgcccttagttcaggcgaaatttccggtcctcgcggtggatgaatatcaggatttgggggtggcgctccatcgtatggtcacgcgtctggtttttgaggggggcgtgcgcttgttcgctgtgggtgattcagaccagtcgatatacggttttactggggccaatggtgcgttgctcatggagctggcaggcagtgaaggcgttgaaacagttaggctccaattaaactatcgttcaggtgcgggtatcgtcagtgcttctgagatggcgctgggtgaggctcgtggttatcgcgcgaatgatccaaaccgtcagacgactattgagtttgtattgtgtcctgatgggatggcggatcaagcgactcatgccattgcacagatcatccctgctgctttggctgctaaaccaggacggacgcttggtgatattgccattctgtacagagactatcgtgccggagatattgtggctgatgcggtgaccgctggtggttttgattatatccgtgtggataacgcagcaccttatcgcaaggttgccttgaccagctgggtggaagattgcgcggcatggtgcgccggcggctggcgtgttggtcgtccgcaattgcgtgggctaatagaccgctacctcgcgtttcatcggacgagattggatgatgcgcaagctcgacgtgaggggcagaggctaaccgcgctgctttgggctctacgcgccgaccaacagcctgcgcgcgattttgtcacgttgctgcgcaatggtatcgttgattcgttgctgggcactgagccggtgcttgcagatcaggctgagcaattgaatcgcatgtctgcagcgcttgccgaaggtggtgcgttggcggcgttggatattgtgagtttgggtgggcgtgatggctcacctgatcaccttaatctgctgacgctccactctgccaaaggctgcgaatacgacgtggtcattatggtcggcttggatctgggcaatctgccgtggcgtggtgagacgccagaaaagctgcgtgagagccgtcgccttttctatgtggggctaactcgagcacgggatgaggttcatatgctgtattccggttttgttgatggtcgctacggcccgatgcgtcaggggcgttccccatttctggatgagctggaggggcggatgcgtgaggctggtttacggcagtag

SEQ ID NO: 71882 - DNA, 2145 bp, Vibrio antiquarius
atgaaagtagcgcgaattgaaatttcaaattttagattactaaaaagctttaccttagacttagaagacgaattgtctctagttataggtaaaaacaatacaggtaagacttcagtgttagcttgcttagataaactcgccgtacaatctgacaaaaaagctattagctatgaggacttcaatgttgatttaatgtcttctattgaggctgtgttgcttggtgagcaaactataggaaatgaagaagaatactctcctttgggcattcagctaaaactgtttataaaatacagtgaatcagatgacctatccaagattagttcgttgattatgagtctagatcctgttgatgacaatgtagtcctttcctttgagtacaaaatagcatttgataagatagttgacctgaaagcagcttatgagaatgacgcggaaaaatttgaaaatagtcctcgtttattcttgaaagagaacctctctgattactttggcccagtggtaaagaaaagtttactgaaaggtgatgaaagtcaatttattgatttgaataaagaaaatattaacctaaaagatattttgtcaattcagttcatcaatgcgaaaagaagcgtaacaaataagcaaaatgataaaactctatcgaaccaaacatcaagtttgtataaacaagtcgatgaatctgatgaacaagtagatgcgtcgaacgagtttaaaaaagagctgcgtaaaacggatactaagctgagtggcatctatcagaacatgtttaaagatgtcatcgagaaagttaacaggtttggtggtattagcccgacagatacaactatcaaagttgcatctacgctacagcatcgagagttgttggaaggtaacaccacggtaatgtatcagcaccaaagccatgaccttcctgaacactacaatggtttagggtacatgaacttaatcagtatgattttcgagattgaaatgctgatgagtaggttaagaaagtcacttaaagaacaacccgctacgattaacttactttttattgaagagcctgaagcacatacccacccacagatgcagtatgtatttattaaaaatattaaaaaactgctaaaggaaaatcgcataagagaagacggtatagagattcatttacaatcaattattactactcattcctctcacatcgtatcagaaagcagctttgatgatattaagtatttgaaaaaagagccgcaatctcatcaagtacaggctaagaacctaaaggatttagagctggagtatagctctaaagaagatcctgaaaaagatgcagagcttaaacagtcatatcgttttttgaaacaatatttaaccctgaatcgagctgagttgttttttgcagataaagcaatttttatagaaggcgatactgagcgggttattttacctgcaatgatgaagaaaatagatcaagagaatgaagttgataatatgcagccgctattatctcaaaacatttcaatgatcgaggttggggctcactctcaaacatttgaaaaattcatagattttattggtcttaagtcgctaattattactgatatcgatagtaataaagaagttcccaaggatgatgatccaactaaaacaaaaagggagaagtgtcgtcctaacgaaactggcgcatctcaaacttcaaattcttcgttagaatttttctttggaacaaaggagttggatttctataaaaccttgagttttagtggcaaaagtttaagtaaatgccctgagaaaaaattatgggagcaagatcaagatggactaattaaaattgtctatcaagtagaagaaaatagttaccttgcgagaagttttgaggatgcttttttccatattaataatgaacttctaaatattgggcatgatgcattcccatctttgactaagaagcattatgataaatatcaagctggtgatatcgatgtttttgaatttgctgaaaaggctgttaatagcaagccttctctagcaattgaagttttactaaatagtaaaacttcaacttctgatggagttgagtcagaaggtgattcaagagaaattgaattttcaaactggaatgtgccgttgtatatcaaggaagggctactatggctacagcagaactag

SEQ ID NO: 71883 - DNA, 1905 bp, Vibrio antiquarius
atggctacagcagaactagatttaaataaaatatcagatgaatcgatagaagcatttaagttaataaaggataaaaaacacttcttacttagtggtggcgctggaagtggaaaaacgtactcattagttgaagtgttaaaagctgtaattaatgatagtccttcgcttaatattgcctgtattacttataccaactcggctgttgccgaaattgaagacagggttttacacgataatctttatgtttcaactattcatgatttcctatggaacaacattaaaaactttcaatcggaaatcaaggaaacattaattgagctaattaatgaacctgaacagttattaataaagaatccaggcgaggagctggtcgaagatgatttttttgatgattgtgaacttataaaatataaagaatatgtgaagatagcaaatggaataatatcacatgatcaagtgattgttcttgctgctaaaatgtttgaaaagtatgaaaggctatgctcaattgtaaaggatagatatccatttatttttgtagatgaatatcaggatacagatccaatagtagttaagattctgcttgaatatatggaaaagtcagagaggcctaatgtcgttggtttctttggtgattcaatgcagtcaatatacgatgggagtgtcggagatctggatatatataccaagtcagagcgaccaatagtatatgaagtattcaaaacgcaaaatcgtagaaaccctagaaaagtcatatgcttagcaaacaaaataagaaccgatgggctcaagcaacaaccttcagatgacaaatatgctccaaatatggatgaggctggagaggtaaaacagggtgagattaagttcttgtattctactagcaatagtttagaagctgtaagacaacacttgggttgggactttaattgtgctgagtcagtaaaagagctaaatcttactcataacttaatcgcaaataaagccaattttcctgagttgatgcgtatctatgataaagataaaatccttgaatatttaaggactaaagtaaggaaagctctggttgaaaccgaacctgaatacgattcttcaggaaaaacatttgctcaagtattagagcatgttgggaaccctaatcctactccaactcaacaagcttatattgataataacctaaaatattttgagatcgccaaatcgcttccatatgatcacattagcaagttgtatgtcgataaagatcagttacttgatgacaaaaaaaactatgtaggcgacgatagtaagcccagctctaatagagatgatctaatcaaacatttgtttaagattgagaactgtattcgtctttacgactccaaaaaatttaaccagtttattaaggctacagattactcaataatatcagtgaaagacaaagtaaaactaaatgccgcaattcaagattttaagttaggtgaagatatatccattggtaaagttatcgaacttgctcataatttaggtttagtcattaaagatgataagctggataagtttatttcagataggcattacgtgtacacacaagtttgcgacgttaagtatcaagagtttcgtaacgtatttaactatcttgagggttttcttacgttctctacgcagcataaaacaaaaggttcagagttctctaatgtgttagttgtgttagataatggtcagtggaatcaatataattttaagtatttgtttgaaaagaatggaactgacagtgttaggcaaaggtctgagaagattttctacgtgtgctgtacacgtgcgaaagaaaagcttgctgtcttttttccaaacccaacgccgaaaacaatcgaaactgctcttgagtggttcggtgaaggtaatgtagtgaacttggacgctagttaa

SEQ ID NO: 71884 - DNA, 1785 bp, Klebsiella variicola At-22
atgcggatttctcgaatccggttaattaatttcgccaacttctctgatgttgatgttgaaacgggtgagagcattgttattgttggtgaaaacaaggttggcaagagcaattttattcgcggcctgcagctgattcttgaccctgggttgtctgagcgtgaccgtcaactgggttttgaacatttttgggatggattgggcgaagaaaaattgggggagaccatcgaaatttcggtggatcttacggattttactgacgatgcacgattgatggctcatctgaacgattgtgttcttaatccgggcccacctatggtggcccggcttacctaccgctttcagcccaaaaccgagttaaatcgagctcctgaatcgttaaaagattatgagtatgtgatcttcggtggcgctgatcctgacatgcatattggtggtgcgtttcgccgtatgttgcccatcgatgttcaaggcgcgttgcgtgatgccgagaaggatctttcaagctggcgtaattcacccttaagaccgcttattgaagaactatccgcatctctggacgacgagactcgtgagaagattcaaacccaggttgatgaggctcagcgggaactggctgatcatgatgaggtggcagcgacagccgaacggattagcgaacggttgattgctatcgcaggtaagcaacatgccgttccggtatcgctcggacttgcaccgactcgcgttgatgcgctgctacgtagccttcgcttgctgcttgacagtggcattcgtggcattggcgatgcaagtctggggacggctaatctgattttcctggccctgaaaagcctcgaacttgatcgtcttgttgatgacggtgaacgagaccatacgtttttcgtagtcgaggagccggaagcgcacctacatccgcacgtacagcgcctggtctaccgttatttcttgggtactgacggggaaaatggtgatgaagggacgccgctgacaacgatcctgaccacccattccccacatattgccagcgtcacgcctgttagatctatcgttctactgcgttatgacgcagaggacaagaagacaattgctgtttcaacggcgaacgcaccgtttacgccgcgggatgaagatgatttgcagcgctatattgacgtcacacgcggtgaaatattcttttcacgtggtgtaatcctggtggaaggagatgccgaacgttttctcgtccctgcattcgccgatgctcttgatattcctctcgatatgcttgggatcacggtgtgctcgatcggtggaacaaatttcactccgtatgtgaagctcttggggccacgggggctcaatattccgcatgtgattctgacagaccgcgatcctatggagggtggagtgccgctggttcgtaagagacttatcaatattttaagcgtgcttgagaacgatgttgaccatgatgatatggataccgatgaggtgattgaatatgccggggagtatggatgcttcgtcaatgagatcaccttggagcctgagctgtttaccggtggactgggcgaagccatgaagtcggttatcgagcaggaattgtctcttagacgagctactctgaacgagatacaggcatgggtggatgacacggaccagcttgataaagcccggttgttgaaactgattgagcgaattggcaaagggcggttcgcccaggcgctggcaccttcggtgtcggaggatgtttgtccggattacattcgcgaagcactggagcatatccgcgatgccgtcgcgtaa

SEQ ID NO: 71885 - DNA, 1818 bp, Klebsiella variicola At-22
atgccgtcgcgtaatgtcagtgcagcctatttggctcaggctgccgagctggccgagaatccgggccagttagccgcgtatcactcccgagggcactgcgtggttctcgccggaccaggtagtggtaagaccaagacgctcgtgctgaagctggcccgaatcctggccgaggatgttgaggctccacgtggcgcggcatgtatcacatatagccaagaatgcgcacgcgagctgacccgtcgtctcgaagcgctggggctcagagaggcaccgaatctctttatcggaaccgttcatgggttctgtttgcgccatctgttgatgccctatggacgactggccgatctgccaattccatttccgctgtcagtagcgtctcagcgtgcgagcgaacgattacttcgacaatctggtgaccgtctctttggaccaaaccacccctataaggctattgatctcggacggcatcgccgttcggtacttaaccgcaacagtgttgcctggcgtgcagaagaggaactcgctgcttgggccgaggcttacgaagcggcattgcggcaggaagggctaatcgactacgacgatatggtggtattcggccagcgtctgatcgttgagcatgactgggttctgcccttggtacaggcgaaatttccgatccttgcggttgatgaatatcaggatttgggcgtggcgctccaccgtatggtcaaacgcctggctttcgaagggggcgtacgcttatttgctgtgggtgatgcagaccaatcgatttacggcttcactggtgccgatggcgcgttactcatggaactggcaggcaggagagacgttgaaacagtcaggcttcagttgaactatagatcaggagcgggcatcgtcaatgcatctgagatggtgttgggtgaggtgcgtggttatcgagcaagcgacctgaaccgccagacaaccattgcgttccagctgtgtccggatggcctagaggatcaggctgtccatgctgtcgcgcagataattccaactgcgttggctgctaagccgggtcgaacgctgggtgacatcgctattctgtacaaggactaccgtgccggtgatgtggtggccgatgcggtgacagctagcggttttgattacattcgggtggacaccgcagcgccttatcgcaaggttgctttgacgagctgggtggaggattgcgcggcatggtgtgctggcggttggcgtatcgggcaccctcaactgcgcggattgacagaccgttatctggcatttcatcgggcaaggctcgatgatgcatgcgcccggcataagggacaggaattaaccaagctgctttgggcacttcgtgccgaccaacatccagcatgcgattttgtcgcgtcgttgcgcaacggtctcgttgattccctgctggcaactgaaccggcactttctgatcaggcagagcagctagatcgcatgactgtagcacttgccgaaggtggtgcgttggcgatgctggacattacgagcctggggggtcgtgacggttcacctgagcacctcaatttgctgacgcttcactcagccaaaggttgcgaatatgacgtggtcatcatggttggcctggatctggggaatttgccgtggcgtaatgagacgccagaaaagctgcgcgaaagccgtcgtcttttctatgtggggctgacccgcgcacgggacgaggtgcatatgctgtattccggttttgttgatggtcgctacggccctatgcgtctagggcgttccccatttctggatgaactggaggtgcgaatgcgaggggctggtttacagtag

SEQ ID NO: 71886 - DNA, 2058 bp, Methanohalophilus mahii DSM 5219
atgattgtctggggtgttgacttgtacttatcaaaaatccacattgaaaattatagatcaataaaggaattagatttagattttaaaaaaggaaaaaatgtaattgttggaaaaaacaattcaggtaaaagcaatatcattaaagctattgatttgcttcttggagaaaaatctcctacatggaataaatctaataatattacagataatgatttctttgaaggaaatacagatgaagacatattcatttggtgtgaaattattaaaaatgatgaagaacatgtagatctatctaactttaaaggagctttttttaaaataaagaataaaagaggaaatcatgtgaaaactaatattgatttcaatgacaaaaattcttttttatattacatgtcagaagattttgctgcagaactgaataagggatatgagtcaaaatataaaaaagaatggatcggagataagccatattgtatcagaagttgtgaagaagagttggaaaattatggccattttgcatttgcctttttctgtaaaaaagatgaagatggaaattatgttaaagagatgacttttttttataaacaaacaaacgaatcagattggtatgtttgcatgaatgccaatttaagaaatactttcttgcaaagtgcgatcgttccatcatttagagatccaaaaagccagttgagaattgcaaattatacatggtatggaaagttattaaaggaatgtatcccgaatgaaaatccagaattagattatgcgtttgaatgtgtaaaagaagcttcaaataaggtatttggagatttgcaaaatcgaatctgttcagggaatacgcaaatagcatttccaaatacaaccatcagctttcaatttaatcctgacacccgacaggatatatacaaaagtacattgatatacgtaaatgatggatttaacaccaagttggaagataaaggttcaggtattcaaagttcggtgataatatccctttttgattactatgtgagaaatgtggcacatacaaatggttcactattggcaattgaggaacctgaactttatttacatcctcatggtagaagagtaatttctgataagttagatcattttttagatgataataagaatcaggtcataattactactcattcaccagagttcgtttgtactcctgatgatagtatcaacctaattgttgtcaaaaaagatggtaacaaaagtgtcgccacgaatttctattttgatgatataaaatcaaaacaaattcttataaaaaagcaaaattcagagatgttttttgctgatgcagtcattcttgttgaaggtgctgacaaatatattttagaatatatagcaagagaaattgggcaacgtcttgaatgtgaagatggtaaacttggtaaaaattggatgaatgaatataatgtatctgttataagttgtggcggcaaacatgaattctggaagtatgccaatgtactgaaatctataaatataccatatttagttataagtgattttgattttttcagagatggattggatacttattttaataaaactggctttgttgaacaaaaagaaaagctaggtgaattaaagtctcaggtaattgaaacaataagaaatgaagatgaaattaagaatattcctaatatatgcgaggaaataataaatgatatttcatctgaaaatctggataatgcaaaaaaacgatctaaagaaatatttgacattattaagaaaaacaatggtacatataaaagattggatgatatcaaaaatgaaagtgtgaaaaaggaaattgaacaatatcttgttaaattaagagaactaaatatattcatattgaccggggaattagagcacttttatacaactgaacctcgtaaatcaaaagaacaaggtgtccttgaaataattaaaaaatgtgaggataaatatattagtgaatttgtagatgttgaagaattcaaagaagctttgattgttttcttggaatcatgtttacaattaaacttgaaagaagaaagtgatgttcatgaaatgtga

SEQ ID NO: 71887 - DNA, 3057 bp, Methanohalophilus mahii DSM 5219
ttgggagatattaaactcaatccttcacaatcacaagcagttgattatacagacgggccacttctcatactcgcaggtcctggctctggcaaaactttgaccattacggaaaaggtcgtaaatattgtggatgaaggcttttctcctgaccggatacttgctttaaccttctctgaaaaggctgcaggggagatggaggagagaattgaaaaccgtattggagaatccagcggaattacggtatccacctttcattcctactgcaatgacctgctcaaggagttctccctgtatgctggcatcaatcagggtaccagacttatctcacaggaacattcgcatgtctgggggataaacaatatcgattcttttggttttgagaatattgcgatccccaacaggccctatgatctcattacaagtttgctggaaggcgtttcgcagttacatgatcatctggtgggtccgcaggagttgcaggagtatgtcaaacgaaagctggatgaaaacattgatgaacaagaaagggatgatctgctcaaacttgccgatcttgccaggttctattcacattaccaggagtacaaacgggatcataatttcatggattacgatgacatgatctcaatggtatgtcgcctgctcgaaagcaatgaagttgttcgcaatcagatccgaaacagatatgattacgttttggtagatgaattccaggatacaaattatgcccagctctatcttatcaatctaattgccgatggcaccaacctgacctgtgtggccgatgatgaccagtgcatctacagattcaggggtgcctatctttccaatatcaaacaactgcaggattactatgcatcccttgaaaaaatacccctggatcgcaattaccggtccagctcacagatagtacaattatcccagcaattgatcgcaacaaacccggaaagggaagataagacgctgcattcccacaatggggatggagagaaaataaaggtggtaaaaacccctgatgacaccagtgaggccaattgggttgcagacgagattcagcggctgattgaagaagagaatattgcgcctgatgagatatttgttcttacccggaaacgtgctgacgggaaaaagtacagtgatgcattgaaaggcaaaatgatccctgtggaatatgtgggcaacctgcagcttaaaaattatcccattgtacaggaagccctggcctacatgcatattgtcgctgatcctttcaataatggaattgcttttgccaggatattggcaagggaaggagtaagtgagcacgacctccagaagatcaatacaatggcaaaaaaactcagccgggagactgaactggaaggagatggcatatattctgtgctgcaacactatcttgatgatgtgccaataatacaaaaggcacttgtcaagtccatccttacccggctcaatgaactcatcgattacaggaagaatcatcttccctctgatactgttaaatatctgttatctgagaaaacggatctttacaaatcgcagttgcttgcagatacctttacttccagaaggaatattcatatactcaattccctgaccagtatggtggaagatctggaacttgtggatggaggttctgaatttgccagggccgttgaatatctggaacttgtcttcaacctggatatcggggatgaggaaaccagtgaggaaaatactgtcaaggtcatgactatccaccagtccaagggtaaggaagcaaaggttgtttttgtctgcgatctggctgaccggcatctgcccctgagattcaccaaaaagcaattcagagttccccgggaacttgagaaaggtgtgcagagggatgtggaggataagatcctgcacctggaggaagagcgcaggctggcctatgtagccatgacgcgggccagggaaaaactgtatctcacatttcctgaaaaatatgcaggtaacaaacggggtgtcaaacccagtgagtttgtaacacagttagattatgaatcaaatcccctgattgaatacattgaaactgacagattgcaggatactgaaactgttgtcacagaatctccattgaaaaagaaacaggatgaatatctcaggcttatgaatatgtatgccggccagggccagatgaagcaggcactggagtcactggtggtgcttacccagttaaaagagatagaggataaaggcaatctggctgtttttaatattgaagactttttgaagactacacccagggatatagaggagctggaggcactggtcaatgaagaaatgccacctcttgtagattctgatatgcgtttttcagcttctaaggtcaggcaatacatggaatgtcccctgaagttcaagtatagcaatgtactgaatataccgattccacaaaagacattcttccagacaggaactgatgtgcattctgtgtttgaacaactctccaggtacaggatgcagggcaaatccattgatatggaacttgccaatcgtatcctggatgaaacgtgggatggttctgtttttgattcgcagacccacgagcagcaggaacttgaccgagtcaggcaaatgctggaatactggtttgagtttgagaaaagtaatgtcaatgaaacgattgctgtggaggaaaagttcaatctgaaacttgacggagcacagtttggaggagtgatagaccgcatcgaccaaactcctgagggcgagtatattgttatcgattacaagaccagcaaaagtccattgagcaagaacaaaatgccagaggatgtacaacttgccctgtactgtcaggctgtcagggagaggtatggaaagtatccggtcaaagcagggctgatgtatgtcaatccgaacattcgggacctcagattaatggatgtgaaccaatcacagatcaattcagtacttgatggtgtcagggagattgtggcagacatcaaagccgaggattttgagatcagggaagagccgaactgttatttctgtgattataaggggatttgtgaatggtacaaccatcaatga

SEQ ID NO: 71888 - DNA, 1827 bp, Aromatoleum aromaticum EbN1
atgcgcgtgtcgcgactgtccatcgagaacttccgcggcattgccaatgccgtgctgcacttctctgggcataccctcctgatcggtggcaacaatgttggcaagagcacgatctgcgaggcgcttgaccttgtgctcggaccggatcggctgaaccgtacgcctcccgtcgaggagttcgattttcgcaatgccaactacctcgctgatgacggcgagacgatcgttccattgcgcatcgaagctatcctcgtcgacctcaccgatgacatcaagactctatgcgcggcaaatctggagttctggcacacaagcgaaaagcgtctgctgactgaaggtgagatcgctgcggccgacgacccccaggtcgagctctgtctgcgcctagtcaccgtcggacgctacgacatcgacgaagaccagttcgtcgcccgaacgatctatggtcgcaccaatgaagagcccgacgaagaacctaagtccatcccgactcgcgtgaagcgagccattggcttcctctacctacgcaccatccgcacagggtcacgagccctgagtctcgaacgcggcaccttgctcgacaacatcctccgaatgaaggaagcccgtaagggcatgtgggagagcatccgcaaacgcctggctgtgcttaacccgccgatcgacgccgatgcaaccgagttgggtcccgttctggacgaaatcgaagcgcgtctagccgaatatatcgcgccgagcggtgaaggccgttcgacgcgcctgtttgtttcccaactcacacgcgaacatctacgtaaaaccatcgcctttttcttgacgatgggccaaggcgaagctgccgtgccgtttcagcagtccggcacgggaacgctaaacaccttggtgctagcactgttgactttcatcgccgacctcaagaaggacaacgtgattttcgcgatggaagagcccgagatcgcgttgcctccgcacacgcagcgccgcattgccaactatctactcgaagagacctcccagtgcttcgtcacgtcgcattcaccatatgtcatcgagcgcttcgagcccgaaggcatcgttaaactcgatcgcaatgatcaaggcgaactgtccggtgtcgtgatcaagctgccggcgggcatgaaagcgaagaactatcgccagaacttccgccgcgcgattgccgaagccatgctcggccgcggcgtgatcgtcggtgaaggcatcacggaacaggatgcgctgctgctcgttgcgcacaagctggaggagcacaacctcgacctcttccctcttgatgtcgcggggattagcgtgatcaatgcggatggcgatggcaacctggagaagctgggcgccttcttcaaagagatcggcatccccgccttcgcgttctttgatcggaagaagcgcacggaccaggaaatcatcgccctgcaaggcacctacgcaattaccaaggagatcacgcagaaaggcgctgagatgttgatggccgaggaaacgccactggatcgccaatggcagtttctggagctactgcgcaacgaagacagcgaaggtcgctttggcatacccgttgtacggcccatcgatgatgccgtgcgcgcccttgccgtcaaggcgctcaaggggttgaagggcgaaggtggcgccgcgcggctactcgaactgtgcgccgtgggtgaacttccgcccaccatcacgggctttctcggcgaaatctaccagcgctaccccaagccgaaacgaagactgaccgccgtcgccgaagcgcccgccgatcctgcgatcgaacaggaagacactgccgtcgctgcgggagattga

SEQ ID NO: 71889 - DNA, 1740 bp, Aromatoleum aromaticum EbN1
ttggcgcttgtgatctgtccgcagcggcagagtgtgctagacgcgatagggccagtcctcgtcaccggcggccctggcagcggcaagacaacgatagccctggcgaaggcccagcgcctcatcgcagtgggtctgccgccgggccagacagtgctgttcctcagcttttctcgggcggcggtggcccgcgtcgtcgaagccagcaaggctcagttgcccaaggcctcgcaaagcaaactctcgatccagactttccattcgttcttctgggagattctcaaagcctatggttacctgctgggtgcgcccaggcggcttcgcctgctgctcccccacgacgagactgccatgcgtcatcagtttgagagcgagggaggcaactgggcgacggagcgcgagcgcctgttccgcaaggaaggcttggtggcgttcgatttgttctcgaccaaggcccatgcattactggccgcgagcgcgcgcctacgttcgctcttctcctgccgtcatccgatgatcgtggtcgatgaagcgcaggatacggccgacgatcaatggcagtgtgtgcggttgctgtccgaaaacacacagttggtctgtctcgccgatctggatcaacaaatctacgacttccgacctggggtgagttcggaacgaatcacgcatatcatggaggcgcttcaaccattgcgggtggatttgcagggccaaaaccatcgcagtcccaactccgaaatcgttacctttgccaatgacatgctgctcggaacgccacgcggcgccgcataccaaggcgtctcgcgtatgaacttccgggcgaacgccgacagacgggatgcagcgatccgttcggccgtcggcattgcgatccaaaaggccaaggcagcggccacgccaaacgatgtcgaaaacttggcgctgctggcgacctggggccgcggtgtcaacatcatttcgcgcgccctaaatggcgacggcaccaacaagagtatcccgcaccgcgtaatgatagatgaagcgtcggttctgctgtcgagccggatggtcgccttcctgcttgagccgcgcccagcggagtcagcggaactaaccgatctcgccgatgcactggacctggcggcggcggtattccgcgcgcgtggcggtaatggaaacttgtcgcaagcgcaacgcctagcgataagcgccacgcaaagccgcgcggggacagcgccgcgcgccaatggtgttgctgcgaagttgctggacgcattgcgcaccctacgtgtccataatttctcgggcgagcccaaacgggactggatcgaggcgcgacgcattttgcgcgaggctggcgccaacccgctcgaaagcatcgccaatgacgcagaacaattggtcgcgttccagcgtggtcgacgcatcgccagcagtcttactgacttgtggcagtcgcaggggaattattgcaatgctcggaccgccttggatgccgcgctggcggaagaccaactgctgtcgggcggcaatgatctgcacggcatccaggtgatgacagtgcacaagtccaagggcaaggagttcgacgcggtgatcatcttcgatgacccaaacagcagcccgttgattttttgtcctgaggacgcgccgcatccgcgctgccggcggctgctgcgcgtcggtatcactcgagctcgacaccatgtcttgatgttgactgacatgtaccgaccatccgagttgatgacgggacatcgtctatag

SEQ ID NO: 71890 - DNA, 2076 bp, Bacteroides fragilis NCTC 9343
atgtatatatcgaaggtatcattagtgaattatcgcaattttgagaactcatttttcctttttaataaaggaataaatactataattggagaaaatgcatctggtaaaactaatttatttagggctattcgtcttatattggatgataacctattatcttctgcatacaaacttaatgaaaacgatttcaatagaaatttgataaattggaaaggaagatggattataataagtttggaattcagtgaaatatcaaatgaagaagctatccaagctttattcgtttatggaagtggagtcatagcagatgataaagttaaaaaggctacttataatttattctttaggcctaagcctgaaatcagaaaacaactttcagaattaaaagaaggagatcatgatggattaaattttattttagataaaattactatcaatgattatgagactttttttacagggaagagtactgttgattttaatgataaaaatgtacaacgtgaattgatgggagactttgaaaatgtaattttcaattatgaaatagatgaatcaaagtttggaggtcgtattcctcatcagttatctataagcaaagaggttgcatttactttcattaaggcattgcgagatgttgtgtccgattttcaagataataagaagaatcctttattgacacttctaaaaagtaaaagtgaagagttaaatgataaagattcagagttaatctcaaataaagtaaaagatttaaatagaacaatagaagatttaaatgatattaaggaaattactaataatatttccgaaacaataaaagaggcagttggtactacgtactctccttcttcattgtctataaaatcaaatcttccaaacgaggccgaaaaattatttcatgcattaaaattgtttataggagaaccgggagaggattatgaaggtagtattcatgaattaagtttaggtggggcaaatttaatattcctaacattgaaacttcttgagtataaatatagaaaaggaaaagatcgcattgcaaactttcttctaatagaagagcctgaagcacatatccatacacatatacagaaggctttatttgataaaatagaatacgaagatacacagattatttattcaacgcattctactcatatttcggaggtttcaaatatctcaaatatgaatattataaataggtttaagaattattctgaagtttatcaaccatttataggcctaaatgatgaagaaataatgcatatagaaaggtttttagatgccataaggtgtaatatactatttgcaaaaagtgtaatcttagtagaaggagatgctgaagaaattctaattccagtaatggtgaagaatactttaggagttagtttagacgaacttgggataagtttaatcaatgttagaagtactggatttgaaaatcttgcacagttatttcataatcagagaataaagaaaagatgtgctattattacggatttagatgaatctataacaggaaaagatacagaggcctcaaaaagaggtttaagtagaaaagcaaaattagattcaattaaaaatgcaaatgaatggatatgtccattttatgcaccacatacttttgaggtagaatttcttggaaatggtaataaagatatagtcttatcaacagttaaagatgtttataaagataaagacacgattgaattgtctgaacaagaaataaattctagtgatataaaggaatacggaaaaagaattttaacaatggcaaattataagggtaaaggatggtatgcaatacttttgagtaattatataacgccatcagtgtgtatacctaaatatatattagatgctattgtatttgcaaaatctaaattttcaaacgaattaattgttcaaatgctagaatatgtattagatacatatgatgaagatgaagaaattgataatcttaaaaacgaattaaaatcgtataatgaaggacgtacttcttttgacgatattaagaaatctttagaaggagtattgaatgataatgaaccaatattgtatatattaaatcaactttag

SEQ ID NO: 71891 - DNA, 1779 bp, Bacteroides fragilis NCTC 9343
atgtttgtttggggaaaaaatgatttgaatccagagcaggaaaaggctatatataatgaaaacagtatcttattaatagcatgtccaggaagtggaaaaacaagaacaataatctataagatagcttatgaactgtctaaattagaatccaataaacagtatattattgctatcacatatacaaatcgtgctgcagatgaaataaaagagcgaatagaattattgggggtagatactgaacaactatggattggaactattcattcattctgtgttgaatggattcttaaaccgtaccatatgtatctagaagaactaagatttggatatgatattattaatactaatgatactgagaattatctagtgtctttatgtgcttcatattcaacaccaaagaaaaaaattacatattgggattgtctttgttattgcttcacatcggaaggcttgaagataaattgcaccaaaccaacaataaaggagactgtagaattaattatctatgattactatcagaatttaaaagaaaagcatgaaatagattatggattaatattatattattcatattgtcttttgaaagaaaatcaaagtatatgtaagactctatctaatatttttccttatattttaattgatgaatatcaagatacaaaagaattgcaatatatgattttaggtgcaattttaaaaaccggaaaagagaataaagcttttattgttggtgatccgaatcaatctatatatggtaatttaggaggttttccaatgaataaaactcaattggaaaatgtaacgggattatattatgacgagttatcattaagtaataattatagatcatcatctcttcttgtatcatattttgattactttaaaacttatgcaaacaaaatagaggctacaggaaaaacgaaggactaccaaagtgttattagttataataagacaatttcaatagaagatttagaaaatgaaatagttcgtataattcaaacaaatattgatgaatatcatatctttccgaatgaaatatgtatacttgcaccacaatggattcatttatctggtttaacaagaaacttaatggcacgtttacctcaatatagttttgatgggccaggtatggcaccatttgcacgtgatatagataatttttggtataaattatcacgtattatattaacagattctactccgggtttatatatcagaagattacgttgggcaagtgaaatagtaactaatctaatatcgattggagtaactaatgttgatttatctgccaaacaaatattatacatttgcaataatatattaataaacgaacaagatggcttggaatatctaaagaaatttttcaatgcatttcttgacagggttaatattgacattaatcagaataaatatttaaaaatgcattatgatgcattttttgatagttctaaaaaacgtatcgagagattgaaaaaggaaggtgcagagtttataacgaacattgatacttttagaaaagtctttcaacaaaaaaaaggaattactatctctacaaaccatggggtaaaaggagcagaatttgatacagtaatagcttttgggctgttagatggctatgttccacattttagtgagctaaataaggaagaaagcgccaaacgcatattgtatgttatagcttctcgtgctagaaaaaatttatatttaatatctgaacagggccggaagaaatatccaacacaaattctcgatcgttataaatatccatataatggataa

SEQ ID NO: 71892 - DNA, 2082 bp, Pseudoalteromonas haloplanktis TAC125
atgaaattagctaaagcctttattaggaattttcgtcgccttgaagaggtcgaagtcgattttgagaagtctgaaactgttttcgttgggccaaataatagtgggaagacttcggcgaccagcatctttcggtgttttctctcttctagggattttaaaattcatgatttctcgattcaacgcatctcagagattgaccattattcacccgagggagatatcactcttccttccatagaactcgatctttggttcgattttgatcccgaaaacatctctttcggtcgcgcttttgccttactttcaagtgtttctatagaaacatatgaagtcggcatccgctgtaagtatgcagtagatgacatttccaaattatgggctgaatatgacaccatttttccaattgatgatgacggtaaacgaaaaagaagcttaagccattttttaggccttgatggtaatttcaagaaccatttttccgttcagtactcttcactttcaaggctggataacgatgagattgaggaaacaatactcaagctctctgatggcaaacgcatattgaattctttggtgcgagcggacttcgttgatgcccaacgaaacatgaatgatgatgaggaagctagtcgtagcagtaagctctccaccgcgtttgcctcgttctatcgcaataacttagaccaagttgatatcaacgatgccgccatccaaattatcgatgagaacaacgaaaaactcacggaacattacgatgagcatttcgggagccttatgggtgtattgaataacttgggtgtacctgcagcacatgaacgtcgtttgaagataatttcatctatcagtgccgatgtcgcactacgaggcagcacagacttaatctacatagatgcggaaactgctcatgaacttcccgaggcatataatggcttggggttcaaaaacctggtgctaatggcgatccagatccgggattttcagctgcagtggttgcaaaccctagagaaccggccattatgccacctaatctttatcgaagagcccgaggtccatttacacgctcaagttcaacaaacattcatcggtaatatatggaatattcttaacaatctcgatgaagatggaattggtagtccgcaacttgttattacaacgcattcatcacatgttctcaattcagttgattttgaaaaagttaggtattttcgaagatgtcatcggtcagaagaagatcctactgtgtctcaaattctacgcgtgtcagagatacataacctgagggactttcaagcttcagcagtctctacagatggcggtgaagtagatgcagatgctgctcttgattttttaaaacgctacctagctctgatccattgcgacctctttttctctgatgccgcaatattgattgaaggcactgtggagcggcttcttctaccacagatgatcacgaagacatcaccaaacttgaatacgaagtacctcgctacgctagaagttggcggggcgtatgctcatcgattcgcagaactaatgaccttcttgcacattccctacttggttatcaccgacatagactcggtgaagcctccagagggtggcggccgagccaaagcctgctgtgccgttgatgctggtgcaataacttctaatgctagtctcaaagacatgtttgtaggaaaactgttgatcagtgatttcaatgagattcccgctcaagatcaatcgcaggctgatcttgaccgttttgttgcttttcagcgtccagttgaagtggattttttagatgagcgtataacggttcatggtcgaactttagaagaagcattcatctatgaaaacatccaagcttttggtggaggagaagcgtttaaaggtgttgtactcccagcggaagctaaagagttgaatcagtcaatatatgaactaattcgagaatcgagcttcaagaaaaccgattttgcactcacagtcctgtcttctgatgattggcaagtaccattatacatccgtcaaggattggaatggcttgaacggaggctacaaagccaggagcaggcaattgaggaggtaagcaaatga

SEQ ID NO: 71893 - DNA, 1848 bp, Pseudoalteromonas haloplanktis TAC125
atgaccaaactgttcaagccgactacagcagataaggaaatcgaagaatgccttgtggccgctcagtctttttctgtagtagcaggagctggttctgggaagacaacttcactcgtgacagcactaaatttccttcgtgacaaagttggaagtgatttaagaaaaaatggccagaaaatcgtttgtattacctatacaaagcgagcaaccgctgtaattgaggaacggcttgggttcgatgaactttatttggtttcaacaattcatagtttcctttggagttccatcagccgatttacgaaagatattcgtgtggctcttcgtgatagcctcattccaaaccacatcgcaaaagcacgtgaaaaagacaatggtcgtaactctcaatcagctcagagagcgcgcgctcggattgttgaattgacggaggaattagaacttttagatcaagtgactacgtttaaatatgatgagagccagtttagcagcttttcaaaaggacaaatcggtcatgatgacgtcatcgacttagctgcatacttgatttccgagagtcttattttgcaacgtgggtttggtttccagtttccctacatttttgtcgatgaagcgcaggatacatttgatagtgttattgccgcattcaacacaatttgttcgggtgaaggtcttccgatggttgcctattttggcgaccctatgcaacagatttatgataatggagttggtgtttttgatgggcctgaagggttccggttaatcgagaaagaggaaaattttcgatcggctacctcaatcgttgcgctgactaataagcttcggaatgacattcagcaaatgcccgctggtgatagcgccttgaatgtaggtagtgtgttgctgaccttgattgaaacagaagcacctgctgggcctcgtggaagatatacacccgaacaattagacctgtctctatcgaagtttgatgaagcactgcaatacatcggttggcaggaaaataaggaggctaaaaggctgttcttggttcgccagatgattgcaagacgccttggtttttcatcactacaaaatctattcacaggagtgtatgcctcgaacaaagcacaagatgagtatatcgatggggatcatttcttagttaaaccatttatcaaatcgctatgccccttgatagtttcaatgcagaatggcaacaaaaaacagattgtcggtatattgcgggaagagacgcctgctttcgatatactaggcataaataaggatcgccctcttaaggaaatgctagatatcgccaaagatcttgtaaacgagctttccgaaatgtgggttgagcgtccaataggagatatcttaaggtatgcaaaagaaaatcgactttgcactatttctgagcgtttggcagcaacattagatagagaaccaagagttgaggcttacgataacgcgattcacgctgaagaaaaatctgattggttagccgacgaatttttatcaatgtcaacgaatgagctcctcccatattacggattcgtttctgatcacacggcactcagtactcagcacggatcaaaaggggaagaatacgaagatgtcttagttgtttttgatgatatcgaagccagctggaacatgtatagcttcaataagcttctgacgcccgctgctgctggagatggcacagaaggtcaattagctcgcagtaggaaattggcatatgtttgcttttcacgagctcggatgaacctcagaatatttctttattgtcaggatgcaaaagcggctcgtgctgaactcgtcggaagtgagttattagatagcgagcagatagaaatactgccttcgaggtga

SEQ ID NO: 71894 - DNA, 1785 bp, Herminiimonas arsenicoxydans
atgagggtttctcgggtcaggttgatcaatttcgccaatttctcggatgttgatgtcgagacgggggaaagtatcgtcatcgtgggagagaacaaggttggcaagagcaatttcattcgcggcctgcagttgatccttgatccgggcttgtctgaacgcgatcgacaactggggcttgaacatttctgggacggacttggcgaagacaaggttggtgcgaccattgaggtctctgtggatctaacggacttcacaaacgatccccggctgatggctcacctcaacgattgcgtgattgatcctggcccacccatggtggcccgactcacctaccgcttccagcctaaggcgggcctggggcgcgccccggaatcgttgaaggactatgagtatgtgatcttcggtggcaacgatcccgaaatgcgtatcggcggcgcacttcgccggatgttgccaatagatgttcaggtagccctgcgtgacgctgagaaggaccttgcgagctggcgcaattcgccattgaggccactcattgaggatcttgccgcgtcgttggatgatgacgcccgtgaggagattcagaatcaggtcgaccaagcacagcgagagctggctggacacgaggaagtggtagcgacagcagaacggatcagcgaacggctgatcgcaatcgccggggggcaacatgctgtcccggtatcgctcggacttgcacctacacgagtggatgcattgctgcgtagccttcggctgcttatcgacaacggtgttcgcggtgtcggcgatgccagcctaggaacggcgaatctgatcttcctggccttgaagagcctcgaactcgaccgtctcgtctccgagggggagcgcgaccacacattcttcgtcgtcgaggagcccgaagcgcacctgcatccgcatgtccagcgtcttgtctatcgctactttctcggcacaagagcggaagatgaggacgaagcccctccactgacgacaattctcactactcactcgccgcatatcgcaagcgttacaccgattaggtccatcgttctcctgcgtcataacgcaacggacgggaaaaccgtcgcggtttcgaccgcgaacacacctttcacacagagggatgaagacgacctccagcgctacatcgacgtcactcgcggagaaatattattttcccggggagtgattctggttgaaggggacgccgagcgcttcatcattcccgcgttcgccgacgccctcgggattcctttcgacatacttggaatcactgtgtgctcggtcggggggacgaacttcactccttatgtgaagcttttgggccctaaagggctaaatattccacatgtaattttgacagatcgcgacccggtcaatggcaaacctccactagcccacaggcgattaattaatctcttaaacgaggtcgatgacgaatatggttacgatgacctggatatagatgaggtgctcaaatacgccgcagagtttggatacttcgtcaacgagagcacgctggaatccgacctatttgccgccggaatgaccgaggcgatgaagtcggtaatcgagcaggagttgccgctgaggcaagtcacccgggacgcattgcaagagtgggtggatgatccggatcaggtcgatgaagaccggctgctgaagttgattgaacggattggcaaggggagatttgcacaggcacttgcgccgtcggtgtctgaggacgtttgcccggcctacattcgctctgcgctggagcatatccgcgatgccgtcgcgtaa

SEQ ID NO: 71895 - DNA, 1767 bp, Herminiimonas arsenicoxydans
ttggctggaaatccagggcagttggcagcttacaactctcaaggacattgtgtggtactcgctggtcccgggagcggtaagaccaagacactcgtcctaaagctcgcccgcatcctggccgaagacgtcgaggcccctcgtggcgttgcgtgcatcacttatagccaggagtgcgctcgcgaactcgctcgccgaattgaaaacttgggacttcagcaggcacctaatcttttcattggtacggtccatgggttctgtctgcgtcatctcttgatgccgtatggacgcctggccggcctgcccatatctttcccactttcggtagccactcaacgagtcagtgatcggttgttgaagcaaactggagatgcgcttttcggccagaaccatccgtacaaagttattgacctcgggcggcatcgccgttccgtgctcaatcgaaatagcgtcgcttggcgtagcgaggaggaactcgctgcctgggccgaggcctacgaggccgctctgcgcgacgaggggctgattgactacgatgacatggttgtcttcggccagcgtttgatcgccgagcacgactgggtactacctctggttcaggcaaaattccccgtgctcgcggtggatgagtaccaggatttaggcgtggcactgcatcgcatcgtcaaacgccttgccttcgacgggggtgtccgacttttcgctgtcggggatgcggatcagtcgatatatggatttacgggagctgatggcgcgttgctcatggaattggcggctcgcagagacattgagcctgtccagcttcaattaaattaccgttctggtgcagggatcgtgactgcgtcagagatggcgcttggagaagcccgaggctatcaagcgagcgatcctgcgcgacaaacgaccatcgaatttgtcctgcgcccgggtggtatggcggaccaggctgcgcacgccgtcgcgcagatcattccggcggccttagcctccaagccgggacgaacactgggcgatatcgcgatcctatacaaagactatcgcgcaggcgatatcgtggctgaagctgtggcaaccggtggtctcgatcacatccgtgtggataccgcagcaccttaccgcaaggttgccctaacaagttgggtagaagattgtgcggcgtggtgcgcgggtggctggcgtgttggacgcccacaattgcgtggactactcgaccgctatcgcgcatttcatcgggcgagcttggacgattcacaggccaagcgcgaagagcaagagctaaccgccttgctatgggagctgcgtgctgaccagcaacctgcgcgagaatttgttgcttcgctgcgcaacggtgtagtggatcatctgctggcggctgaattggcgctcgctgatcagaaggagcaactggatcgcatgacggcagcgctcgctgaaggcggtgcactggcttcgctagacatcacgagtttgggcggtcgggacggttcgcccgatcacctgaatctgctgacactgcattccgcaaagggctgtgagtacgacgtcgtcatcatggttggactcgacctcggaaatctgccgtggcgcaatgaaactccagagaagttgcgcgaaagtcgccggctcttctatgtgggactcacacgtgctcgcgacgaggtccacatgctgtattcgggcttcgttgatggccgctatggccctatgcgctttgggcgctcgccattccttgatgagctggaggcgcgaatgcgtgccgctggcatttga

SEQ ID NO: 71896 - DNA, 2049 bp, Escherichia fergusonii ATCC 35469
atgtgtcccacaaattacgcgcaagggtttacttttctctttaataccttgaaattattttatttttttgctaaatcgttggctttggattttaaacagaaaaagcaatttgctgatgttatcaggatggttactcatatgtttttaagcaaattaaaaataaaaggctttagatgttttaatgatgaatttaatatttcattaaatgaaggtcttagtgttattgtaggtgaaaacggggctgggaaatctgctattataaactcaataaggcaattatttattgattcagaatcagagcgatataacataacagaaaatgattttcatagcccattcagtaatcctccaaaagcaagtgattcatttacaattaatgcagagttttctaatttagatgcaaaggagataattgccttacttccttggactgggaattcagatgtagctaaattaaatttacacgttgagaataaagaaataagagggagatataaaaaatcactttggggtggtgattcgcaaaattctcaatttgattatgaattattagacctaatttattgtatatatctccctccattaagagatgcagaatcaaaactgaccaatggtcggcagtcaagattatcgaaacttttaaaagctataaatagaaaagatcttaaaacacttaaaaagagtggtggagtgcatcctttagtagataaagttaataccttcaatgatgaattatcaaatagtgatttatacagtattaaagctgcaaaccaattaataaaaaaccagctacagaatgctatagggcttaattttgggcagaacacagcaattcaatttgcagaaagtgactttactagaattgtagaaagtttacggcttatatttttccctgacttaacagagaatgataccaaactttttagaaacttagagcaaaacagcttaggttataataacctcctttatattgcatctatattagccgagcttactctaggcaacgaacaagagtcatctacttgtagagtgttattaatagaagaacccgaagctcatttgcaccctcaacttcaaataagattacttgagcatttaaaaaaagtatccgaagacaaagaaaataatgttcaagtaattgtcacaactcattcgacaactcttgcttcttcagtcagtgttgattctatcattcacttatccaaatcaacttccccagtagcaacacgtataaaagactgtggattagcaaaaaaaagtcaagagttcattgatagatggatggatgtaactaaatccaacttgcttttcgcaagtggtgtaattctcgttgagggtatagccgagcaaatgctattgcctgttttagcaaaagaggcattagctagtagagatgcagggaaaaactccttatcagatttaggtgtttctgttataaaccttaatggtatctattttagacacttcatgggaatatattgtaactttgcaatcccaagtgaaaagacaaagcatgaaggattaaacatacctgttcgctgtgcaggattaacagatcttgaccctccaaaaaagataaaagaatgtgtagaagaaaataagttcattgaaaaaatagttatcccccatgatgatgaaatgtatgatggtactaatcatgctatcaagctcgtaggagagataaatagttctaaatatgcaaggctttatgtaagtaaatacaaaacacttgaatacgatctggcaatgacagggaataacattgctgttatgtcaactgtactttatgaaatttggcctacagatggggaaataaagaagaagataaaaaaaattatggatgtaaatgacgattggtcgaaaaaaaaatctagcgaacgagctgtgattgcaaatgagttattacaatatatcgagaacaatgagttaggaaaaggatatttcgcacaaagtctttcagataacatattaaataatagagttaaatttgaaacaccagaatatattaaaaatgctattctctgggtatgccaagatggagaggtataa

SEQ ID NO: 71897 - DNA, 1785 bp, Escherichia fergusonii ATCC 35469
atgccaagatggagaggtataaagatgacgcattttaactctcaacagatggattatatcgaatcctctattgcctctagtatttatcttgaggcgtgtcctggtagtggaaaaactgaagtcattgcagctaaagttgcaaaggagataaataattggacacttagtcctagtggtatagctttattatccttttctaatagcgctacagatgaacttttctcacgggttaaaaagtactcccccgatacggtcagtagattcccacacttcattggaacttttgatagttttatatttaagtttttaattggtcctaacgcaaaatgtttgactcattttgaaggggaatgtaataaaaatactttaaggattatagagtctgcgtcaccattattcattcaaacaaaatatgcttacaataaaagagggaagatcaaagcacaccattatacttttgatagaagaaatgattccatactgttcaactcggatagccccgaacttgacagaatgagaaacgccataaacctgcaggaatggcaaattaaagatttaatagaaacaaaatataagttatttaaatctggattaatgactcacgatgactcactatttcttgctgctgaaatcttcattaatgaaaagtataaaaattatgctttattactctctaaaagatttccactaattattattgatgagtgccaagatttatcatacgagcacttatttatattacaggggcttcatgatttaggagttaaacttcactttgtcggtgatttagaacaatccatttatggtttccgtgctgtagatcctaaagatacaataaaattcattactgacaatgaattcgaaagaatgccattaaaaattaattatcggagctgtcagcaaatcattgatctttgttcaaaattaacagcacatgatggtgttaatggccaatttagttcaattgaatctccctgtatcgttttgcagtataatgaaacgcctctagaattaatcgataaaattggacagctatgtttcggatacagtaataatgtaatcgtagctcgtgggcactctattttggaaaagttcacatttaatggtgttgaagataatattgtgaaaaaccttgttaatgcaataaatattttctcattacatggaactcaaaatataaaaaactcactgcagttattttcaacagtgatacgcgcgagatcaaatcatccaattagagaatctaagtataattgtcctaatgagattgagtcatccgtgcaatggcgagcatttcttttctatacattggaatacttcatcgagaataagctcaacaattttgaattaacatggagtaagtggtgtaaaaatgcaaatgcaatccttatcaatcttcatcagcaaccgttcataactgatgaattaaaacctatagtagaggaagtattttccttatctataaaagctccttcaggacttgcaaaaattaatgtttcggagttcactgcaatagaaaaagtaaatactgaaaattataaatatgctacaattcatagcgttaaaggtgaaactcatgatgtaacaattctattatcatcgccttcaaactccggaaataatggttcacactggaaacagtggataagtaatcaaaaatcagaatcaaccagatttgcctatgttgcaagctcaaggcctagatatcgattagtctggggtgtcaaaaaattaaaaaatagtgaagctgatacattaagaaaacttggttttactattgaatga

SEQ ID NO: 71898 - DNA, 2091 bp, Lactobacillus rhamnosus GG; identical to SEQ ID NO: 71704

SEQ ID NO: 71899 - DNA, 1788 bp, Lactobacillus rhamnosus GG; identical to SEQ ID NO: 71705

SEQ ID NO: 71900 - DNA, 2088 bp, Streptococcus suis SC84; identical to SEQ ID NO: 71734

SEQ ID NO: 71901 - DNA, 1818 bp, Streptococcus suis SC84
atggtgaagagtgacgattggtttcctaaaggagtcattaaattagaggatgctgctttagaagtagttaaagatgttactaacagtctagtcattgctggaccaggtgctggaaaaacagaattactggctcaaaagttagactatcttttttctacaaataaatgtatttctccaaaaaagattttagctttaagttttaaaacagatgctgctgcaaatttgaaagatagagttaaaaaacgttatggtgatgaatatgcttctcgttttacctcattaacctattcggcttttgaaaagagaattttagaccaatttagagatgttctacctgaggatatacgaccatcaagagattatttgattgaagattgggatactataaaagaactactctctatgaatggaattaatgttaatggatggaggatgtcagatataagaaattttgtcgaaaatattatacttaatgacgggaatactcacaaattaaaaaaggatttactaaaaggaacacaagataataagccggtcctcttgtataggcaaataacaaagttgagtactcaaataatagctactaacgaatacatccgtaaagcacttcaaatgacatacgattttgtatttctagatgaatttcaggatactacatatgcccagtataatttattaaaaacttgttttttaggttcgtcttgtaaattaacagcagttggagataataagcaagccattatgagatgggcaggtgcaaaacctgatatttttccagactatattcgagactttaattcaaatgaatatcaattgttgatgaatcaccgctctgtacctaaacttgtaaaatttcaaaaagaggttcatcagatattaaatagtaatcacagttctattcagccaaataattatccagaatttcaagagggtgaaataacattatttgaatttgaaaatgaaagtttagaagctgagttaattgcaaatgatatagaatcaaaaattcaaggaggtatacgaccatcagaaatctgtatcctagcaaaacagaaggttgatgattatagttcaaaattgataactacattaaacagtaaagggattaaagcaagaattgaaaatgaatatcaagagcttttaaaagaccctacttgtaacctattattagatttaatatcatgcagtcaaggaaaacgagatcctttaatttgggaaaatattagtaatttttatggaaatatcaatggaatagatgagtttactgatgaattaattttagcaaaatcctataaggagattgacaatatagttagtgatattacttacctaatttcaaattttattcccaatgaagaaagtatgctaaatttaattgattgtattattgaaaaaatagatgaaaaaagaattatttccaacttttcaacatacaatggaaaaagtgacctagatatcattgtcaagaatttttcaatgttattatacaaagaatattctcaaacacaaggtgaatggctagatatagtatctagtttcaagggtgaaaactcaatttcaattatgactatccataagagtaaaggattagaatatgaggcagtctattttctaggcttggaggattctgcattctggaattttaataatcaacctgaagaagataaaagtgcgttcttcgttgcactttcacgagcaaaaagtcacctaatcttcacatactgtaaattgagaaataatagggcacaaaacaatagaaatattaatgagatatattcattgctaacccagtctaaactagtaaaggttggtaattaa

SEQ ID NO: 71902 - DNA, 2088 bp, Streptococcus suis BM407; identical to SEQ ID NO: 71734

SEQ ID NO: 71903 - DNA, 1818 bp, Streptococcus suis BM407; identical to SEQ ID NO: 71901

SEQ ID NO: 71904 - DNA, 2190 bp, Staphylococcus aureus subsp. aureus TW20
atgtttatatctactcttcaaattcgaaattttagaaattatgaatccgaaatctttcgattcgataatgagacaaatactattataggtgagaatgattcagggaaaaccaatgctcttactgcattgagaatcttattagatgatagttattactatagtagtaaaacactgaaagaatcagatttttttcatggaattcaaaatgggtggcaagggcattggattattatctctgcgacatttgaaggaatcagcgaagaagaatttgacaatgagatttgtgcttccatttctttaaattctgaaagtcaaacaatcttagaagaattgatttcaaatgcagataaaggtgtaggtagtatttctctatttattagacctaacaaagctattagaaagcaattatttgatatttccactgaattagactctcatcaatttaacgaatttagaaattctattcgtctatccgactatgaattttactacacatctaaatcaaatctaaatttctgtatcaatgaaaattatgataaattggtaggaagactcaatgacaatatagctagtaatcctgaagaagacgatgaagctctgttgggctcaagaattgacatgtcagatattttcaagcatatttcggttgtttatgttgacgctcttcgagatgttcttagagaaatgaaaaacaatcgaaacccagtcaaaagaatcatggaaacaattgaatcaaaaatatcatcagataatgttgagtcattaaaaacaattatacagcaattaaatgagactattaccagtgttcctgaaattaggaaaattggcgaaaatattaatcggcaactaaatagcataattggttcagtgtattctcctaatcttcttctttcctcaactatgtcagatgatatgggttctttagcaaaatttctttcaatgaagccagaacaaaatatcgacttagacttactagggttaggacatctaaatatgatttatttagctttgaaaatagtcgaatttgaagcgtgtcgttcaagagaactacttaatattatgttgattgaagaaccagaagctcatattcatcatcatattcaaaaaactctgttcgaaggattaaatcttcaaaaaaactatactcagattctcatgaccacacattctgtacatttagctgaagtgtctgaaatatctcggatgaatgtattaaaatcgtttaatggcaaatctatcgttatgaatccagcaaataatctgaactcatttgctaaagaaaagttaaaaaagaacaatctaaatctaataaacgcagtagagagatatttagatgttaaaagaaatggattgcttttttctaaaggtgttatcttagttgaaggagatgctgaagaaatacttattcctcaaatagtaaaaaaattatttggtataaacttagacgaacttggaataggtttgattaatgttggtagtacttcgtttgaatatatcgctagcttgtttgacgatgatagaatacagagaaagtgtgctattgtaactgatttagatgaacaggcaatcccatcagaacatcgattgtataaaagcactgcacaagagaaaggtcaagcaagaaaagaaaaattatcctccctttttaatgaaaacaattgggttaattgtttttatgctaatacaacatttgaaattgagtttttagatgtgaataaagaaaatattctaacttatgtcagtccaattatagatgacgcattcaaagataaaaaaacaataactgcttataaagaagaaatacaaagtgaacaatatttagaaagaaatttagcgatgttaaaactagccaatcatgttggtaaggggtggtttgcaattgagttaggtgaaaaaattgactttttaatcaaaattcctaagtatattcttaatgctattgcttttgcatgtcaggaaatagtagatctctcaatttataaaaaaattctactccatacaatcgacttgtacgaggaaactacagaattgtcagctttatcagctagtttaaaaacaagtgatacagctgatttgaatatagcaataatttctttattagagtactttggtaaagatgaggatgttgtgtatctaatcaatcagatagaaaattacacaaaaatactttatgctgaggtttcaaaatga

SEQ ID NO: 71905 - DNA, 1794 bp, Staphylococcus aureus subsp. aureus TW20; identical to SEQ ID NO: 71697

SEQ ID NO: 71906 - DNA, 2187 bp, Streptococcus mitis B6
atgtttatatctactcttcaaattcgaaattttagaaattatgaatccgaaatctttcgattcgataatgagacaaatactattataggtgagaatgattcagggaaaaccaatgctcttactgcattgagaatcttattagatgatagttattactatagtagtaaaacactgaaagaatcagatttttttcatggaattcaaaatgggtggcaagggcattggattattatctctgcgacatttgaaggaatcagcgaagaagaatttgacaatgagatttgtgcttccatttctttaaattctgaaagtcaaacaatcttagaagaattgatttcaaatgcagataaaggtgtaggtagtatttctctatttattagacctaacaaagctattagaaagcaattatttgatatttccactgaattagactctcatcaatttaacgaatttagaaattctattcgtctatccgactatgaattttactacacatctaaatcaaatctaaatttctgtatcaatgaaaattatgataaattggtaggaagactcaatgacaatatagctagtaatcctgaagaagacgatgaagctcttttgggctcaagaattgacatgtcagatattttcaagcatatttcggttgtttatgttgacgctcttcgagatgttcttagagaaatgaaaaacaatcgaaaccctgtcaaaagaatcatggaaacaattgaatcaaaaatatcatcagataatgttgagtcattaaaaacaattatacagcaattaaatgagactattaccagtgttcctgaaattaggaaaattggcgaaaatattaatcggcaactaaatagcataattggttcagtgtattctcctaatcttctttcctcaactatgtcagatgatatgggttctttagcaaaatttctttcaatgaagccagaacaaaatatcgacttagacttactagggttaggacatctaaatatgatttatttagctttgaaaatagtcgaatttgaagcgtgtcgttcaagagaactacttaatattatgttgattgaagaaccagaagctcatattcatcatcatattcaaaaaactctgttcgaaggattaaatcttcaaaaaaactatactcagattctcatgaccacacattctgtacatttagctgaagtgtctgaaatatctcggatgaatgtattaaaatcgtttaatggcaaatctatcgttatgaatccagcaaataatctgaactcatttgctaaagaaaagttaaaaaagaacaatctaaatctaataaacgcagtagagagatatttagatgttaaaagaaatggattgcttttttctaaaggtgttatcttagttgaaggagatgctgaagaaatacttattcctcaaatagtaaaaaaattatttggtataaacttagacgaacttggaataggtttgattaatgttggtagtacttcgtttgaatatatcgctagcttgtttgacgatgatagaatacagagaaagtgtgctattgtaactgatttagatgaacaggcaatcccatcagaacatcgattgtataaaagcactgcacaagagaaaggtcaagcaagaaaagaaaaattatcctccctttttaatgaaaacaattgggttaattgtttttatgctaatacaacatttgaaattgagtttttagatgtgaataaagaaaatattctaacttatgtcagtccaattatagatgacgcattcaaagataaaaaaacaataactgcttataaagaagaaatacaaagtgaacaatatttagaaagaaatttagcgatgttaaaactagccaatcatgttggtaaggggtggtttgcaattgagttaggtgaaaaaattgactttttaatcaaaattcctaagtatattcttaatgctattgcttttgcatgtcaggaaatagtagatctctcaatttataaaaaaattctactccatacaatcgacttgtacgaggaaactacagaattgtcagctttatcagctagtttaaaaacaagtgatacagctgatttgaatatagcaataatttctttattagagtactttggtaaagatgaggatgttgtgtatctaatcaatcagatagaaaattacacaaaaatactttatgctgaggtttcaaaatga

SEQ ID NO: 71907 - DNA, 1794 bp, Streptococcus mitis B6
atgacaaatatcttcgaaaaaattgtaaatgatttaaatttagaacaaaaagatgttgtggaaagtgaagataacctttatgtaaatgcatgtcctgggagtgggaaaacaagggtacttacaaggaaaattgcttaccaagcaattaaacacgatggatcactaaaaagaataattgctatcacatacactaatagagctgctgaagaaattaaggaacgcctaagtttacttagtatagatgatgatattaatatttgggtggggacaatacatcagttttgtcttgaatttattatttatccttttaaaatgaatctctcaagagtatcaaaaggatttacaattattgatgattatactcaaagagcttacgtcagccaaattaataatatgctgaatttaaatctcaaaacgtatgaactgaacaaaattgatttgtcactttctcatgattttaaaattaatgaagttcagtatactcaagtttctgaaatgtatcacactatgttggaaaaaaataaagaaattgattttgatatgattttactagtagcgtataaaattttaactgtaaacagtaacgttgcacgtaatattgctagtaatataagggcgatttatgtggatgaatttcaagatactagagaattacaatacaatgtaatagctaaattacttcaaaacaaccctcaaattcagtcaatgtttgttggagatattgaccaagcaatttatggatcattagatggtatagctaaatcagttgaagaactagaaatgctaactagtcacacttttcaatcaaagacgctacatggctgttacaggtctaatcagagattagtagacttctactctaattttcagagttgtccttacgagattgaaagcagagggaataataaaaacgaccgtggttttataagttatgattgcaaagttactaaggaggatttacccaacataataaaaaatataataaaggaaaagattgaaagcggcattcatgaaaaagatatttgtgtacttgctcctcaacactatcctctgttttcactgggtgagtatttaaagaaagaattaccgtattgcaattttgatgctataaatatatcaccaattaaggtaaataatcatagtttatttttcaagttagcaattttgtactttactgaatcaggtgaaaaggttcgaagaagaaagctaattgcaaacgatattttaattatattaaaaaatgaatttggaatagaagttaaagattattttattgacttagatttattacagctaataaacagtgtgaaaagaatgtatagtggagacgacaacggtgttgatttatacaaatttgttaccaaacatatatttgttaatcttaatattgacgagaaaaattacccgtctatttttaagcactatctattttttattaacgaagtagaagatcggataaaaaataattcattatctagtagtgtatctagttttaagaagatgtttaaatctcgagatggtatcacacttactacagcacataaagttaaaggaaatgagtatgatactgttatcgctattaatcttctaaacgggaaaattcctcattggaatgaaatttttaatgtttctgataaaggaattagttcagcgagaaaactactatacgtaatttgttcaagagcaaaaaataatttatttcttttctcagaggtgggttattttacgagtaaaggagacttgctttatcccactcaattattagataaaatagaatttgattataatatttaa

SEQ ID NO: 71908 - DNA, 1971 bp, Streptococcus gallolyticus UCN34
atggacagtttatatatatctagagtagttataaagaattacaggaactttaaggacttagatgttaatttgcaacacaagtcggtaatcgttggtgagaacaatgttggcaaaacaaattttatcaaggcattgcagctgattttagatccttcactttcagatgaagatagaatgctatctgaaagtgattttaatgattctcttaagaatcctatggagaataatcaagaaattttaatacagatttatattagcaattacagaagaaacgttgcaataatgacaatgttatctgatgcgactgtcttggatgctgaaggaaatgaagtgcttttattaagctataagtttttcccacatatagatgagtttggaaaaaaagaatatcaatatgaagtatatatgcgagatgatatgtctagaaaatttggttcgagagaaagaaagtatcttaatataaaagtaattaaggcactaagagatgtagaggcagatttgagaaacagcaaaaaatctccggtaaaaaagatgcttgatgattataaaatcagtaaagaagttcttgaaaatatagcaagtgaatataaagaatgcggtgatcgcgttttggatttagatgaaatcaatgatatgacaatgcatatcaatgaacgtttttcagaaatccttgggaatcatgactatgatatttcgttacaggcaatggaggtggatccaacaagggtattaggatcgctgaaaatgttgatggcaaatcgctctgtatcggattcaagcttggggctagataatattttatatatttcgttggttcttcagatgctaaaagataaaacagttccaacttttgtttctggttcagaatatagtgaactattaacaaaggaaaatagcgaaataatagatgaatgctatatttccaatgcaggtggaaattatgttttaagaactgatttaaatgaagagaactatgcttcattgtatacatttatggcagacaatggacatggaaacaatgcagttactttgctggctatcgaggaacctgaagcacatcttcatccagtttatcagaggttaatctataaagatgttattaatcgaaacggatttcctattcttcttactacacattcaacacatattacttctgtagtaccaattaagtcattggtacacttgcatcaagaagcagggaacacagttgctcattctacagcaagcatgcctatgttggaaggggaatttttggatgttgaacgatatctcgatgttaaacgtggtgaaatatttttaggaaaaggtgtgatactcgtcgaaggtatagcagaggaatacattattccaaaacttgctgaattattaggtaaaccgttggatgagaaggggatagtagtttgtaatattaattgtacgaattttaaaccatatatgaagatgcttaattctcttagtataccgtatgcagttataacggatggtgacttctatattgaaaatgttgacgatagagatgattcaaatagaaattatcatgtgatggagaaagatgtaaaggataatgatacctgcggatcccttggaagggaaaacgctattaaaacattcgaagcgttggatgatagtgtgccggaaaatgttgatttagctttatatttttcagaacgaggatattttattggtaaatacacgtttgaggtagatatgatggaatgcacgtctactgaagctggtgaaagggcttttactgatacatttgatcagttagtcgagagtagtcgaaagcagaataactttaaaaacagattggagaatcaagattatgagttctgcttacgaagaattgaagatcagagtgttggtaaaggaagatttgcacagattttctcggggaaatgtgttactgataactgtccagattatgtaaaaaatgccattgaatatatttatgcgaaagtagatgaatga

SEQ ID NO: 71909 - DNA, 1830 bp, Streptococcus gallolyticus UCN34
atgagtacgacgacttatattgaaaaactaagtagaattgaaaaagatgaataccagaaggctgcctttgatagtcaaagtaatacagttgtattagctgggccaggaagtggaaaaacaacagttttgactttaaaagccatgcatttgctaaatggtgtaattgcagaaccgcgtggtttggcatgtcttacttatagtagagaggctgcaagagaatttacagagagattaaaagaattaggtttggtaaggggaaataatatatttcttggaacggtacattcattttgtctcacagagatactgggtaaattttgtgatgtatattcattaaatattccgacgccgataaaaattgcttctgaaaaacaaagagcaaaactatttgagatagcaaagaaaaatgttgggtgcaatgataagtattttaaaattgagagaatgaattgtacaagaatgcttagtatttctggagtaagtaatatttgtgttgatagagacgaaactgcagagataatagctaatgaatatgaaaaactattaaaccaggccggtgttattgactatgaaacaattattattgagtctacaaagctattacaggaaaaaccttatgttagagagtgtatatctgcgaaatatccgtggcttttaattgatgaatatcaggatttggggcgaccgcttcatgaaatggttctcacacttatagacaatacaaaaataaaattctttgcagttggtgatccagatcaatctatatatggatttcagggagcagtacctgattatttaattgaattagctgatagacctgatgttcagaaaataactttattgaacaactatagaagcaatcaagacattattgacggttcagaacttgtgttaaatcaacagcgtggttatgttgcgaaaacacgagaaaatgaagatgctgtttataaatttattgaagtaaatgaagagttggatgaccagattgaatattttgttaaaaggatcgttccaggacttgtaaaaaacggcattccctatgaggagatagcagttcttgttgggaataattcggaatgcaatagtattgcattaagatgccagaaagagaatatcccatactatatcgtaaagcatcaatttaatcggagcgattttgtaaaatgggtagaaaactgtgcttcgtggattgaaggagataaagatattgttttttcggatataggtgacttttggatatcgttgataacagtaaatggcgcaatgtatttgacagatgaagaaaaactaattatcagagagcgactgtataaggttcttgtggaaagcaaagattatgaaaaatcactgacgaaatggtttgaatatgtaaggaaagagctatgttttgataagtatcttgaacaaaatacgtatttccaggatgaaaaagataatattgataatctgatgaaagaaatgtctggtagtgaatataaggaatatggaatagataagttttctaaaatcgggaagcccgagaatcaaattgttatttctacaagacatagttcaaaaggattagaatttgaggcaatagtaatgatgggaatggaagaagatcattttccaagttattatgttaaaaacgacgccagattattagcagaggctaatcgtttgtgctttgtatgcgtaagccgagcaaaacgtgtgtgtattttaatgaaatcaagttattatacgattaaaactaaaaatggtccgtggcgaaaagagttcaaaccatcgatgtattggaatatattatactcaaaatatggtaatattaatacaaagcaacttcactaa

SEQ ID NO: 71910 - DNA, 2040 bp, Clostridium botulinum A str. ATCC 3502; identical to SEQ ID NO: 71772

SEQ ID NO: 71911 - DNA, 1782 bp, Clostridium botulinum A str. ATCC 3502; identical to SEQ ID NO: 71773

SEQ ID NO: 71912 - DNA, 2097 bp, Flavobacterium psychrophilum JIP02/86
atgaagataaataaaataaaaattgaaaattttaggcttttaaaaaactttcaattagacctcgaaaatgaactttcattagttattggtaaaaataattgtggcaagacttctttattggctgtattagataaatttttaaatcagtccgataaaactaaattttcattcgatgattttaatatggattttaagaatgagattaaaacattagttgagaatcctccagtagatgatgaagtatttgagcaaaaaggtatcaaattaaaactatttattgagtataatgaagacgatgatttgtcaaatatttcaagggtaatgatggatttagatccaaataataactttattgttttagggtttgaatacgttctggatttagaaaaattaaataaattaagaattgattataatgaatttgcaaaaaaagaagcaataaaaactaaaaagaaaaaggacgatgaacccaagttggtgaaagatttaatttattttttgaaagcgaaccaccaagattattttttgttcgccaaaaaatctattgagtttgatttaagtaccaatgaagaaaatgaattgaattttatcgatttgataaaagaaaaaatcagcattaaggaaataattaattttaaatttattagtgctaaacgtgaggtttctaacaaagaagttgataaaactttatcaattcagacttcaaaaatttacaaaaagacagaagcaagtgatgagcaacaagaggcaattgatgattttaaagacaaattaagtgataccgattttgtgttaagtgatatttattcaaatctatttaaaaatgttattgaaaaagtcaaaacatttggcggtatcaaaaaagacgattcaattattgaaatagtttcaacattgcaacatcgcgagttacttgaaggaaatacaactgttatgtacaatcataatgaaagttcattgccagaacattacaatggtcttgggtatatgaatttaataagtatgatatttgaaattgaaatacttattcaagattttaaaaatagtaaagatgaaaaaccttcggatataaatttactatttattgaagaaccggaagcgcacactcatccacagatgcaatatgtatttattaaaaacatcaaggaattattaaaacaaggaattaaaagagatgatggtcaaagtggagaattgcaatcaataattagtacacattcttctcatattgtttctgaaagtaattttgatgatattaaatacttaaagaaaaacgacaacaattctgtaatcgcaaaaaacttaaaagaattaaaagaagagtataaagcaaatactaaacagtatgaatttctaaaacaatacctcacaatcaatagagccgagatattttttgctgacaaagtaattttaattgaaggagatacagaaaggattttgtttccaactttgatgaaaaaatatgatattgatgaagaaaaaaaatataaaaacctcggaaccgttgatgattcacttcctcttctttctcaaaatatttcaattatagaagttggagcatattctcaaatttttgagaaattcatagaatttataggcataaaaacattaattattactgatttagatactgttggactagatgataaaaaatgtgaaccatcaattggagttagctattctaacgatgctttaagctttttctttaatgatccgacattaactgatttaaaaggttttactattcaaaataagatttttagtaatactaatggtttatggaatgttgatgctaatggtaaattatgtgttgtttaccaaatactagaaaatggatttaattctcgcagttttgaagattcctttattcatttaaatagagaatttatcactccattaaaagatgagtttaaaggcttacaaaatcgcacaaattttgataatacagctaataacgcttatctattagctgaacattgtattaagaaaaaaactcattttgctttggatatactatataatagcaacgatgattttagtaattggcaaataccaggatatataaatgaaggattgttatggttaaaacaggattag

SEQ ID NO: 71913 - DNA, 1902 bp, Flavobacterium psychrophilum JIP02/86
atggttaaaacaggattagttttagaaaagaaagatgagtttcaagaaattatggaacacatcaaaaatggtaataactttcttttaagtggtggagctggaagcggaaaaacctattctcttgtacaagttattaaacaagttattgaagataatccaacttctaaagttgcttgtatgacatatacaaatgcagctgttaaagagattgaagaaagagtaaatcacgacaatctaaatgttaccaccatacacgattttctttgggataatatcaagcattttcaaaaagatcttaaatctactctagtaaaattaataaatgatgaagatgtaacaaaaataaaaattgaaaatgaaactgtgccatttgattattttgatagtttagaagacgaaattcaatacaaagaatatttacgcttgaaagaaggtattatttctcacgatgaattattaattgttgccaacagtatgtttcaacggtttccaaaactatgtgatattttaaaagaccgataccaatttatatttattgatgaatatcaggatacgcacaaagaagtaattgaaatatttcttactcatttaaatcaaagtaaaaagaaaaatataattggtttctttggcgatgctatgcaatctatttacccagatggtatagggaatttggacgaatataaaggtgatgaagctgaaaaggtaaaagaagttaaaaaagatcaaaaccgaagaaatccaaaattggtatatgaattagcaaacagattacgagttaatgctgatggattaattcaaacccattccgatgaaaataatgcaccaaatatgtcggtaggaatcgtaaaggagggtaatataaaatttgcttattcaaatgatggtaatttacaaacctttagagattatttaggatgggatttttcaaattcaaaagaaacgaaagaattaaatttaacacataatttaattgctggaaaagctggattcagaggtttaatggaaatatatgatcgtgatagaataatcgagctaaaaaataagattacaaaaaaaatcaaagaagataatatcgaaatttctgaagaagcaacgtttggagaagttatcgatcaagtcaatttacctgtaaaatcttcaacacaagtggggcagtttatcactcaaaataatgatttatacacaactgcaaggaattatccatttacagtttttagaaaaatatacctagacaaagaccaattattagacgataaaaaacaggataaagaagatgaaaataaaaaaggttcaaaaagagaccatttgataaagcatcttttcaaaattcaaaataatatttcattatatcaaaacagaaaatacaatgaatttttaagaattactgatttcagatataattttaaaaatattgaacaaaaacgattattacaaaaaaacataattgaattaattgatgttggagataaaacaattgaacaaataattacagaagccaatgaaaaaggaatttgtcttgttgatgataatttgatgagatttataactgaaaaagaatatgtttataatcgagtaaaaaatataagattttctgaatttcaaaagctatatgattatttagaaggtgctacgccattctcaactcaacataaaacaaaaggcgatgaattcaacaatgttttagttattttagataatggtaaatggaatgattataacttcgaatatttgtttttaaatattggttcaccaagtgttttagaaagaactcaaaaaatattttacgtttgttgtacgagagcaaaagaaaatttagctgtttactatcataatccgaaaccaacggttattgagaaggcaaaagaattatttggagctaaaaatgtggtttgtttagattaa

SEQ ID NO: 71914 - DNA, 1803 bp, Bordetella petrii
atgcagattgcaaaagtcaaggtcgaaaagtttcgtgggattgaatccggcatcgtgacgctgtcaggccacagcgtatttctcggtgacaacaacgtcgggaagtcaacgctgctggaggccatagatctcgtcctcggcccggaacggctctcccgaagacccgtcatcgacgagcacgacttccacgccgggcgctacctggatgaagagggagatccggttctcattcggattgaagttatcgtcagtgacctgtccgccgagcagcagcgacactttcgtgaccacatcgagtggtggtccgccacggaaaagacgctactcgtaggcccgcccccggaaggcacggatgcgtcagacgtgtcggccgcgctgcgggtgtttttcgagggtcgctacgacaaggaagaagacgacttcacgggcaatactttcttcgcgaccccagtgctagctgaaggtactcacccaactttcaaaacgaccgacaagcgcaagtgcggcttcctgtacctccggacgctgaggacaggggcgcgggcattgagcctggagcgcgggtcgttgcttgatgtcatcctcaggcttcaagacaagcgcgtgacgatgtgggaagacctgctgaacgagttgcgcaaactccccgtggccgataagccggaactcggcatcgccccgctcttgaaggacgtccaggacgctgttcgccgattcgttccttctgactgggcagaggaacctcacatgcgcgtgtcggatctcactagagaggccctgcgcaaggatttgaccgttttcatgggcaccggcgcgaagcgtccggacggcagcacctattgcgcgccatatcaccatcagggcaccggcacgatcaatacactggtgctggcgctgctatccatcatcgcgggcctgaagcagaacgtcatcttcgcgatggaggagcccgagatcgcccttccgccacatacccagaagcgcatcgttaacagcgtgcgcgagacgtcggcacaggcgcttttcacgtcgcactcgccctatgtgctcgaagaattcgcgccgtccgagatgcatgtgctgcggcgtgacgggggaaagctttctgcgatgctggcgacatacccaccagcggtcaagcccaaggcatacaaggcagagttcagggcccgcttctgtgaagcgctgcttgcccgatatgtacttgttgtcgaaggtcgaacggagttcgatgcgatacctgcagcggcgcgccggcttaacgacttgaaccccacagaatacaagacgcttgaggccctgggggtggccgtcatcgatgcgcaaaccgatgcgcaggttgcgcctctcggcaagttctttagagacttgggcaagacggtctttgctgtgttcgacaagcaggaaccagccgcttccgctgccatcaaggccgccgtgcaccactcatttgaatctgccgagaaaggtttcgagaacgtagtgctgcaccacaccgcggaggcagcccttcgtcgatatgcgctcagcctcgtcgcggagaacgcgtggccgaaccatctgatcgccaaaactcctaacgccgcccagaccgtggagcaaattcgcgacgcattgcggcaattctttggctgggccaagggaagcggcgatgccggcgacttgctcgggtgctgcaccgaggcggagatgccgcagtatgtccgggacacgctgcgggtgatccacatcaccgtcgaacctccgccgctgccacccgtgccgtcagcggcggcagcaccgttcgatgacgaagagttatga

SEQ ID NO: 71915 - DNA, 1653 bp, Bordetella petrii
atgggtggtccaggctccggaaagacgcatgtcgccctggtcaaagccagggacgagattcgatcagcaaagctcctatcaggccagcgcatcctgtttctcagcttcgcgaggcccacagtggcacgggtccttgagaaagccaaggaactcatcaccgcggatgatctgagacttctagatgtcaacacctatcacggcttcgcatggagcgttctgcgaagtcatggctatctgctcagcaacggaaagccgctccagctcctaccacctcccgagggctccgcgcgcttggctcactttgccaaggagcagcatcaccaggagaagttgcgccttttccatgaagaggggctgctccacttcgacctcttcgcccagttgacggctgaactgctgcgccgcagccggcggctggcaggtatctacacagcgacctacccgatactcgtcgtggacgagttccaggacacgaacgccgacgaatgggcgatggtccgcgagcttggacgcggctgcaggatcattgccttggccgaccccgaccagcgtatttacgaattccgcggcgccgatcctcagcggctcaaggaattcgtggaccagttcgaccccttgccagtcgagtttgaaggggagaatcatcgcagtgccggaaccgacatcgcaacgtacggttcagactttctcaccgggaaaaacaagggcgccgtctatgccaatgtgtcggtggtcgagtacggcgtgtactacggaaggggtccgcatttccatgcgaaggcccagctcatccaggcaatcaagcgacttcgcaaggagccggcctggtccatcgcagtgctcgtcccatccaaggccttcatgcttcaagtgtccgactacctctccgcggagtccgatggcatgcccaaccttcgccacgaggtggcgatggacgcggaatccccggcgcttgcggcaaacgtcatcgccacgctaatggaaggaggcccttcggagcttctggctgcgcggctactctccgccttacatacccacatccggggccgcagtggcaccaaacgccctgcgcaggcggaactcgacatggccgacgccatcgaccaatacttggtctccggaaagatccgcggcaagaatcgccaagcgttgatcagcgagtgcgcgcgcctagcagcgcttcgccaggacgtcgtattcaccggccatcctgaagaagactggttgactgcgcgggggcttctcgcgacgtctgccgttggccaactgtcgcgcgttgccgctgatgccaagtatctccgcctgcttcacaagggctcaaacctgcgggcgtctttgtcagagctttggagatcccaaggacagtatgtcggcgctatcgaagctgtccggggcgctttgctgcaggagcatttcacagcagccgccaaggaatggcgtggagttcatctcatgaccattcacaaagcaaagggtaaggagtttgacgaggtactgatttacgaagggcgatatgctggacgaattgtgcctgcgaatgcagatacttctcgtcaaagccaagcccttttggcactgcgggtcgcagtcacaagagctatgaagagagcaacaatcctgacgccatcgggagaccgcagcatttttttgtaa

SEQ ID NO: 71916 - DNA, 1794 bp, Acinetobacter baumannii AYE
atgcacttaaaaaatttaaaaattagaaattttaggaatttcgaatctatagatatccctttgagtgataatattgtattactcggggaaaatcggacaggaaaaagtaatttaatatttgctatgcgattagtgattgatcaaaatctttcagattccgctagacaattaaaactctctgatttttgggatggttgtgatttatttacgaaaccacaaattgaagtacatttagattttactgattttgaaaatgatccagatttaactgcattacttacggattatagactggcctccgatcctcatacagtccgtttaagctatatatttagatgtaaagccgagtgtactggtttacctacaagtagtgaagatttcgaattcttgatttatgggggcgacgtagaagaaaagcctattaataatcaagttagaagaagaatttcactagatttattagacgctttacgagatgcagagaatcaacttggttcatggagaaactctccattaagacctcttatagaaaatgctatgagagcaatcgatagtacaactttaaccactatttcagctgatttagaagcagcaaataaaaaaatagtagagcagcctcagataaaagttttagatagttcattaagtaaacaaattctgagtctttctggtaaaggacatgatttaaagccttcgctccgtttttctaatgcagatcctttaagactatttcgttcattaggaatgtacattgatgagggaaaacgtagtattaatgaagctagtctaggctcagcaaatgttatcttgatggcattaaaacttgaggaattttcttggcgtaaagaaaaaaatgaaagaaattattctttactatgcatagaagagcccgaagcccatttacaccctcaacttcagcgaagtgttttcaaaaatatatttaacgaaaaggattcagctcaagctcttattattaccagccattctccaactttagcagcagtagtaccactacgttcaattgttaatttaaggcagataaataatagtacgaaagcattttctctagctaatttaccaattgatgaagatgagaaagatgatattgaaaggtatttaatagcaactcgttctgaaattttattttccaaaggcataatttttgttgagggggatgctgaagaagctttgattcctagctttgctgaattattaggatatgatcttgatgggtttggtattactgtatgcaatattggtggggttaattttaagccttatgtcaaacttgcaagtagtttaggtatcccttttacgattattactgattgggatcctttagatggtactaaacagccgttaggaaaaaaacgcacagttgaaatttgggatgctgctggtgaggtcaatttatctacttttaggcttactcaagaacagcgagaatggtgtgataatgcttcatatgatcagttttcagctcaatgggcaaaatatgggatatttcttaatgatcaaacttttgaagttgctatagctcaaactccaaatttaagcgagatattattagatattttagatgaacagggttttggaccacaaagaactcagagaattaaagagtggagaggcgatcatacaaaaataaataatgaaaatttactttctatgattaaagatatcggaaaaggacgtttaagcggaaaaattaaaaagagaataactgcatctggaactataaatcctcccgcatatattactaatgcgattgagtatatggtgaaaaatgtctaa

SEQ ID NO: 71917 - DNA, 1782 bp, Acinetobacter baumannii AYE; identical to SEQ ID NO: 71827

SEQ ID NO: 71918 - DNA, 1965 bp, Proteus mirabilis HI4320
gtgcatatcgagagaataaatctacagaactttagaagtttcgggccagaagggcagagcatagctgtcgatccggatctaaccaccttggttggagcaaatggtgctgggaaaacggtcttgatgcaggccttacagcgaatgtttggcatctccaatgagcagcggacgattcgccgtcaggattttcatattccctctttggaagaagaaatacccagcaagcggactctcacgcttgaagccattgtcgccttccccgaactggatgatgaagatggagatcactctgtgataccagatttttttcatcatatgagcgttacagatgagggtggaaaactgaagtgtcgtttgcgcttggacgcggaatgggaagatgatggctcaatagacgggtacattacgagccagttccgtgcggttacgacatggggcgagccagaagttgctgattttcaaaatgtacgtccagcggatcgttctcgaatccaactgatttacgtccctgccacacgatgcgcagtttctcaggtatccgcttttctgaaaagccgactttggaaggctattaactggtcggaacaagttcggtcatcttttactcaaaaagccacagagctgaacgaatcttttgagggtgaaaaggcgattagtatcgttaccggaaagctcacagagcgttggcatgaactgcactctgctggaactgatagtacaccgaagtttcgcccggtcgacctacgctttgaagaattcgttcgtaaggtggaggtactgctgcacccagatgaaagtggtcgggataggagcattgatgagctaagtgatggccaaagttcgctgtttcacatcgccatgacttcagctactctcgatgttgaaaccgagatattagcccaaccggagagtgaagattttctcggtgcagacttgttcttgccctcgttgactattttggcacttgaggagccggagaataacctagccccatactatctatctcgaatcataagtcagatcagcagtttagtgcatggcttaagagcgcaagcagtgctatctagccattcgccgagcattctcgccagaatccagccaacacaagtaaggcacttcagactagcaacagaatcaaacaccactgtcgttcgtcaactgactttaccctatgaggagaatgaagctgcaaagtacatccagcaagcggtgagagcctatccagagttgtatttcgctaaagttgttgttctcggggaaggggcttccgaggaggtaattcttcctgctatatcagaagctatgggcataccaattgataaatcttttgtcgccatggttccattagggggccgccatgtaaaccacatgtggcgtttgctaacagatttacagatcccttttctaacattactcgatctggattggggacggcacggcggtggctggggaaggattaagaatgcagttgccaaattgatagagtatgggctcgacccaagtgagatatttgggcaaaacctcaatctgttaggctaccaacataaccttgctgcatttgataattatccggtttcagattggaataacattaatcagtgggttcaatggctcaggcggcacaaagtttatttttcaagcccattagacattgattattcgatgttaaaagcattcactagccattatcgggtggtcccagatgaaagctctaatggaccatctatgcatggtgatccaggcaatgctgttatgggagatgaagggtatcctggcttctacgcggatgatgtacttaacttgcgctggtacagatatctgttcttaggaagaggtaaaccaagtacgcatattcgagtgcttggctctattccgccagatcagttggctcaaaacgcgccagaagagctacgggctttagttctagctattcacacaacccttcaaaaccaggaggcaaggtga

SEQ ID NO: 71919 - DNA, 1893 bp, Proteus mirabilis HI4320
gtgaagtttattcgacctgaccactggcagccgaaggggatcgacgatcttgagccaaatgcttggcaagcactaaggcaacgagagtccacaagtattatcgctggccctggagccggaaagacagagtttttagcgcaaaaggctgcatatctgcttgagactggcctatgtccatcaaacaaaaaaattctggcgatttcattcaagactgatgccgcaaaaaatctcgcagatagagtgaaagagcgttgttcagaagaagtcagcaatcgatttatttcgatgacttttgatgcattcactaagaatttaatagatcgatttcgcatggctttgcccgagcatcatcgcccatcaaagcgatatgaaatctcttttccatcttttcaccaagagaagcagcttattagtagtttcagaaataattttgggaacgcagtaggtatctatagctttacgcaaagactccaaaacatgaatcagtttatcggaagtgtgcgtataggagatcccaagttgtcatggttggaggaggaatttttaactttttggttgagtcagcaaataaactaccccgacggtgtttccagagtgtcatttccggcgctaaatcgacttgctgaatatatcgttcgcactaacgatcatgttcgtagatctattagagcatcatatcctattgtttttgtggatgagttccaagataccacgtttgctcaatatgattttctatcttctgtttttaaatcaagtgaggctgaggtaacagcagtaggagattacaagcaaagaataatgggttgggccggtgctaaaggtgatgtgtttcatcaatttgaggctgacttttcagcagaacgacattcattgctccttaatcaccgctcttcacctgaattggtcaggatacaacatgttattgcacaagctattgaccatgaagtgagagaggttcagacaagtaatatcaatttaatttctggtgatgccgcttggatttgttgtagttacaatataaatcaggaggctgctcatttggctgagtggatagcaaatgacttgctaggtaggtcactgaatccaagaaactactctattctggtgcgtcaaaaaccagaagattatgaacaacagctatcttattatctcgctcaacatggactgagcttacgaaatgagagtgtgaaaataggtcaaactacattacaagatttgcttgctgaagaactgaccattttgttctctactctgcttaggctgggactggtccgtcgaaatgcacaagcgtggaatcaactatcatcagatattcgaattcttcgtaatacgaaccaggaagacgaaaaggcactacgacaggttgaacgcgagctaacaaagttcatttctacactacggatgttaatgcaacagcctctgacacgggaaaatggtcgcgatgtatttgagcgaactataaaatttattaactcagacgatcttcgcagctccttttctcgttacgctacaggaaatttacttgaaataaacttggcagcactcgaagaattttttataaactgtgttgatactcagaactcttgggcaggtttgctagatgagtttgaaggcacgaaccatattcctcttatgactattcacaaaagcaaggggcttgaattcgatacaaccattttcatggggatagacgacaacgcttggtggtcttataagcaaggtgataaggaaggactatcgacattttttgtagcactgtctcgcgctaaacaaagggctattttttcctattgtcagcaaagagggcaacgaaccaacgtcgcagatttttatgagttgttgacggccgctggtgttcaggagtatgcgatccaaccaagtgtagtggcataa

SEQ ID NO: 71920 - DNA, 1788 bp, Xanthomonas campestris pv. campestris
atgagaatttctaggatcaggttgatcaatttcgccaatttctcggatattgatatcgagacaggtgagagcattgtcatcgttggcgaaaacaaggtcggcaagagcaatttcattcgcggcctgcagttgatccttgatcctggtttgtccgaacgcgacagacagttgcgacttgagcacttctgggatgggttgggtgaagacaaggttggcgagactgtggaagtgtcagttgatctaacggattttacggacgatccgcggttgatggcccacctcaacgattgcgtgattgatcctggcccacccatggtggcccgactcacctaccgcttccagcctaagacgggcctggggcatgccccggaatcgttgaaggactatgagtatgtgatcttcggtggcgacgatcccgatatgcgtattggcggcgcacttcgccggatgttgccaatagatgttcaagtagcactgcgtgacgctgaaaaggaccttgcgagttggcgcaattcgccattgagaccactcattgaggatcttgccgcgtcgttgaatgatgacacccgtgaggagattcagaatcaggtcgaccaagcacagcgagagctggctggtcacgaggaagtggtagcgacagcagaacggattagcgaacggctaatcgccatcgctggggagcaacatgccgttccgatgtcgctcggacttgcgccaactcgagtcgacgcattgctgcgcagcctgcggctgctgatcgacaacggcgtacgcggagtcggcgatgcgagcttgggaaccgcgaacctgatcttcctggcgctgaagagtctcgaactcgaccgcctcgtttccgatggagagcgcgaccacaccttcttcgtagtcgaggagcccgaagcgcacctgcacccgcacgtgcagcgtctaatctatcgttacttccttggcacgggggcggaagatggtgatgaacagccaccgctaacgacaatcctcactacccactcgccacatatcgcaagcgttgcgccgatcagatctattgtcctgctacgccatgacgcagcggaaggcaagactgtcgcggtatcgacagcaaacgcacctttcacgcagagggatgaagaggatctccaacgttacattgacgtcactcgcggcgagattttcttttctcggggggtgattctggtcgaaggcgacgccgagcgcttcatcgttcccgcgtttgccgaggtactcaatattcccctcgatatgcttggaatcactgtgtgctcggtgggggggaccaacttcaccccgtatgtgaagttactgggccccgaaggactcaacatcccccatgtgatcctgacagaccgtgatccgaccaacggtaatcatccattggtccgcaggcggcttatcaatgtccttgacgtgattgagggcggtgtcgatcacgaggaattggatgcggacgaagtgatcaagcttgccgagcagtacggatacttcgtcaacgagaacacgttagagcccgaactatttgcaggtggactggcggaggatatgcaggaagtaatccgggaggagcttcctcgattgaggagagaaactctgaatgcattgcagcaatgggtggacgatcctgctcaaattgatgaagacttgctgctcagattaatcgagaggatcggaaaggggaggtttgcgcaggcacttgcgccgtcggtgtcagaggacgtctgtccggcttacattcgttccgctctggagcatatccgtgatgccatcgcgtag

SEQ ID NO: 71921 - DNA, 1815 bp, Xanthomonas campestris pv. campestris
atgccatcgcgtagcgtcagcacagcctacttggctcaagccgtcgaactggctgggaatccgggtcagttggcggcttacaattctcggggacattgtgtggtgctcgccggtcctggaagcggcaagaccaagacgctcgtgctgaaactcgcccgcatcctggcggaagacgtcgagacccctcgtggcgcagcatgcatcacgtatagccaagaatgcgcacgcgagctcactcgccggattgaagccctgggacttcgacaagcacccaatctcttcattggtaccgtccatgggttctgtttgcgccatctgttgatgccgtatggacgcttggccggtttgccgataccgttccctctctcggtggccactcaacgagtcagcgatcggttgttgaagcaaactggagacgcgctttttggccagaaccacccgtacaaggtcattgacctcgggcggcatcgccgctccgtgctcaatcgaaatagcgtcgcgtggcgtagcgaggaggaactcgctgcttgggccgaggcttacgaggccggtcttcgcgacgagggcctaattgactacgatgacatggtggtcttcggtcagcgcttgatcgccgataacgactgggtactacctctggtccaggcaaaatttcccgtgctcgtggtggatgagtatcaggatctaggcgtggcgcttcatcgcatcgtcaaacgccttgccttcgacggtggggtccggcttttcgcggtcggtgatgcggatcagtctatatatggatttacgggggctgatggcgcgttgctcatagaattggcggctcgcagcgacattgagcccgtccagcttcaattgaattaccgttctggcgcaggaatagtaactgcgtcagagatggcgcttggagaagcccgaggctatcaagcgagcgatcctgcgcgacaaacgaccatcgaattcttactgcgcccgggtggtatggcagatcaggctgcgcacgccgtcgcgcagatcattccggcggccttagcctccaagccgggacgaacgctgggcgatatcgcgatcctatacaaagattatcgcgcaggcgatatcgtggctgaagctgtggcaactggcggtctcgactacatccgtgtggataccgcagcaccttaccgcaaggttgccctaacaagttgggtcgaagattgtgcggcgtggtgcgggggtggctggcgtgtcggacgcccacaattgcgtggactactcgaccgctatcgcgcatttcatcgggcgagcttggacgatgcacaggctaggcgcgaagagcaagcgctaaccgctttgctatgggaactgcgcgctgaccagcaacctgcgcgagaatttgttgcttcgttgcgcgacggtgtagtggatcatctgctggcggttgaattggcgctcgctgatcaggaggagcaactggatcgtatgacggcagcgctcgccgaaggcggtgcacttgcttcgctagacatcacgagtttgggcggtcgggacggttcgcccgatcacctgaatctgctgacactgcattccgccaagggctgtgagtacgacgtcgtcatcatggttgggctcgacctcggaaatctaccgtggcgcaacgagagtccaaagaagttgcgggaaagccgccggctgttctatgtgggactcacacgtgctcgcgacgaggtccacatgctgtattcgggcttcgttgatggccgctatggccccatgcgccttgggcgctcgccattccttgatgagctggaggcgcgaatgcgcgccgctggcatttga

SEQ ID NO: 71922 - DNA, 1791 bp, Sphingobium japonicum UT26S
atgaccgtgcggatttcgcgcgtaaagataagcaacttcgcgaacttctcggagatcaacctcgagacgggcgagaacatcgtcatcgtcggtgagaacaaagtcggcaaaagcaatttcatccgcgcgctgcaactgattctcgacccgggcctgtccgagcgtgatcgccagctcggcctggagcacttctgggatgggttaggcgaggacaagctcggggaaacggttgagatcgccgtcgagctgaccgacttcaccgacgatccgcgattgatggcgcatctgaatgactgcgtggtcgatccagggccgccgatggtcgcgcggcttacctaccgctttcagccgaaggccaatctcgatcgggatccggagagcctagccgactatgagtacatcatctttggcggtgacgaccccgagatgtccatcgggccgtcgctacggcgaatgctgccgctcgacgtgcaggttgcgctgcgcgatgccgagaaggatctggcgagctggcgcaactcgccgctaaggccattgattgaggagcttgcaacctccctggacgcggatgctcgcgcggaaattcaggagcaggtgaacgaggcgcaggcggagttggagggccatgccgaagtggtcgccacggcagagcggatcagcgagcggctgatcgccatcgcgggcgagcagcatgcggtcccgctgacgctcggtctttcgccgacacgggtcgacgccttgctgcgcagcctgcgcctgctgatcgacaatggagcccgcggcattgccgacgccagtcttggcacggccaatctgattttcatggcgctgaagagtctcgagctcgatcggctcgtaacggacggtgaacgcgaccacaccttcttcgtcgtcgaagagccggaggcgcacctgcatccgcacgttcagcgccttgtctatcgctacttcctcggcacgggcgcagacggagaggaggatacgccgccgctgacgacgatcctcacgacgcattcacctcacatcgccagcgtcacgccgatccgctcgatcgtcttgctccgccatgacgcggagacgaatgcgacgatcgccgtctcgacggccactgcgccgtttaccgagcgcgatgaggcggaccttcagcgctacattgatgtgagccgcggcgagatcttcttcgcccgcggtgtcatcctggtcgagggcgacgcggagcggttcctggtgccggcctttgccgacgcgctagatatcccgctcgacatgctcggcatcacggtctgttcggtcagcggcacgaatttcacgccctacgtgaagctgctaggcccgcacggcctgaacattccgcacgtgatcctgacggaccgcgaccccaatggcgccagccatccgcgggttcggcgtcgcctgatcagtgtgctgcaattgcgggaagaaggcgtcagctacaggcgtctcgacgcggacgctgtaatcgcccgcgccgagccgttcggttacttcgtcaacagcaacacgctggaaccggagctgtttaccggcggccttgccgagggcatgcaggaggtgatcgaagaagaattgagcatcggcgacggcacccgcgaggagctgcaagggtgggtggatgaccccgatacgctcgacgaggatgcgctgattgcgctcatcgaacgggtcggcaagggtcgttttgcccaggcgctcgcccgccacgtcgacgtggatacatgtccggactacatccggcaggcgctggagcacatccgcgatgccgttgcgtag

SEQ ID NO: 71923 - DNA, 1818 bp, Sphingobium japonicum UT26S
atgccgttgcgtagcgtcagtgctgcctatctcgcccaagcggccgatcttgctggcaacccgggccagcaggcggcctatgactcgaccggcaactgtgtcgtgctggccggtcctggcagcggcaagaccaagacgctggtgctcaagctggcaaggatcatggccgaggacgtgcgcgcgccgcgtggtgcggcgtgcattacctatagtcaggaatgcgctcgcgagctgacccgccggctcgagcgattaggcctgcgtgaggcctccaatctcttcatcggcaccgttcacggtttctgcttgcggcatctcctcatgccgtatggccggcttgccgatttgccggtgcctttcccgcttaccgtcgccacgactcggcagagcgaccaggcaatgaagcgcgtgggcgacaggctgttcggtgtcggtcatccgaacaagacaatggaccttggaaggcacaggcgatcggttctcgaccgaacctcgattttttggaccagcgaggcagagctcgccgcgtgggcggaaggatacgaggccgagctgcggaggacgggtcttatcgacttcgatgaccttgtcgttttcgggcagcggctcgtctcggagcacgattgggtgctcccgctgctgcaggcgaagttccccgtcctcgccgttgacgaatatcaggacctcggtgtggccttgcatcgcatcgtgaagcgcgtggcctttgacggcggcgttcggctgtttgcagtgggcgatcccgaccagtcgatctacggcttcaccggcgccgatggagcgctcctgcaggaccttgcggagcgggacgacgtcgagcgggtgcagctccggctcaactatcgttcggcggcccggatcgtcagcgcctccgagatggcgctaggcgaagcgcgcggctatcggtccaacgacccggaccggcaggccgtcatcgagttcacgcagtgcgctgacggtctcgaagggcaggccgcccatgcaatcgaagagatcatccccgcggcgcttgcgggaaagccagggcgagcgctcggcgatatcgccatcctctatcgcgactaccgggctggcgacgtggtggcggaagcggtggccgccgcgggcctcgacttcgttcgtgtcgacaccgccgctccttaccggaaggtcgcgctcacgagttggatcgaagattgcgccgcatggtgcgcgggcggctggcgcgaggcccggccgcagttgcgcgggctgctagatcgttggttgggatttcatcgcgcgcgcatccccgaagccgaggcgcgcgatgaagcgcaacgtctaacccagcttctctggtcgcttcgcgtcgaggaggggatcgctcgggattttgtggcggcgctacgagccgggatgcttgacgcacttatggctggcgagcccagcctcgccgaccagggcgagcaggtgaatcggatgacggcagctctggctgttggaggcgcgcttgccgacctcgatttggcaagtctcggtgggcgggacggctctccattgcacctgaatctcctgacgcttcactccgcgaaggggtgcgaatatgacgtcgtgattatggtcggtctcgaccttggcagtctgccgtggcgcaatgaattgcccgctgctcgccgcgagagccgccggctcttctacgtcggtctcacgcgcgctcgcgacgagatccatatgctttattcaggctacgtcgatacggcccgcgggaggatgcgttgggggcgctctccattcctcgacgagctcgaagcgcgcatggaggaggcggaggacgagtaa

SEQ ID NO: 71924 - DNA, 1734 bp, Agrobacterium fabrum str. C58
gtgcaccttgcatctttgaaaattaaaaacttccgtcgattttctgaaacgacgatcaagttcaaatctggcctcaacgtgatcgtcgggcctaacaacattggcaagtcagccgttgtcgacgcgcttcgctcgctccttgccggggcagatgatccttatccaaggttcacggtcgacgacatccatgttcccaagcttggagaggcgagcggcgatatcgtatttgagttcatttttgatgatttggacgggaatgatgaagctgactttatccacgctctgcgtgaaaagccggataacaagctcgaagccgttttgaacgtcgcgttcggtgatgcggacaaatcaggccgactacgaccccgacgttggtgcggagcgttcgaggaagtctccatgtcatcgtcaatgctcgataaccttcgaagtgtgtatttgccgccattacgtgatgcagagcagggactgaggccgagccgcaacagccagctctcgcgactgctacatctccttacggatgagaccggcaaggaggaagttgccctccatctcaaagacctagacgcgaagctaaaggaactccaggtactcaaagatgctcagtccgctgtctcgggtcggcacgagacaatgttgggcgaacgacttgctcaagtgctcaatgtcggcttgaccggcagcgattttagcaaattggccgcccggctatctctcctggtcgataccttcgaaatcgaacgcaacggccttggatacaacaatctaatattcatggcggtggttctcagcgaactttctaaaaacgcagaggcgagctttcgcagcctaatcgtcgaagagcctgaggcacacctgcacccacagctgcaagcggttttgctgaagtatctttcgagcattcagaatggtgtcggcgagcgggatgtgcaggtcttcgtgaccagtcattcgccgaacttcgcaagtatcgccgatctgaactcgattgcatgcctttacgaggtggacgacaatgtcgcgagcttccatcctggatcggtcaatttcgcgaagggtaagaaggagaagctcaagcgatatctcgacgtgaccagagcggagttattctttgcccggcgcgttatttttgttgagggtgcggctgagctgctgatggtcaatctcctggcgaccaaggctggcttcgacctgaggaaccacgggatcagcctgatcagcgtagaaggcctgaacttcgattcgttcatgcctctgtttggtgaggcagggatcaaaattcctgtttccgtcatcaccgacgccgatccccagattgaagatgccggcggcaaaaagactgcgcattacccttccagtaccgaggcgataattgtgtcggacaacacaaaatcgatgaaagcactcgaagacaaatacctgaaagtttttcacggtcagaaaacgttcgagtatgattttgcactcgaagaccaaaatcgacaggcaatgctggatgcgcttgaagacatccatccggtcatagccaagaatctacgggacgtcgttgcggcagaaccggacgacgccgcgaaagcaaaagcgttattccgtggcatgtttgagcgggaacagaacaacgtgcagaagggcaggttcgctcagacgcttgcggcaaagatcgaggatgagggactgccaatcgttgtgccgccgtacatacgctttgctgtggagcatgcatgtcagccgtag

SEQ ID NO: 71925 - DNA, 1701 bp, Agrobacterium fabrum str. C58
gtggacctgccagcggagccgttcgtcgtctcggcatgtgcaggcagcggtaagacgaaaacggctgtgcatcgcgttgcagcgatgcagaatcgattgaccgaccggatagggcgcatcctcctgttatcgttttccaacgtggcagtggaaacgttccagcgcgaatatggaatgttggtcactaacgacaaacgacggatagggcccatcgtcgaaatcgacacggtcgatggctttctcaccaaaaacctcctgagaccgcacggccatcgcgtgatgggctgcgataggtgtccattcctcgtcgatgggcgcgagccgttcttgaaacatttcactgtgtgggacggttctaaacctgcacggactgccgacctgcggatcaccatggacggaggcaagttttccttcagagtaggaaagtgggccgggacggcgatttcccgaacgcctgcagtagaggctttggaaaagctcggagcagttggagcttatacgcatgaaagtgcccggtactgggcgtaccgtctgctcaacgaagtccccttcgttctgcgagccatagcgcgtcgatattcccatatcctggtcgacgaagcgcaggatatcggaacgatccatcaggcgctccttgagaagatttcggatgccggggctgaactctcgctgattggcgacgtcaatcagggcattttcgagttcaccggagcgactggagatttccttggaaattatcatagccgagctggggtgaccgcgaaggaattgaaccgaaatttccgatcggtgccgtcgatagtaaaaatcgcaaaccagctgtccggccgaaaagatgagccggatcgagccgctcctgatgagctcagtggggcgttttacattgcagtcgatcacgacaagcgcgatgaggcgctgctgcggttcaagaagtttcttgataaaggtagtatttcgcagtcgaagggagtcgtcgtctttcgttcaagcgaagtcttcaacacttggagcgggccaggcgatccccaaggccagggcgttattaagtctttcgtggccagtgcgagatggagagaccaagccaagcgttttgaccaagctttttcacaggcgtgtgcggggatagtaggtctattggatgatggccacggagacctgctttcgctgatcaaaggacaggcggtctctcaagagttgcgcggcgttcgccgagagatttggaatttcgtgaaaaatcctgccacgggattgcccgcatcgaatctggatgcggttaaagaatggcatccccagttggtggttcgagtgaaagctctgttggggcgtttggaaaagcagtacggcttcgtttccggcgataaccttgggaaccgccttaagaaaacggcgttgccgaacggaccactggttgaggctccggaaggcgatgagcctcagaatctccaattcaggctttccactgttcacaaagttaagggcgaaagcctcgacggcgtcatgtatgtcgccagtaggagcaacattgaagaatttttggcggggacgaaaaccgaaaacggtaagatcggttacgttgcactgaccagggcgcgcaacgtctttgtgctcgcggtaccttccgacgccatcgcggcgctaaagccgctcctagatgcgactggattccaagacggggacgtctgcgcgctagccggtgcatga

SEQ ID NO: 71926 - DNA, 1887 bp, Brachyspira murdochii DSM 12563
atgtatataagagaattaattataacaaattataaaaatataaaaaatgtaaaaattgatttacaacatgaatattctatgatttacctaacaggtgaaaatggaataggaaaatcaaatattatagatataatattcaaattatttacatacaaaaaaaatttatttgaaaaagaagacttctataaaaatgaagaaaaaattgaaatagaaataaaacttgaattagaaactaatgaaatatttaaagattatctttatagagataataataagtatttcatgaaaatagtatataaacaatatagtagtaatgatgaatatgaatggttttataaaaatcttacagaagaatataagttacttaataatatattaactaattttatctgctataaatatagtccaagagaatttgataataatttcatgtttaacaaatcaaatagaataggaaaatttctatcaaaaataatagaaaatcaaataaaaaaatatcaaaatgatgataacaaattacaaaaattattaaaagaaaattatgaaaattgtaaaaatgaactaaatgaaatatttaaacctatatttaataaaccaaatcaagaattaaaattaaatattgaaattgatgatgaaataaagtttttattaaaattatttgaattagtacattatcataatgatgataataaattatatttaaatcaattaggaagaggaagaggatattatctatatccatttatagattttttggcatttttatatgataaaataaacaatacaaaatctcagggttttaatactaatattattattttatttgatgaaccagaagtatttttatctccatttttacagcgtcaatttatggatcattggttatcaatatttaataataatcaagactatgaaattataaataatattattaatataataactgataataataatgatgaaataaattacaatataactccaatattttttgtctctacacattcagcacatataataccgcatttagaattaaatgaaaaaaagaatatattatctatacaaagactttattatgataaagaaaataacgttaaagttgcatctcttgataaatatgaagctaaattaaaacagtttatgatttttgatagaaatatattagagggactttttgctaaaaaaattatactagtagagggtgatacagaaattggatttttaccttcttgtttaaatgctaatggtattaacattcatcaagaacatatatatattattaaagcggcaccaaataattttccaagtctagcaaaaatattctcaaaattacaaataaaaacatatatacttacagatagagattgtaaaaataaagatataaaagagcaaagaaataacaaaatataccaaacatatgtaaataaagaatacggatatgttaataaaagggtttataatttatacgaaagtataaaaaattgtaataatgtaaaaatatttgtgtcagattattgggattttgaggaaagtattttagtatgtctaaaaaatcattttaaaaaaatatatattagcattagtaaaagtaatagtaatgataaagataaacttactgaaaaagtacaagatgaaaatttagatgaagaatttactaaaaagttattatatatgagaaaaaaacataaaaatataaatgataattataaattaataaaaaaaataataaaagaaaatttaaaactagaacaagatgaatataaaaacgaagaaaaaatagattttggtaatatgaacagtgaagctatcaaaaatgcagctgaggaaaattataaacttcctaaatatataattgatttaataaaagaattaaaaaatggtaaatag

SEQ ID NO: 71927 - DNA, 1623 bp, Brachyspira murdochii DSM 12563
atggtaaatagtgataaaattaagaaaatattagaaaaacacaaagatgataaagaacagttagactttatagcatctacagaacaatctcttacaattgctcctgctggatatggtaaaacagaaatgttaatctcaaaacttaactatatcatagaaagtaaacaaattaaatatccaaaaagaattttagttttaacattatctaatgtggcaaaacacactattgaaagcagattaaataataatcaaattgtagacatatataattttcataatttagcaagtagaattttaatacttcaaggtaaacaatatttaaatattgattataaatatgaatataaacactataatcttaaagataaacttaaaaaaaaatataaaaatgataaaatagaaaaaatattaaattatcatagagaaaaaattagtgaaattaataaaaaatttcatgaaataaaatttgatgataaaatatttcaatatgtatatactgtaaataaaaataaagaaatatgctatgaatatgtaatatatattgcaataattttattaaaatattataaaataaacgaaatatataaaaatttatatagttatatttttgtagatgaatgtcaagatataaatttattgcactttatcttattaagaagtattgctgataatgaatataataaaatattttttttaggagatacatttcaatctataatgaaatttgctgatgctttaggtgaacaaattgaagatttattaaagaaatattttaatataactaaaattatagaattacaaaaaaattatagattagaaggaagagaaaatatatctaatttccaaaaaaatattagaaattacgataaaaaattacaaatagaacttgatgaaaattttcaaataaaaagttttaacgattttgaagatgaaatattatttattaataatcaaattaataaaattacttctgaaaataaaaaagctaaaatagctattttatgccctacaaaatattctttatatgataagaataataaactcatagaaaaaatagaatccatatttacaaatttaaaaataaataatattgaatatatcaatacattattatttagtgataacctagaaaatgaaatatatgataaaataaaagatataaaaagattaaattacaataatatcatacgtagtatagagaattatcatttttataatgatgatataaaaaaattaatagaaggttatagaaactattgtttaaaatttggaattgattttaatacaataatagaagttataaaagaaaaagatttaataaaatatgctccttattgttctgtaaatgtaaatatattaaatatacataaagcaaaaggagcagaatgggactatgtttttattccatttgtcaacaaaggaaaatttccagttttttataaatgttatgaatgtagattaaatatttgcgatgaaattatagatacaaaacaatacaaagaagaattttatcaagctttttatgtagcaattactagaacaaaatgtggtttatatataacagcaacaaaaaataacgcttcttgtttattttatcattcattaaaattaattgatatttga

SEQ ID NO: 71928 - DNA, 1920 bp, Pseudomonas savastanoi pv. glycinea str. race 4
atgaagctgtgcagtctgcggatatctaatttccagtcgtttggccctcaacctactccgatcacattcgaagacataacctacctcttgggcccgaatggcgcgggcaaaaccgcagtcctccaagcactgtgcaggctatttgcatttgagcccggactgcgtcgcgtccgctcttctgactttcacgttccagtgggcctcagcaatgttgagggtagtaccacgttatggctggaggccgaattctccttcgcagagacagaagacgacgaggacaacgacacggttgccccgcatttcgaccacatgcggctccaagctgcgggcgatgtgccgcgagtacgttatcgcctaacagccactgttgatgacgaaggtgacgtcgaagagacgcttgtttacgtcacgcagacagatgcggatggaaacccaacagtaagctccatcgtccctaggcatcagcgcaatcagattcaccttcactacatcccagcccgacgtgacccatctgaccacatcgcctatggcgcaacagcgttgctcggtcgtttgcttcgtgcaacacagtggggtggcgaccgaaatacggtcaaggatttgaccgaccaaattaccagctgcctggccggcaatgcttcggtcacagcgcttgggcgaagcttaaatgcctcatggaaaggtctccataaaggagcatttttcgctgagccgaagctcactttcgtgaactccgacatcgagatgctcttgcggcacatgtcggtgtcgttcacgccgggccatggtgagaatgaggtagatttttcgcgactgagtgacgggcagaaatcaatgctctacctctcacttgtgttagccgcgcactcgatcaaccgtgacgtgagatcgggtaaaaacacagccattgatcctgcgaagttgaaaccgccagccttcaccatattggctatggaggagccggagaacagcctgtcacctcattacctgggccgaatcgttaacgcattgaaaggatcaatcggtgtggatgcgcaggcgctgatcgcgacacatgcgccttcgatgctgcgccgggttgatcctgagaacatccgctacctgcggctcggctcaaaccggtgctctctcgtcagcggcatcgcgctgcccgccaaggaacatgtggcccataaattcgtccgtgaagccgtccaggcctttcctgagatttatttctcccggcttgtagtcctgggcgaaggtgacagcgaggagatcgtcattccaaggattctacaagccaagggagcgccggtcgacgaatcggcggtgaccatcgcgccgctgggtggccgtcacgtgaaccatttctggcgtttgctttcccaactcggcaccccttacatcacgctgcttgacctagatctcgcacggtaccaaggaggctgggggcggcttaaatacgtcaatgaccagctggcgctttttgaacctcccaaggttttgccctttacgatcccagcctgggacagccatgagtttaaagtcagaattcaaaacggcgtttcgtctacatcccctgcaaccctcttcgacctgcttgagcagcgtggcgtattcttctcggcaccactggatctcgacttcgccatgctcaccgccttccctatagcatttagcgcgctgcctgccgtggccacgtcagaaagccagaaggcagtgcttggtaaaagccatcaaggcgccgatcaatacagcccgcaagagcaagcttggttcgatgcttaccaccatctcttcaagctcggcagcaaacccgcagctcacctctcggccctttcgagcctctctgacgccgaactactcgcaggcctcccaccctcactggatcgactagccgatgcagtaatagcagcgttagaggagtcacccgagtga

SEQ ID NO: 71929 - DNA, 1683 bp, Pseudomonas savastanoi pv. glycinea str. race 4
gtgattcaccctgaccgctggatgcactcgcccgggctcactctggaggcgaatgcctggcacgccatcaaggacaccgatcactcgctcgtccttcttgcggggcctggtgctggcaaaactgagatattggctcagcgtgcagactttctcctgcgcacaggcagttgccggtatcccaagcgaatcctggcgatttccttcaaatccgacgcgagccgcaatctcaaagaacgtgtaagcctgagatgtggctgggaacaggccacccgtttcgacagctttacgttccactctttcgccaatcgaatcgtcagtcgctttcgcgttttattgaccgaccccgacgccctcaaacccgactactcgatcggcaaagaggctatccctggcgagcagatcaccttcatgcaactgcttcccatcgcgctcaaaattctacgaacgagcaagattgcccggaacactatccgtcagacctatgcgcacgtatttctcgacgaattccaggactgcacttctgatcagtaccaaatgatcaagcttctgtttgaaggaacaccggctcttctgactgccgtcggcgacaccaaacagaccatcatgggttgggctggcgcattggatggcatattcaagctttacgccgatgacttcgccgcccggccattacggctgtaccgaaatttccgatccaagccgcgcctgctccgtatgcagaacagcgttatccgagacatcgacccttcagccctcatgcccgacgaaatgatcgggggggaagatggtgtaatccgggcagggaatttctcctcgagcgccgctgaagccgtttccctggcgaaccttatccacaaatggatcgaggtcgaagacttgcgaccagccgaaatcgccgttcttttccgcggcgagatcgatttgtatggcgaagaactgatggagcagctgacgcttaggaacataccctttcgcaatgagaacaccctccaggacttgctcaaagagcctgctgccaggctaatgatcgactacttgacctgcctctatacgcgaggctccaacaaagcctggtcacggctgatggatcttttcgcgccgttcgatgacgagtggaacagcgaccggactcacaaatcgttcgagctttgctacaaacagcatcagaagaaggtgaaggcagcagcgaagacaacgaccccctacgccgattggtgggagctcgccaaggcgttcttcgatatcctggggcatgccgtcatgacgaccctttcttcagactacgaaactaagcgccgtctcaaggagataattcgcgatactcgtgaccacatctccaccctcctgcagacagaacccgatctgctaagggctcttgcccggttctcagacgacaacgctgtccgcttcttatccatgcataaaagcaagggattggagtttcattcggtgatcgtcttcggtgtcgagcagcagtccttccggggcaaaataggtgaagaacggcaggtcttcttcgtcgcagtctcacgcgcgaaggatcgtctgatccttaccactgcgaatcagcggcaacgccctgcgggaatatcggcgagtaaaagatgggatgtcgcgagacagccgcatgtggcctttgtcacgtacgtcactgagcatttgtcgcccaaacagccgcagtga

SEQ ID NO: 71930 - DNA, 2136 bp, Pseudomonas savastanoi pv. glycinea str. race 4
gtgcatatttcaaggttacaactcgtcaactaccggaatttcaagtgtgcgaatgtcgtattcaacaagggcgtaaacacgatcatcggcgagaacggatcaggcaagaccaacctgttccgggcgttgcgcctcttgctcgacgacacgctgctgcgcgcggcatataggctcgacgagaaggacttccaccggggccttggcgactggcgcggtcactgggtagtcattagcctcgagttcgatgaggtatcccaagacgaagcgattcaatccctctttctccatgggaccggcaacatcgccgacggcgcgatcggcaaggcgacctacaaccttatttttcgccccaaggcggcagttcggcggaccctggccgaccttgccgccggtgacaccgtaggactcgccgaggcacgttcgaagatcaccatttcggattatgaaacgatcttcaccggcaagagcaccgcaaacttcctcgatcccgaaacctacaggcaactggttggcgacttcgatgcggtaatatttccccaagaactgacgaaccccgctatcgggggcgtcatcccgggcatgctctcgatctcgcgcgaagtgtgcttcaccttcgtgcaagcactgcgcgatgtggtcgccgacttccagaacaaccgcaccaaccccctcctaactctgctcaagtgtagaagcggtgagatcgatccgcagagcttcgagccgatcaccgcgctagtcaaagggctcaacgatgcaatcgagggcctaccagatgtaggaaccatccgcaccgatatccgcgacaccatcaccgatgcggcaggcgagacctactctccgcgatcactttcgatccgctcggatctgtccgacgaggccgaccgcctattccagtcgctcaagctgtttgtgggcgagagcgaggaagaatatgagggcgcgattcacgagttgagcctgggcggtgcaaacctcatttacctgacattgaagctgctcgagttcaaatatcagaagcagaaagagtccttcgccaatttcctcgtgatcgaagagccggaggcgcacatccacacccatattcagaaaacactgttcgaccggctgaactttgatgacacccagataatctattcgacccattcgacccacatatccgaagtgaacaacgtcgtgaacatcaacatcctcggccggcaggacggacgatgcgaggtttttcagccatctgcgggacttgacgccggccagattggcaatatccagcgctacctcgatgcggtccgcagcaatctgctcttcgccaagagcgtggtcctggtcgagggcgacgccgaggagatcctcatcccaatcctcgttaaaaaagtgttcgggctcagcctggacgagctggggatcagcttgatcaacatccgcagcaccggcttcgagaacgttgcggtgcttttccacaacgagcgcatccgcaagcgctgcgcgatcatcaccgaccttgaccgcgcatttatcgatacgaccacggacatactagacagtgacgataaggcggccgcgaagaagaaagcactggggtcacagatcgctggactccagcgcgaggcagcgctcaaggagttgtgtgcccggaatacctggctgacggcgcacttcgccgaccacactttcgaggtcgatttcgtctccgccggcaatgtcggcactgtcgtttcggtgctgggcgacgtctataaggatggcggcaccatcgcgacgtctaagatggagctggaatcgggcgacatcgcacgtttcgggacgcgcgtgctgacgatggcacgttacgccggaaaagggtggttcgccatcatcctagggcgaatgatcacgccagaaacttcaatcccggattacatcctcgacgccatcttccaagcgcatatcccggtatccatccatacatgggcgcgtgtgctggactatcgggtctcgatccttgcggcgtcgcaactacacgcgctaggagacatcgacgcgatgcgcgcgcaaatcagacgctaccatcgcggcgagatcgactttgcaggtgtccgcgccgaaatgctacatgcctttccggcagacggcatcaacaccattctggcgggcttctag

SEQ ID NO: 71931 - DNA, 1674 bp, Pseudomonas savastanoi pv. glycinea str. race 4
atgtttgtctgggacaggaaggatctgaacgacgcccaagtcgcagccatcgagcatccaggcagcgtcttcctcgttgcctgcccggggagcggtaaaacgaggaccctgacctacaagatcgcccgcctgttgtcggagcttaagtcggacaaaaaacgcgtcgtcgcgatcacctacacgcaccgggctgcggatgagattcacgaacggatcgagcagcttggcgtcgatacgagccagctttggattggcacgatccactccttctgtctcgaatggatcttaaagccctacggaatttatcactcggagctcaagcacggtttccgggtgatcaacgtccatgacaccgaacgaatgcacgaggagctctgcagcgcggtgcagggcactaagctcagcagcttcgactgcgcatattatttcacgccgaacggctatgtcctgacatgcaacaagaccaacaagcatgaagcaattgggggagtattgcaggcatattggaaggagcttcgtgccgagcggcaggtcgattttgaactgatccttttctacgcctaccaacttatcgagaattatccgtcgatcagcatgctgctgggttccatctttgaatgcgtgctcctggatgagtttcaggacacgcgggaaatccaatatgcgatcctcgcatcgatcctgaaagcgtctaaagacggtacgtccgccttcgtcgtaggcgatcctaatcaggcaatctatggctcgcttggcggctatgcgatcacggcggcggactttgggacgcagtgcggcatagccttcaaggaaatggagctatcagacaattaccggtcgtcatcgcgcattgtgagctatttcggcaattacaacgtcttgccttcgaagatcgagtcggtgggaaaggacaaggactacgcgagcgtggtgtcgttcgatcaccagacgcaccgcgatgcgctggaggaagagcttgtaaggctcatcaaattcaacgtcgaaacgctcgggatcgctcagcatgaagtctgcatcgttgcgccttggtgggtccatctcgcaagcatgacacgccggctggtcgcggcgcttccggcctattcattcgatggcccgggcatggtgcccttcgcgcgcgatgtcgacaatttctggtacaagctcgctcggattattctgacggaggcgtccccacagctctatgtacgccggatgcgatgggcgggagaggtaatcgccgacctcagagatgcgggcgtcgaggttccaagtttggaccgcaagacactgctgcgcgcctgcaacgccatcaccatcaccatcaccatcaccatcaccgagaccgatggcttggccttcctccggacgttcttcgaccagctatgttccactttcgggattgatcgccatacctacgcggcgcttcaagagcatcacgacgctttctttgaatgctcgcagaagcgcatcgataagctcatcaaggaaggcgctgaggcgattgctgaattggggatgttcaggaaggtctttgcggaccggactggtgtcacagtatcgacgatccacggggtcaagggcgccgagtatgacgcagtgatcgcctatggcctactagaagggatagttccccacttcagcgatccgaaccaaagccgagacagcgaataa

SEQ ID NO: 71932 - DNA, 2040 bp, Lactobacillus salivarius CECT 5713; identical to SEQ ID NO: 71690

SEQ ID NO: 71933 - DNA, 1692 bp, Lactobacillus salivarius CECT 5713; identical to SEQ ID NO: 71691

SEQ ID NO: 71934 - DNA, 2067 bp, Clostridium ljungdahlii DSM 13528
atgaatttgaaaaaattgagattgtgtagatttcgttgttttggtgatgatgaacaggaaatttactttaataacttaactacgttaattggcaataatagctgcggaaaaacaacagtattacaggctttattaaaattattttcatataattctaatgaacgaaatttaataagaagtgattttttcttaccaaaaggtgtaaagcctgatgaaatgcaaaaacaagatttatatatcgaagcagtatttgattttcctgaattagatgataaaaatatagaaaataaggattctattccaatattttttagacattttatagttgaagagcctagtggaaagccttatttacgaataagattagaagcttcgtgggaaaaaggaaacaatgtagacggctctattgaaagcaggataagttatattgtatgtcctgaagaggatcaaattaaggaagaagatagaaaaattgcaaatcgccatgaactggataaaataaggatgatttatgttccagcagttagagatccatcgaaacagcttagaaatgtgtctggtactatgatgtatcaaattatgaagagcattaattggaaagatgataccaaagaatctgttgataaaaaaatagaagaattgaatgaagaatttgagaaagaaacaggaatttccattttaaaagattcaattcgtactcaatggaagaattacgattcggattataggtattcaaatgctgatatgagatttaataatgttgatatggattccatgcttaaaggatcagaagttgttttttcacctacagttacaggaagaaaatattgtattgatgaaatgggtgatggattacgttctttgttttatatatcattggtcaatagtatgttagaagtagaaagtgtaattcgtaaggaaatgaatttgaagagcgaaaaacgttcttttaatattacacctcctgtactcacgttagttgctgtggaggaaccagaaaatcatattgcaccgcatttaataggaaaattaaaaaataaacttaatgatattgcagaaaaagaagatgcccaaacaattataacgtcacattctccagcaattgtaaagaggatagatcctgaggatattagatatcttagaatgtatcctgatgatttatcaactaaggtgaaaataatacattttcccttagaagaaaaatatgaggacagatataaatacataaaagaagcagtacaagcttatcctgaaatttatttcgcaagattagttgtattaggagaaggagatagtgaagagatagtgataccaaaactattggaattaagtaatggaaatgttgacagtagtggaatatcaattgttccattagggggacgttttgttaatcatttttggagactactcaaagatttggatataccgtttgttactttacttgatttagatcaagaaagatatggtggtgcctggggaagaattaagtatgtacttcagcaattaattgaagttggcgaaaatagaaagaaattattaaaatgtaaagatggtattttatcaaaagatgattttgaaggtatgattaattggacagttgaaaaagatgataagtgtatgttaagttggattgaacttttggagaattatgatgtatttttctcagctccattagatatagactttatgatgcttgaatgttttggtgatacttataaatctatattagaaaataatgagggaccttatataaagggtaaagaggatggaaaagggaaaattagttatattgaagaaaatgaaattgatagtgctgagtataaagaaagagtagaacatgatgtacattgtaccctaaaggaaaatggtggtgatggacaatcttattctaaaaaacaaaaaatgcttatggtatggtacaattattttttcttgaatagagggaaaccaagtacacattatttagccttatcaaaaatagatgataaagaactaatggataatgctccagatgtcttaaaacgcatgataaaaagaatagaagaaaaattaaatcctaccatatag

SEQ ID NO: 71935 - DNA, 1872 bp, Clostridium ljungdahlii DSM 13528
atggagaaaataatttctgaggataagtggtttccagctgatggtatagtattagaagaaaatgccttaagtgcaataaaagaaaaaaataatgtattagttgtggcaggcccaggtgctggaaaaacagaattactagcccagaaggcttgctatcttcttcaaacaaataaatgcaataatccaaggagaattcttgcaataagctttaaaaaagatgcagcagaaaatttaaaagagagagtagaaaaacgttgtggaaaagagcaggcggaaagatttgattctatgacgtatgatgcttttgcaaaacaattacttgatcatttctatagaggattaccgaaagaatatagaccatgtaaaaattatgctgtgaatgatgataaaagtattgagttttcatttaaaaaatctggttttgtaaataatagtggcaagaatatttctaaattcaagaaatatttttatgatcagctttcgagtgtgacattgccattagaaaaaagtaagtctacaaatataacggaaagagcatggaaattattattaaatggtaatggagtagatgttaaatcctgtcttacatttcaaatgatttctaggttagcagaatatatgataagaacaaataagtatataaaaaatgctttaaggtgtacttattcttatgtgtttttagatgagtttcaagatactactgagatacaatattgtttggtgaaaacttgttttatgaattcaaactgcaatatgactgctgttggtgacaataaacagagaataatgttatgggctggagctttaaaaaatatatttaatgatttttgttctgatttttctgcagtagaaaaattattgttaatgaaccatagatcagcacctaaacttgttcaattgcaaaaaatgatgtatgaatcattaagggatgatactaaagaaataatttgctctgaaaaatggaataagaatgatggtgaaatatatctttatgagtttaatgattatcacgatgaagcaaaagtagtagcaatgagtattgaaaaaaaatataagtcgggtttcatgttaaatgatacttgtattttaacaaaacaaaaaccagaaaaatatactaaagatttgatagaagaattaaaaaaaagaggaattagagcaaggatagaaaatgattatcaagatttaattaaagagcctgtaacaaaacttattattaatgtactaagtttaatttttgataataaaagaccagatagttggaaatatcttgtagattacttaagtattgcttataaagagcaaatagatagtgactatgatttcttaattgagaaagagagtaaattgagccatattttgaaaggttatcgggaagatttaagtagttgtgatgatataaagttatttgaagatgttgtaaatggcattttaaacttttgtgatataggtacattaaaatcaatttatcctcaatatatgcaagaagactgctttaaatatacagttgagaaactaataacgttattgtggaatgaatatgaagaagtaggtaaaaattggagtaaaactttggagagctttaaaggattgcattctgtaccgataatgactattcataagagtaaaggtttagaatatgattcggtatattttataggattagaagatagtgcattttggaatttcaaaaagcagccaatggaggataggtgtgcattttttgtggctttatcaagagctaaaagttatatttgctttacttttagcaaaaatagaaatgttggttttaataatgtacaaaggcatagaaatattaatgaattttatgatttgttagaaaactcaaaaatcgcaaaagtagtaaggaagtaa

SEQ ID NO: 71936 - DNA, 2079 bp, Chryseobacterium gleum ATCC 35910
atgtacatatctcagattaaaattaccaatttcaggaattttgaaaatactacagtcgattttaatgacggcatcaatgtagtaataggtcataacaatgccggaaaatcaaatttggtttccgctctttccttagttatggataattcaaagtcaaaacgtcttaatattgacgacttttacaaacttattccgaccgcacatttattgacttctcctccaaaagtaagcattgaaataacaatcaaaaaaggatcttatgaaacggaggatgacttagtaaccgtttcaacttggctaaccagattagaggaagattacgaagcaaaattaacatatgaattctttcttcccgaaaagcatgtcgagaattaccaaaccttagttagggaaattcctgagaatgaaaaccaaaataaaaatatttggaatacgattaagcatgatttcctaagactttatgtagtaaagatttggggaggaaatgttgtcaatcaatccacagcagacgtagactcattacaaaaatttgattttcaatttttagatgctataagggacgtcgagagagatatgctgacggggcgaaatactttgctgcgagatgtttttgattttttcatggattatgatatcaaaatccatccaacaaaaacagcacctgagaaacatatggatattaaagaaagaaaaattgagttttctgaaaaagctgaagaattagtaggtttgttacacaggagaattgcatcaggaaaggaagaaatattatcttatgcaaaagatacgggagcgtcatttaacaatgctgttccagattttgaaggagtaatatcagagacagagttgtatagtgttctaaagttaattgtagaatatgagacaggaataaaaattcctgcaacacgcaatggtcttggttacaacaatttaatttacatgtctcttcttttagcaaaaatgcaggtcaataatgacgttaattatttggatagcaatgcaaaaatattttcaatgctggctatcgaagagccagaagctcatctacatccggcaatgcaattcaagtttttaaaatttctcgatgaaaataaaactaaaagaaaagtaagacaaatctttgtcacaacacattcaacacatataacatccgccgttgggctagatgaaattatttgcctgcacaataatgaaggagaaactattgtggcatatcccggaaaaacatttgttaatgcggaaggtcaacctttagatcatagcaagaagtatgttgagagatttttggatgcaagtaagtcagatatgctttttagtcaaaaggtactatttgttgaaggacttgccgaacaaatccttgcgacggtattcgcaggttacgaagataaatctttagaagaccatcatgtaagtgtcattaatgttggaggaagatattttaaacattttctttatttattcgattctgaaaaagatttctcaatatcaaaacctgtcgtatgtatgactgacaaggatcctgaaagaaaaaacagaacagtagaaagatcaaattttcagaagtgttatccatttgaatataatagtgaagctgaaaccttcgattaccagcaaaattcttttagcaacgaatatcagcgggagactcacccgaacattacagtatattctcaagattcggagttaggaaaaacattggaatatgaaatagcattttcaaatccatcattaaaactaattctaacggattctatgaaaaatagaaatgagctagaacgtctaatggatttgtacgatcacgaagattcaacacttgaaaatttctttgaaatcctacgtgaaagtgatgagaatgagagaataatttccggcattactctcaacacctcgcttgatttagatggtaagaaaagatcgataattgcagcaagatatcttaattccattggtaaaggcgaaaatgctttagaattggcagttgtgctaaaggataatttattaaaaaaaggtactgaagaatatgtagagttcaatgttcctcaatatattaaagatgcaatagaaaagttatgccagtag

SEQ ID NO: 71937 - DNA, 1686 bp, Chryseobacterium gleum ATCC 35910
atgccagtagaaatatcatcagattccttaatagagattaataaacattttaaagttaaggctggacctggtgctggtaaaacgcactggctggttgagcacattaaaaatgttacaagaaattccacactaatttccggcgcaaagaagattctttgcattacatataccaatattgcagctgaaacagttttaacaaggcttggaagctcggcaactcaggttgaagtattgacaattcacagtttcttttattcccatataattaaaccttatctatcattcattgctgaagaatatgattttgatgtcagctcgctagatggtcatacagatattatagtttctgattactcatttttgcaggagtggaaggcattaaccggtcaaaaaagaattaccgatgataatttaattacttacgcctttgaaagactcagatggttactagtagacgatgaattgattgtcagaacagattatcctttcagatttgggggttatcctattaaaaacagctcatattttgattacaaaaaaatgacttggcaaaggggtatacttcatcatgatgatgtattgttttttgcctatcagattatcaaaaagtttccttttgttattaaaataatcaataagaagttcccttacgtatttattgatgaatttcaggatagcaaccctatacaggtaaacataatcgaaaagttatcaactggttctacaattggaatcatcggtgatgtagcgcaatccatatatgcatttcaaggtgcaacacctgcacttttcgatgggtttacattacctgaaatggagcattattttttaaaatttaatcgcagaagcactaatgaaatcattgatttcctaaatattatcaggcaagatcttcctcaagattatcatagaacggtttctatatcaaaaccagtactttacgtgggtgatatggtcgaagctctgagaagagctaaaacctcttgtcctgatgggtatgtatatacattatctagaaataatatcacttccaatgctatgaaatcagaaataaacggctctggaatggacgataagcttttacggaaaatcaagttagaagactcgactaaaaaaagggctgatctaataacagcgtgtattactgctgttgctctcgggcaacaatctaaatttaaagaagccataaaagttttagaaaacgtaataaattatagacgtaataggttagaaggaaaaaagaaagctttacattacttaacgatcttaatggcaaaattcaatgactataaagatctttctatgcttgaattctcagaatttatcagactgaatattaacgatagtattccaaaagcaacaaaaggaaaaggaaagattttttatgaaaacaacacattccaaagcgtctacttgtgtgtaaatatatctgaagatttaagctatcacagaacagtccataaggcaaaaggagatgaatttgataacgttctattaattttaaaagaagaaaaagatttaaaatttatgtatgaaccagatttatacaattatacgcaggaagaacatagaatttattatgttggagcaagtcgtgctaaagatcaactttttatttcagttccaacacttgatgttaatgttgaagacatcataaaagatatggtaaatattcaaagattttaa

SEQ ID NO: 71938 - DNA, 2112 bp, Chryseobacterium gleum ATCC 35910
atgtatatttctggattatccattagaaatttccgtaattttaaatcagcacattttaaatttactgaaggaataaatacaataataggagaaaatgggtcaggcaaaaccaatctcttttatgcacttcgaatacttattgatgattcattgccaagatatattaattttaattcaaacgatttcaaccggggaattggcaattgggcgggacattggatcgttataacggttttttttgaaggattagatgcaagtgaagaagcacaagctttggctgtacaatcaagcggatgtatggatactccttctaaaggtagttattcggtatatttccgacctaaatatcaatttagaaaagagttgtatgactattcgattttagctgaaaaagattcagaaggactagagctactcttagataaaattacaatagccgattatgaagtagtttatttaagtcgtggttctggtgattttagtgatgatgtaacctacgaaaaatacgttggaaattttgataaaattgagttcccagatcctgacgaaaaagaagaactagtcataggaacttacttaccacgtgaaatcagtatccataatgaagtctcatgtacatttataaaggctctaagggatgttgaagctgatttacgttcttatagtaataacccactaattaatttattgaaagggaaagaaaaaacagttgaaattactaagcaggacgaaattataactagtatcgacaatcttaatgaaaaaattagttcacttgatgagataatagaaattaagaatggcattgataaaagtataaagaatgctgtagggacaacatatgctccaagcattgatattaaatcagagcttccaaataaaatggaaaaacttttccaatcattaaagctgtgggtgggtgatcctgaagatgattataaaggtagggtttgggaacttagtttaggtggagctaatttaatatatttgtcattaaagctattagaatatgaaagggtcaagacagatcgaatagcgaattttctactgattgaagagccggaagcacatattcatactcatatacaaaaaactctttttaataacttaagcaaaagtaatactcaaataataatttctactcattccactcatatatcctcagcaagtaaaataagtagtgtaaatgttatttgtagaggaaaaaatgaagctttggtttttcaaccttctaataatttgttacctaatcaaataagaagattagaacgatatctagacgcggttcgtagtaatctattatttgcaaaaggagttatacttgtagaaggtgatgctgaacaaatattaataccagcaatgtttgaagttgtttttggtctttctttagatgagattggagtaagtctcattaatattggcagtacaggttttgaaaatgtagcaaatatttttcatgaagaacgtataaagaaatattgtgcaatattaacagatcaagacatttctgttgtaaaacttcccgattctccagaaaatgatacgccaaatcagaaacatttcagagcatcacaaaaaagtggagaagaacgtagagtaataattacagagctttgtaaagataatgagtatctggaagcattttacgcaactcatacttttgaagtagacttactcatgaatgaaaacagtccggaatttgtatcagcacttgataagatctatcgtaaagaatcaaatataaagttgataactaaaagattagaaaatcctaatattcaagttgcaggattggaagttttaagattagctaaaaagtatggtaaaggctggttcgcattacttatcaccgacgagcttttatataatacatatattccaaattatattttaaaagccattgccttcgcatcgccacatatcaatttgtcttcgaaagttaaatcaattatgtatcgtattgaaaagataaaaaatgacaaatattgtaaaacatactataatgcagctaaaaagtttgaaactaaagataaaacagatttagaaattttagaggcttttataaaaacatttcctcaagatcaactaaccaaatttctttcttacttatga

SEQ ID NO: 71939 - DNA, 1776 bp, Chryseobacterium gleum ATCC 35910
atgatatttgacaaattaaatgatgagcagagagttgcagttacgcaaagtggtaatgttttacttacggcttgcccaggaagtggtaagacaagagtgatcattcataaattggcttatgaattggatcagcttgcaaatacaagtaagaaaaaaattgctgcagtaacatttactgttagggcttctgaagaaatttttaagcggctcaatgctatggggattaatagtgataagatatggtcaggtactcttcattctttttgtttagaatggattttaaggccttattcttgttatcttcctgagttgcaaaacggattttcaatggcagacgaatcttattgtgatgaactaataagcagtttaaaagtcaaatataaattgaagccaatagatcctgtaaatatgcgatttgatagaaatggtaatttcttagaaacaaaaataatccagaaaaggcttttagaagattatcactcaattttaaaaagaaaaaaattaatagactttgaattgattttattttactcttataaaatccttcaggatctgccaagaatcccacagatattatctaaattattcaaaattatttgtattgatgaatatcaggacactcaagatttactatacgctatcatctcaacaattgttagagccggaaatggtgaaacatctgctttctttgtaggagatactgatcaggctatttactcttcgttaggaggggtagcaaaaaatatcgaacaaataaaagaagagttaaatgaccttccaatagaacctttaaccttaaaaggaaattacagatctagtcaacgaataattgatttctacaggcagtttcaaacgcagtctatagatataaaagcggtgggaattaatgcaaaaacaaaaggtctaataactcttaataatactattgataaggcaggaattgttgaagagatatccaaattaattctgttaagtttggacaagggaatacctgaggacgagatctgtgtattggtacctcaatggtggttaatcacctcaatttcgaaaaaacttagggcagtactaccgaatgtcaattttgatgcctcggggctagctccaatggcacggaatcgggaaaatatttggtttaaactctcaagattatttttaactcagcctagcccgaaactatattctttaagatatagatgggcagcagaactaatagataatttcagaattcatacttttagtgatttaactgaggaatatagaaatgaaagaagttttttaagactcataaactcaattaaatcaaatgaaattgaagggatcgattacctaaaagattgttttgatcaatttctcaacatagtagggattgactataaaaaaaatccaacattggttgaaagttgggaacttttctttaccaatataaaaaaaagattaaatgatcccgagtatgtaatccctagtgatattcagtccttcaaaagtttttacagagaaatgacaggtgtggtaataaatacatgcgtgggaattaaaggcgaagaatttgaaacagttattgcctacggtttactgaacggttacattccgcattggaacgagattttttcgggaaatgcaaacgaggcttcaaaaaaattattatatgttatttgttccagagcaaagacaaacttgcatttgatcagtgagacagggcgaacaaccaagcgaggagatgccttgactataacctcagaattagaagctgtaaattttaagtatgacaatgtttag

SEQ ID NO: 71940 - DNA, 2064 bp, Clostridium saccharolyticum WM1
atgaagctggctaaacttaaattatacaattatcgttcatttggagaatctgagcagattattaactttgatgaattaactgcattgatagggaataatagttcaggaaaaactgctgcacttaatgcattaaataccattttttcagaaaattctagtgatcgtattttggagcgaggtgattttttccttcccaaagataaggcacccgaagatcttgaagaacaaagtttatatgtggaagcagtctttcattttaacgagctccaaaaagaaaaagaatctactacatatgcaataccaactttttttgatagttttgttgtagaatccccaggaagtgtaccctatttacgtattcgcttggaggcaacttgggaaaaaagtagtaatattgaaggatctattgagagtaaggtttattatattacttgtcctgaatcagaagaaataggagaggaaaataaaaggattgcaagtagacatgatataaatagaattcgtatgatttatgtaccagcagttcgtgacccttctaagcagttgaaaaatgcatcaggaagtatgatgtatcaaataatgaatagcattaattggaaagactctaccaaagaaagtgttaaaggattaattcaagatttaaatgatgaatttttaaaagaaagtggagtctctatacttaaaaatgctgttcacgacgaatgggaagaataccattcggacagtagatattcaaatgcgcaacttagatttaattctaccaatatagaatctgcaattaaaaaggcagaagttcttttttctccaactgttacagaacgagaattttctattgatgaaatgggtgatggattgaggtcgttattttatatttccatggttgatagtatgttagatgttgaaaataaaataagagaagaaatagaaaagggtaaagagctatcttttagtagaacaccaccaatattaactattgttgcggttgaagaaccggaaaatcatattgcgccacatcttttaggaaaacttattggaaagttgagagatatttctaaaaaatgtaatgctcaaacacttctaacatctcattctcctgcaattgttaaaagaatttcacctgaagaattacgatattttagattgataccagacatgttgtcaacagaaatacgccatataaccttacctgacaaagaaaagctttcagatcaatataaatatgtaaaggaagcagtaaaggcataccctgaactttactttgcaaaattagttatacttggagagggtgatagtgaagaaattctgcttccaaagtttttagaaacaaatggagatggtgttgatagttccggtatttctattattcccttaggtggaagacatgtaaatcatttttggcgtctgcttaatgacttgaagataccacatataacattactcgatttggatagagaacgagatggaggtggatggggacgtataaaatatgtattaaagcaattgattgaaaatggatataacaagaaagaaattttaaaagtagaaggtggagttttaacaaataaagaattagataaaatgaatgattgggatgttaacctcattgaagatatgaattcatggattgaatttttagaaagttacaatattttcttttcatctcctcttgatattgattttctcatgcttgaaaattttgaggaagaatacaaagctattctttcgaaaaaagaaggtcctcgtattagcaagaaagatgaagaggacgaaaatacaactataagaattcaagatatagaaaacgaactatcaatctctcctgaatatcaagaaagaataacatgcgatgttcaaaatacgcttaaagaatgtggtggtaagggaataacgtattcagataaacaaaaaagattaatggtttggtacaattatttctttttaaatcgcggtaaacctagtacacatatttctgcactttcacaacttgatgattccgatttagcttggaatattccaagtgtaattagtaggttgatagatacagcaaagaagctcttaatttaa

SEQ ID NO: 71941 - DNA, 1860 bp, Clostridium saccharolyticum WM1
atgcaggaaagaatcccacctttacaatggacaccgagtggtggaataatattggaagaaaatgcaacaacatctgtaaaagctgaaaaaaatgtactggtcgttgcagggccaggtgctggaaaaaccgaattactcgcacaaaaaacaggatatttatttcaaacaaatatctgtacatatcccaaaaaaatacttgctatcagttttaaaactgacgctgctgcaaacttaaaagagagaatagaaagtagatatggaaaagaatatgctatcagattttcttctctcacttacgatgcgtttgcaaaaaagattctggatcaatttagaaatgctttaccagaagaactttgtcctagcaaggattatattataggagacaagaaaactattgatgcagcattcaagaaatctggttatttgaatcctagaggtttaacacctagtagattggcagtgtattatgaaaatgtgattgcaacaactcctttacccgtatgcggagattctattggtagtaatgtatggagattactaattagaggttttgatgataatccttcgtgcttaacttttaaaatgataagtatgttgacaatatatattttttcaacgaatccatatgtattaagaggtttacaagcgacatattcccatgtatttttagatgaatttcaggatacaaccagcttgcaatatgatttggttaaaatgggttttcaaaattctaattctaagatcactgctgtgggggataataaacagcgaatcatggtgtgggcaggtgcgaggaaaactatctttgaagattttcagcaggatttcaacgctatgaagattccactattgatgaatcatagatctgcgccacgactagttgatttacagaaattaatgtacacctctttacaggtggatcttattgatttacaaacttcaaaaaaatgggagaagaatgatggggatataaaactgtatatatcagaaaatgaagatctggaagcaaaatatctggttgcagatataaccgagaaaatatctaatggagtttcattaaaagatatttgtattttagttaaacaattaccgggaaactacatagatactcttgtaacagtactttcttcttttggtattaaggcaagaatagaaacggagtatcaagacatattaaaggaatttattgttgtactcgttttgaatacattaaaagtttcaatcaatcgacgctcacctacagaatgggaatatgttaataacgcaatggaaggactgaaaggatttgattcaaccgaaagatctgacgcatatgatcaggagcatattaatttaataaaccttctgaatgcgacatctgagaaattagctttagatattacggaaaccgaatttcacgaagtaataaataacattattcaattctttgatattgagaaaataaaagcgttatatccaacatatgcacaaggaaatttctttgaagatattgttaataaaatgattgatctattatggaaagaatttgaagaatgtaataattggaatctatcctttgaaaattttcaaggattatattctataccaattatgactatacataaaagtaaggggcttgagtatacagctgtttactttgtagggcttgaagatggtgctttttggagttttagaaatcaacctgaagaagataggtgtgctttttttgtcgctctttcgagggcaaaagaatttttgtctttttcattttgtgcatatcgtcacaagttaaggaatccaaatcaaaaacatacagaaataaacgaattttttgaactattaaagttgccaggtatctctactgttattaactgtgattaa

SEQ ID NO: 71942 - DNA, 1701 bp, Butyrivibrio proteoclasticus B316
atgcaactgacatatgtagaaattcaaaactatagaaatttagggaatcttgaactatcgattaatagggacattagttttattgttggagaaaacaatattggaaaatctaattttcagaaatgcttgtcaaatattttcctttgtaagcagttctctaaggatgatttttttgatgagacattgccaatcaaggtgaagtttcgcttatttttaaattatgaggaaattggattatttgatgatttaactgatccagatgatgaatcaagtatagaaattattgcagagcaatcaactccggatgactacattcagtatgttcattctcaaacgggagaggcagtaaaaaattctttgattaaacgaatgaatgttattacatatgattctttgcgtaatcctaaaaatgagatagatttctcgaagacaaagggagcaggtgcatttttaaactatttggtttcaaactatgtttgcaagaatccggaggttggtttttataaaaaaaatgaattaaaaaaggttcagaaaagtgtttcggatgcacttagtggaatcagcgcatttgatagatttaatattcagcctagtgttgaggagaataatgtggaactgctatccaagattgtctctttgaaagatggtaatggtgtaaatgtacaatctgatggatatggcgtgcaatataacttgcttataatattagcgttgcttgaaaagataatggatttttgcaaatcgaaaagtgatgatgaaacatcgttttcttcgctcataatcctcgatgaaccagaaattcatttgcatccctatttacagagaacattgattgcagatattcaacgcctttctaaagggcaggatgaaaaatttaatgcattgttgagaaaacaatttggcataacggagataaaggcacagattataataacgacgcattcgcctaatattttgtttgatgactaccataagattatacgtatgtataaacatgatggaaagacaacggcggtttcgtgctctaatctgacgctttcagaaagtgaagaaaagcagctgtatgcacagttcatgtatataaaagaggctgttttttcaaaggcagcgataattgttgaaggagaatctgagtattcctcttttggattatttgccaaaaaaatgggagtcgattttgacagagagggaatagctttaataaaagcgggcggagcagaatcaattaaaccgataatggcaatgcttgataagctaggaatctcttctgtaggggtcattgataaagataaaaaaattgaaaagaatcttccgactcaggaaaatctgttttatacaacaaccatgtgttttgacagtgaaatcgtaaaatatttgattaaaagcaggaaaaggactgctctagaaaaaataataacggatacaaatctaaatggattaactaagaagtttcagaagaaaaatcttcagaaaaaggcagataaatttaaattcaaaggacttgttattgatagagatattgcgataaatgagtgtacggaatacacaaaaatgtatgaattgttatgtgtgacattctttgcgaatgagaagggaatattgtttggcagaacaatagctgagaatattgataaggctgatattccaccatgctataaaagagcagttaagaaggtgagcgagtatgctagagctaattaa

SEQ ID NO: 71943 - DNA, 1812 bp, Butyrivibrio proteoclasticus B316
atgctagagctaattaaaaaaaagatttctgagacacatggaagtgatgaaaagcagcttgatattattttttctgatgcggacagaataattgttgaggctcctgcgggatgtggaaaaactacaacacttgtcagcaaaatagcatatatgattgctactaaatcatttcctcaaaacaaaaaggttttggcgcttacattcagcgtaaatgcagcttataaaatgaaaaaagatctggctgataaacttccggagatgggattattagatattcgcgaaccggcagatttaaaccgaagaatgtttatttcgaattatcatggtttgtgtagacgaattttatcgttatacggttatctaataaatcctgctttaaaggaaataaatatgtttaaggcaattggagaatcggatgctaaatttgatgaatttttatccggagaagagattgatttatctgaagctcaattggaaatcgtaaaaaaatttggacaggctgtttctgaatgtgatgaagaaacgttaaaaaacagtttaaatcagtataatgaaatattgattttgaagtttattgagaaaaaagtcataacatataatggttatatttcattgacaatgtatttacttgaaaagaacaaagaattactgaatttttatcaaaaactctttcccgttgttgtcatagatgagtttcaggataccaattatttaagctggtgttttgttaaaaatcttataaacgataaaacaaaattatttttcgtgggcgatccgcttcaaagaatatatggctttattggggccgttcctaagttgatggatatggcggcttatgagttgaatatggtgcagatgaagttggagaagaattataggtttaaagataatttgagcatgttgagtttagacaaaaatattagatctaatgctttgaattgtaaggctccaataatttataatgattcaattgtaaatcttcatatatcagattcgcacgaaaaagaatgtgaatggatagcagataatgtagcaagtttattaaaaaatgacagtgatcagaaaacgtctatattagttcaacaacgcggagcaggtatagacatgataatggaggaatttgatcaacgcaatatatcgtatttctatgcactttttacagatgacgatgaaacttatgtgtcgtatcattttgatgcacttgaagtttttcgaaaacaaattgatagaagtcgttaccatagggtgtcaaagagtgtattagatagaactttatcagagataggttcctactatattggtagttcatctaaagtgattgcatcattgatagatctgacacaggctttttttgaaaaaatcataggagagtatgcgtttttaagcgatgatgaaaaatatacatttatttgtgatacttttgaaaaccgcgcattaaaacagaacatggatgcaattgacgctagagtatttgtgtctactgttcatggagctaaggggcttgaatgggaaaatgtaattattccagatatggaaccttattgctttccaaactattattcgctgtgcggaaattgtgattttaatactggaaggttttcttcgggaaattattgcaaaatcaatataaacaatcatgatatagatgagttcctagaggagctaagcgttttttatgttgcggttactagagctcgaaagaatctactcttttctgcttcaaagagtagatataataatgatggtgcaagaaaaagctcaaaagtcagttgcttattgacacttcctgggataaaaccgcaattggtttga

SEQ ID NO: 71944 - DNA, 1158 bp, Desulfovibrio sp. 3_1_syn3
atgaatttatttagcatattatttgagcttgatgctactctcaatcgcattcggcgtaacaagttggaaacaccgtcagacgtaaatatccttttcattgaagagccagaagctcatacacatccccagatgcaatatgtttttattaaaaatataaagcaattaatgtccaaaaaactggtcagagaagacaacattagtgttaatcttcaatgccttataagcactcactcagcacacatagtcacaaattgcgattttgatgatatcaaatatttgaagcgcttaccttcaggattggcagttgaggcgaaaaatattcaagaacttcaggcgctttacgaaaaagaaggtgatgcgggcaaagctgcgtaccgtttccttaaacaatatcttactattaattgtagtgagctattttttacagagaaagctatttttgtcgaaggaggctcagaacgaattttgctgccgtcaatgatgttaaaaatggacaagaagcaccctcaagggctgcccttgttgtcacaaaatatttctatcgttgatggtgcaggatcgcactcaaagatatttgccaagttcattgaattcatcgggctaaaatcattagtaatcactgacattgacacatattatgacgaaccaggcgacgacggcaaacccgatcatatttcatgcccctcttctgcctcaaatgcgctttacacctggaatgactcgctaagatttttccattgccgcgacaaaaataatgactgcaaatatttttgcggattagatagtacaggaaaaacggttgggtataatcccaagaccgggacatggcagccaatggcgggcgggaatatttttacggcgtatcaatatggggccaacggcgcgtatggtggatgctccttcgaagacacttttattgaggaaaataagcaggttattgctgagcatggtgactgttttgaatccttacgcccaaaatggtttactgactttaagcagacagcagattctttcactttggcccagaaaggtatcaagaaaaaatccgcctttgcgcttgatatcctcctccatgacccagaggttctcaccgcctctgatgataaccccaagaatgtctggtcagttccacactacattgaggaggggctggaatag

SEQ ID NO: 71945 - DNA, 1872 bp, Desulfovibrio sp. 3_1_syn3
ttgcttagtgggggtgctgggagtggtaaaacatatgctttggtaaaagtattggaaaaagttattgaggaaaacccgcatataggaattgcgtgtataacatacacgaatactgccgttgaccagattacggcgcggatatctcacgataacttgagagtttcgactatccacgattttttatgggataacatgcagcaattccaaaacgaattgcagtcaactctcttagagcggattagggatgatgaagataaaaattttgtccttcctgatgatgttgttgtcacagacaacctgttttcaccacttaaatatggaatacagtataaagaagtattgcggttgcaagaggggataatttctcacgatgaagtaattttattagcaaatttaatgtttgaaaaatattcaaagctttgtgatataattaaagataaatatcgttttatatttgttgatgaatatcaagatacgcaaattgaagttattaacattcttctgcgccacgcttcccaaagtaaaaagaaaaacattattggattttttggcgattctatgcaggctatttacgataaaagagtaggtgatcttaacgactatttaagtgctggcacggtgcatgaagtcaagcttgaacagaatcggcgaaacccacaggctgtgattgaattggcgaataagttgagaactgacaatattattcagcatccttctgaccaaattgatgcgcccaatatggatactaaaactggggccgtgaagccaggaacggctacgtttttgtactcaagctcttcaagcttagatttagtacgtaattttctgagatgggatttttccgatgccctcaaaacaaaagaactcaacctgacccataatctgatcgcagataaagcaaactttccaactttgatggaaatatacgacaaagataaaattctcgattatcgtaagagggttaaagattttttgcgtgataatggcattgagcgcgatatttatgcagggaaaacctttggagaagttttggatgacttgcaaacaaagtttcctaaaaacaaaaagcttctcccaacagcagggatgcaggagtatattaacgagcattcagatctgtttgaggcggcaaaaagctacgattttctagagtttttcaaaatttatattgataaagaccacctaatcgacgacaaaaaacagacgccagaagtagaagcaaaaaaaggctctagccgtgatgccctgatcaagcatttattcaaaattcaaaatattattagtttgtatgaaagtcgaaactttagtcaattcttaaaaataacagactttaagatagcaaaagcttcagacaaaaaggtgttacatgatcatatacaaaaaatattgaacactgaatctgggaaaaccattggagaggtcattgatttagcccatacccttcggctttgtctaaaaggtgatgccttgcgacgctttgttgagaaaaacaggtatatttatgatagagtatcacaagttccttatgcagaatttctaagtctgtatcgctaccttgaagggcaaacaccattttccactcagcacaaaacaaagggtgatgagttcgacaacgtcttggttgttatggataatggcaaatggtctcagtataattttgacaagttatttagcgagcttggcaacccagggagctccccaacgaatgatgctggaattctggagcggacgcggaagatattttatgtctgctgtaccagaagcagggaaaacttagcgatttttttcaattcgccctcacagagcgtcttagctggggcgcaaaagctatttatgagcgataggatttttaatcttgacgctgctcagtag

SEQ ID NO: 71946 - DNA, 2190 bp, Staphylococcus aureus subsp. aureus str. JKD6008; identical to SEQ ID NO: 71904

SEQ ID NO: 71947 - DNA, 1794 bp, Staphylococcus aureus subsp. aureus str. JKD6008; identical to SEQ ID NO: 71697

SEQ ID NO: 71948 - DNA, 2136 bp, Pseudomonas amygdali pv. aesculi str. 0893_23
gtgcatatttcaaggttacaactcgtcaactaccggaatttcaagtgtgcgaatgtcgtattcaacaagggcgtaaacacgatcatcggcgagaacggatcaggcaagaccaacctgttccgggcgttgcgcctcttgctcgacgacacgctgctgcgcgcggcatataggctcgacgagaaggacttccaccggggccttggcgactggcgcggtcactgggtagtcattagcctcgagttcgatgaggtatcccaagacgaagcgattcaatccctctttctccatgggaccggcaacatcgccgacggcgcgatcggcaaggcgacctacaaccttatttttcgccccaaggcggcagctcggcggaccctggccgaccttgccgccggtgacaccgtaggactcgccgaggcacgttcgaagatcaccatttcggattatgaaacgatcttcaccggcaagagcaccgcaaacttcctcgatcccgaaacctacaggcaactggttggcgacttcgatgcggtaatatttccccaagaactgacgaaccccgctatcgggggcgtcatcccgggcatgctatcgatctcgcgcgaagtgtgcttcaccttcgtgcaagcactccgcgatgtggtcgccgacttccagaacaaccgcaccaaccccctcctaactctgctcaagtgtagaagcggtgagatcgatccgcagagcttcgagccgatcaccgcgctagtcaaagggctcaacgatgcaatcgagggcctaccagatgtaggaaccatccgcaccgatatccgcgacaccatcaccgatgcggcaggcgagacctactctccgcgatcactttcgatccgctcggatctgtccgacgaggccgaccgcctattccagtcgctcaagctgtttgtgggcgagagcgaggaagaatatgagggcgcgattcacgagttgagcctgggcggtgcaaacctcatctacctgacattgaagctgctcgagttcaaatatcagaagcagaaaaagtccttcgccaatttcctcgtgatcgaagagccggaggcgcacatccacacccatatccagaaaacactgttcgaccggctgaactttgatgacacccagataatctattcgacccattcgacccacatatccgaagtgaacaacgtcgtaaacatcaacatcctcggccggcaggacggacgatgcgaggtgtttcagccatctgcgggacttgacgccggccagattggcaatatccagcgctacctcgatgcggtccgcagcaatctgctcttcgccaagagcgtggtcctggtcgagggcgacgccgaggagatcctcatcccaatcctcgttaaaaaagtgttagggctcagcctggacgagctggggattagcttgatcaacatccgcagcaccggcttcgagaacgttgcggtgcttttccacaacgagcgcatccgcaagcgctgcgcgatcatcaccgaccttgaccgcgcatttatcgatacgaccacggacatactagacagtgacgataaggcggccgcgaagaagaaagcactggggtcacagatcgctggactccagcgcgaggcagcgctcaaggagttgtgtgcccggaatacctggctgacggcgcacttcgccgaccacactttcgaggtcgatttcgtctccgtcggcaatgtcggcactgtcgtttcggtgctgggcgacgtctataaggatggcggcaccatcgcgacgtctaagatggagctggaatcgggcgacatcgcacgtttcgggacgcgcgtgctgacgatggcacgttacgccggaaaagggtggttcgccatcatcctagggcgaatgatcacgccagaaacttccattccggattacatcctcgacgccatcttccaagcgcatatcccggtatccatccagacatgggcgcgtgtgctggactatcgggtctcgatccttgcggcgtcgcaactacacgcgccaggagacatcgacgcgatgcgagcgcaaatcagacgctaccatcgcggcgagatcgactttgcaggtgtccgcgccgaaatgctacaggcctttccggcagacggcatcaacaccattctggcgggcttctag

SEQ ID NO: 71949 - DNA, 1800 bp, Pseudomonas amygdali pv. aesculi str. 0893_23
atgtttgtctgggacaggaaggatctgaacgacgcccaagtcgcagccatcgagcatccaggcagcgtcttcctcgttgcctgcccggggagcggtaaaacgaggaccctgacctacaagatcgcccgcctgttgtcggagcttaagtcggacaaaaaacgcgtcgtcgcgatcacctacacgcaccgggctgcggatgagattcacgaacggatcgagcagcttggcgtcgatacgagccagctttggattggcacgatccactccttctgtctcgaatggatcttaaagccctacggaatttatcactcggagctcaagcacggtttccgggtgatcaacgcccatgacaccgaacgaatgcacgaggagctctgcagcgcggtgcagggcactaagctcagcagcttcgactgcgcatattatttcacgccgaacggctatgtcctgacatgcaacaagaccaacaagcatgaagcaattgggggagtattgcaggcatattggaaggagcttcgtgccgagcggcaggtcgattttgaactgatccttttctacgcctaccaacttatcgagaattatccgtcgatcagcatgctgctgggttccatctttgaatgcgtgctcctggatgagtttcaggacacgcgggaaatccaatatgcgatcctcgcatcgatcctgaaagcgtctaaagacggtacgtccgccttcgtcgtaggcgatcctaatcaggcaatctatggctcgcttggcggctatgcgatcacggcggcggactttgggacgcagtgcggcatagccttcaaggaaatggagctatcagacaattaccggtcgtcatcgcgcattgtgagctatttcggcaattacaacgtcttgccttcgaagatcgagtcggtgggaaaggacaaggactacgcgagcgtggtgtcgttcgatcaccagacgcaccgcgatgcgctggaggaagagcttgtaaggctcatcaaattcaacgtcgaaacgctcgggatcgctcagcatgaagtctgcatcgttgcgccttggtgggtccatctcgcaagcatgacacgccggctggtcgcggcgcttccggcctattcattcgatggcccgggcatggtgcccttcgcgcgcgacgtcgacaatttctggtacaagctcgctcggattattctgacggaggcgtccccacagctctatgtacgccggatgcgatgggcgggagaggtaatcgccgacctcagcgatgcgggcgtcgagtttccaggtttggaccgaaagacactgctgcgcgcctgcaacgccatcaccatcaccgagaccgatggcttggccttcctccggacgttcttcgaccagctatgttccactttcgggatcgatcgccatacctacgcggcgcttcaagagcatcacgacgctttctttgaatgctcgcagaagcgcatcgataagctcatcaaggaaggcgctgaggcgattgctgaattggggatgttcaggaaggtctttgcggaccggactggtgtcacagtatcgacgatccacggggtcaagggcgccgagtatgacgcagtgatcgcctatggcctactagaagggatggttccccacttcagcgatccgaaccaggccgagacagcgaataagctcatgtatgtggtgtcgtcgcgggccagaaagaacctacatctgatctctgaacgcggtcgcagtcgaggctggagcggagattatcaaccaaccgacgtccttactggatgtgcattccggtacgaccagctttccacctga

SEQ ID NO: 71950 - DNA, 2337 bp, Pseudomonas amygdali pv. aesculi str. 0893_23
atgcatattgagaccgtttgggtgcgtaatttccgtcgtctgaaggacactcgcatcgatctggcgtcagatatttcaatatttgtcggggccaacaacagcggtaaaacatctgcggcgcacgctttgcagctttttacctccgcttcgaaagatcggtttaccctccatgatttcagctcagagtgctgggacgtcatcaacgctttcggagaaggagcggacggagtcgaactgccaaccatctccctcgacatctggttttgcgtcacgccagccgatctgcatcgagttgtagatctgctacctagcctagattggcaaggtagccgggttggtattcgagtggagctcgcagcagcagatgccggccttctgagaagcagtttccaagaagcacgggccagcgcacggcatgctcagttgcagcctgcaggggaaggcgtggcacagggatacgtggagccagccattgcgcaagacgggtacaacccgcgaccgcgtgacctttgtgacttcattgcagacaccgtaggtgacaggctacggcgtgatttcgaattgcggtactacatactcgatagcgccggatttgacactgagtttaaacagcttgatggttacgtgcctctacgcctggttcctgataaggggcgcagtggcaggaatgtgctgggtagcttggtaaaggtcgactgtttacatgcccagcgtcacctgtccgactccaatgctggatctcgatccgaagatctctcccgctgtttgagtcgtttctatgaacggaaccttgagaagcgcggcgaggattatgacgctcagcgcgcactataccagtccgagagtctactgaatgaccacctggaacgtgtcttcggtcccactttggagcgtttggccgatctgggctatcccggggtaaacaatcctcggctgctgatcaagactgcattgaaccctgcgaccattctgagtagccatgaaggggcacgtgtgcactacgcgctcggcgctctcggagcagcagaggtcacggcaaccttgcctgataggtacaacggcctaggtttcaagaacctgatttatatggttattgaactgcttgatgttcacggtcgatggttggacattgaggaaaaccgcccaccgctccacctgatattcatagaagagccggaggcgcatctccatgctcagctgcagcaggttttcattcggaaagtgttagatatcctcgccgtgcccgaggaagacagcccatattgcaccagccagcttgtagtctcgacgcactcgcctcacgtcctttacgagcgaggctttaaacctattcgatattttcggcgagtagcggatgccggcatacagcaatctcaagtgctcagcatggcagctttttatgaggcggctgtagatcctaacgacccaaatgaccgcaccagggattttcttgagcgatatctcaggctaactcactgcgacatgttcttcgctgatgcggccattttggttgaagggaacgtcgagcggctgctgatgccgcaaatgattgctaaagctgcacctcgacttcaatcgaactatttgagcgttttagaggtgggtggcgcgttcggacatcgattcaaaggcctcattgatttcttggggctcacttctctgatcgtgaccgacattgacagtgtttctccgcccgcagcgggcgctttagccgcaaacggcgagttgcctgttgatgaggatccagcggatgcagagcctgacgacaatgagggcgcggaggaggctgaagcgagacgtaaagggcgcaaggcgtgcatggttcatgaagccggggctcttacttcaaaccagacattgatcaaatggctgcctgggcacaccacgattgacgatctgctggctgcgactgccgaacagcgcactcaactccgagacgaagaaggcggcgcccttgtacgcgtcgcttaccagacaccagtagcggtggtgtggggcggagcgactcaggtgaggacaggcaggacgttggaggaagcgtttgcactgcaaaacctaacctggacgcagcacctggaccgcaaggatctcggcctacgtatcaagggttccaataatctggaaatcgcaggtattgcggagcgcctttaccgtaaggtcaaaagctcaagttttcgtaaaactgatttcgctcttgggctgctggctcaagagccatcggcatggacggtgccaaattacatttcgaacggtcttcgttggttggaggatctggtcgccccgccaccgcccgcagtagctgaggcggaggcgcctctcaacgggggtgaggtatga

SEQ ID NO: 71951 - DNA, 1899 bp, Pseudomonas amygdali pv. aesculi str. 0893_23
atgactgcgcgtatcggtcagccggatactcaagcagatatcgaactaaggttgtgcttggaccaacgtcctcaacgcagctttgtcatggttgctggcgcgggttctggaaagacgacgtcgctggtaaaggctcttgcgcacctcggccagacgcgaagactaaagctcaacatgcgggggcatagagtcgcttgcattacctacactgaagtagcggtcaaggagatctggggggacgtaggtaacgatccgctgttccatgtctcgacgattcatagttttctgtggacggtaatcaggccattccaagtgaacttgaaggcttgggtcatcgcaaggatccacgagaaaatcgccgaggcgcagcagcatcacgacaagcctaggactcgggcagcaactcgtgagcggctcgtgaaagatatcgcgcgtcaccagcgtcaccttgaggccgtaaggcatttgactcattttaactacggcgccggaagcgatttcgggcgaggtgtactcgggcacttcgacgttatttcggcggcggtcgagctaatcgagcagagccagttgcttcgtgatgtcatcgccagcaggtatccagtccttttcattgatgaaagccaagacacgcgtccggaagtagtggctgcatttagaaggatcgccgagacgactcctgtggagttctgcctaggattttttggcgatccgatgcaaaaaatctaccttgaaggtgctggagtcattgagacggccgcaggctgggagcaaatcaccaagccagaaaatttcaggtgtccgcagcgagtgctccaggtagtgaatgctatccgggagcccgatgacggtttgtctcaaacacgaggccggatgaactgggtcgacggcaatcctgaacctgttatgggatctgttcaattcttcctactgagagcagatgaccatcgctctatgaagctagctaaagttcgtgaatggatgcggcgtacgaacgatgacgatcattgggtgagtgatgatcctgccgctgacttcagggttttggttgtcgtgcatcggatggcggcagcgaggctcggctttccgaatctttacgctgctttgaatgacaacgatgcaccaccgtccattaaggagggccttaaggacggcaccgcatggccgctgcggccgtttctgaattacttgctacccttggcaacggcggtttcagaaaaccgaaagctcgacgtcatgacttttctgcgttcggaatgtccattactgcagccaacggctctggtcggtagcgatccggtagcggtgcttcgggcattgcaagcatccacaacagagttggccagactcattttttcgagcgatgcattgctgcaggacgtgctcgttcactcccaggcagcaggtctgctacgactggacgaagcgtggacaaaatacttgggcccagaccgcacagcagacgatgaagatcctgagatccccgccgtgtcggctttcctacgttgcggtgtcggtgaattggctggctatcgtcactatctcgaagatctttcaccgtttgcgacccagcagggagtgaagggggcggaattcgaacgcgttttggtgctcatagatgacgaagaaggtagaggacaaaggcagttctcctacgaaaaatacttcggcattgtggagccctcagatactgatctggaaaaccttgcacagggcaaggatagcgtgatggatcgcaccagaaggcttttctacgtgtgttgctcccgagcgactagggatctcgctgtggtcatgttcgtgcaggacatcgaaaccgctcgagaaaaaattgccgaaaccggcatctttgattctgccgacattgtggatgaggagactttggaagccgctctaacttag

SEQ ID NO: 71952 - DNA, 1881 bp, Pseudomonas amygdali pv. mori str. 301020
gtgcatcttgtgcgtgttcgcgtccagaacttcagaggcatcgcctacggtgaggtccatctcaatggacacactgcttttattggtgacaacaacgccggcaagtccacattgctggaagcggtggatctggtacttggcccggagcgcctgagtcgccgtcctgtaattgatgagcacgatttctatgcaggtacgtatgtagatccggacaagaacgaggtcgtcccgatccagatcgaggttgttgtcgctggactctccgatgagcagctgcggcatttccgcgaccatatcgagtggtgggattcacaggccaagacattgcttgtaggggctcccccagagggaacagacgcgccccatgttggcgcagcaatacgcgtctttttcaacggctggtatgacgtagaagaggacgacttcgctggggataccttttacgccactcccgaaatgccggatggctcctacctgcggttctctgcgcccgacaaacgaaagtgcggttttctttatcttcgcaccctacgtaccggcgcccgcgcactcagcctagagcgaggctctttgttggacgtaatccttcgactgaaggagacacgactgacaatgtgggaagacttgctcgaccaactgagggcattgccagttggagagaccgaggatatcggcgagttacttgtcgcagtccaggatgcagtacggcactacgtaccatccgactgggcagagcaaccccacatgcgggtttcggacctcacccgcgacatgctccgtcgaaccctgactgtcttcatgggcactggcgcgaaaaggccggacggctccgtctattccgccccatatcagcaccaaggcactggcacgattaacacgctggtattggctctgctgtctatcatcgccgaactcaagcaaagcgtgatcttcgcgatggaagagccagagatcgcgcttccgccacacacccagaaacgaatcatcaattcgctacgccagaagtcggcacaggccatcttcacttcccactcaccctacgtgctggaggagttcgatcctgtccaggtggtggttctcaagcgcatggccggtgttatgaccggagttcctgcaacatacccaccagcagtcaagccgaaggcttatcgcacagagtttaaagctcggttctgcgaagctctacttgcccgctacgtacttgtgcttgagggccgtacggagttcgacgcattgcctgccgccgcccgccggcttgcagagctggatcccacgcgtttcaaatctctcgaaaaccttggagtggctatcgtcgatgctcgcggcgagaccaatgtcgctcctctgggtgcatttttccggtctctcggcaaaatcgtgttcgcggtgttcgacaagcaatcacatgaggcgctcgcaaccatcaatgcctcggtcgatcatgcctatgagtccgcgactaagggcttcgaaaaccttgtgttgtatggcgtgtctgaggtcgcactccgcagctatgctgctgttgtagttgctggcggcgattggccgcagcatctcgcggcatgtacgccaacgcccgcaacgccgctggccgatctgcaggcggctctgtcgagctatttcagctgggccaagggtggtggcgacgccggcgacttgctcgcctcctgcccaaccgccagtgacatgcctgaatacgtgagaaccacgctggcagcgatcaagaacgtcattgagccacctccgctgcctacgctgcctccactacctccccagctagccggcgtgcccccccccccagaggcggcagccgagtccccgccattggcacccgcctatgggaagttccaaccgtccccgccccagcctctggcatga

SEQ ID NO: 71953 - DNA, 1713 bp, Pseudomonas amygdali pv. mori str. 301020
atgacgaaagtgtggagcgatcagaagcgcgactttctggagtgcgccaggcacgccctggcgctaggtggccctggtgccggcaaaacacacgtcgcgctggtcaaagctcgcaatgagattcgctcaggaatactcaagccaggccagaaggtcctcttcttgagcttcgccagaccgaccgtagcgcgcatcatcgaaacggcttctgagctgatctctcgcgaggatctgaagcaactagaggtcagcacgtaccacggtttcgcatggagcattctccgaagccatgcctatctattgaatggcagaccgaacctgcagcttctgccaccgcccgaagcagcagcgcatttggcagatatcgataaggcccagcacgaaaatgagaagcgacgccttttcgaacaggagggccgcctgcatttcgacttgttcgcaagcttggccagcgaactgctgagccgcagtgatcggttaagcgccatcttctccgacacctatcccatcatcatcctcgacgagtttcaggatacaaacagtgatgaatgggcgctgatccagcagcttggaaagggcagtcgcctcattgcactggccgaccccgaacagcggatctatgagtttcgaggtgctgatccgaggcgggtgggagactttctggagaacttcggcgccgcctatttcgatttcgcgggtgaaaatcatcgaagcagcggtaccgatatcacggcctatgggaatgacctgctcactggcgcaaacaagggcaaggcctaccagcaggtcaaaatcacgcgttacgacttcatgtatggcaagagcctgcacttcaccgccaaggccgcggtgttctcggcgttggatcgcctcaaaaaagtacctgacaaatcgatcgcgattctggtgccatccaggcggctgatgctcgagttttctgactacctttcttctgcagctgatggtctgccagcactaaatcacgacgtcgcaatggatgcagaaccgccggccctagccgctggcgttatcgccacgttactggcggggggtaccgctagcgatgtggcgagccgcatgctcggcgcacttcactcgcacattcgcgggcggcgcgggggcaggcctaccccacagaccgagcttgacctggcgggtgcgcttagcgggttcctctcctcgggaaagatccgcggctccaagcgcctgttgattgtcagcgaagttcagcgcatctcagaattgcggcggcaactgcaattaacgggcgaccctgcggaagactggttacacctgcgcggcctgttggcatcgtccactgcggaagccttgaagcaagtagcaacagatgctcgctacctacgactgctgcaccgaggctcagtattgcgaaccaatttgggtgcgttgtggcgcgcccagggagagtacatgggggctgaagaggcagtccgaagtgccttgatgcaggagcatttcgctgcagctcagaaggactggcgtggcatccatctgatgacgatacataagtctaaagggaaggagttcgatgaggtcatcatctacgacggcctttaccagcgcattgccaaagtcccgcaggatccaaaaatctgcgcccaggatcttttagtactgcgggtgggcgtgactcgggcgatacgtcggaccaccattgtgactccgaagcgcgatccatgccctttactgtga

SEQ ID NO: 71954 - DNA, 2304 bp, Pseudomonas syringae pv. japonica str. M301072
atggaagagcttatgcacatccagcatctggagattgcgaacttccgcaagctcctgtctgttcgaatcgacttagcagccgagacaaccctattagtcggagctaataacagcggcaaatcttctgccatgctggctctgcgaagatttctggtatccaaagcctccgcgtttcgccttcaggatctgacactttctcatttggtaaccatagaggcgattgggcaggcctgggaggctgcaggcgccatcccatcggccaatgactgggcagagtggttgccgacgctggatatctggatatcggcggagcaaggcgagctgcatcacatccgagatctaatacctaactttgcttggcgcggtggtttggtcgggatgcggttccggctcgagccggaggacatggaagacctctatgtggactaccgcaagcagagagaacgggtagagatactgaagaccgagattcagagactggctgccgaaggcgaggatccaccacatttacctctttggcctcaaagcctgcacgactacctcaatcgacgtctgggcaagatgttcaaggtgcgctggtatcgcctggatcccgcccagcttcaagacccagatccgagaactcgctctgccaatcggcaatcactctcggcaacttcagtggcattggagcgcaacccactaatcaatctcatccgtgtacatgagatcaatgctcagcgtgggttcggtgacagtgctgacgaggggcatgacgatggcaagcaatctggtggtagaaagctttcggaacagcttcgtgcctactacaaccgtcaccttgatccaggagatagcccagatatttcggatttaggtgcgctcagagctatcgaagcagcacaagtggctttcgatacccgattaagcaccagcttcgaaccggcgctgaaggaagtcgctgggttgggatatcccaacaacagcgatccgagtattcgggtcgcgaccagactcgcgcccaccgacgggatgaatcacgaagcagccgtcctgtttgagctcgactccataggtggcgcacctggcgctcctccccttcggctgccggagacgtccaacggtctgggatatcaaaatctcatttcgatgattttccggctcatggcgtttcgagatgagtggctgaaaaaattcagaactgctgacgagcagagcgccgctggagttgagcccattcacctggtgctaattgaggagccggaagctcaccttcatgtacaagttcaacaggtgttcgtgaagcatgcctaccatgtgctctgcagagaccctttgcttgagcgtttcccaaacttgaaaagccaactgatggtgagcacgcactccagccatgtcgctcatgaagttgagtatcagaacctgcggtacttccggcgtctacctgctggcatggacggcgtacaggtgccggtttcaacggtatcaaacctctccaccgtattcggtaaaaagccccaaaccaaagatttcgtcacacggtatcttcgggcacagcacgccgatttgttttttgccgatgccgtaatccttgttgaaggcgccgccgagcgcatgatgcttccgcactttcttcgaaagcattttcctttccttgaccagtgctacatcaccattttagacatcggtggcagccatgcacatcggctgctccccctgatcgacgcattagggatcgtaacgttggtcatcaccgacctggacgctggcagcctgagatctgctcaaccagtccagcgagatgcgggtcaacagacgaacaacccgacgctacgtcattggacaaaagcaggtggcctgccccacagcgtggacgcattgctcgctttggcggatgacctgaaaacccagcagatcgaccagcttttcgcgatcagaattgcttaccaaacgccgatcaatatccacctgccactgaccggtgaacaggtcgagatgctgccaaacaccttcgaagacagcttggtgcttagcaatgcctcacacttttcagccaagcaggcaaggcgaggtttgatgcgtgcgtttgctcgggccctgaacggagcagagagctcgaacaaccttgccagtcttttatttgagtctcttcgagacggtgacaaagccgagttcgctctacaggttctaggcgatccaggctttgccgaactgactatccctgaatacatccgggagggactgacttggcttcagtccaagctggagcgcaagcagcgcgaactgttagtcgttcctacagccatcacggaggtgacggcgtga

SEQ ID NO: 71955 - DNA, 1896 bp, Pseudomonas syringae pv. japonica str. M301072
gtgagcacgacgaacgacggcctatccgaaatagttcaaagagcagagcctgatgcggccctcgatgccgatcaaatcatccagacctgcctgaaccttgatcgaccgaccagttttttcctgtatgccggcgcaggctcagggaagacttattcactcgtagaagcggtacgcagcttcaaggaacgagaacgcgagagactcatttttgaaggccggcagattgcgatcatcacttacaccaatgcggcgtgtgacgagatcttacgtcgcctggagcatgaccctctagttatcgtttcgaccatccatgcttttgcttggcggatgatccaaggcttcaacgatgacatccgcgagtggctacgcgtcaagctgggcgaggatatagctgcactgcagagacagctggttcgttccaaaggcgaaaacaagacaacccaaaccaacagagccagccgagccagaaaaatccgccggctcgaggaactcgaacaggtaactacatttacgtacagccctacaggcgaaaacaggggacgccaagcgctgaaccacagcgaagtaattcagatggccgcagcgttcatacagcagcagccgctgagagatgtcatgaccgacctacatccggtactcctaatcgacgaaagccaagacacttatggcccgctgatggaagcgttcttgatcgttcaacaacagatccccgataggttctgcctaggactactgggcgacaccatgcagcggatctactccgacggcaaagcaaatctggaacgggctattccagaacactgggcgaaaccggagaaaaagatcaatcggcgatgcccgacgagggtgatcgatttgatcaacactatccgagccagcgctgacgatcattggcagatccctaaagagggagccgttgaaggcgcagtacgcatgttctgcacccgccaagtggctggccgaggctttgagctggaggaggaaatcgctcaccgcatggccgcatttactcaagacgcgcagtgggcagtgggtcagtcagggagaaagacactcattcttgagcacaagatggccggacgccgtatgggattcgagggagtatttacccccctccacgccgctgagcacctccgaaccggattgttagacggcagccttcctatcttgaaactcttcatggacgacgtgatgcccattttggcgtcggcgcagcaggatagcttcagcctaatggaggccgtccggatgcgctcgcctctccttgagccgcgtcacatgaaggaagctcccgaccagcttgctttgatggaacaagtcagtaatgccacccaggagctcctcgctctattcgaggagaatgatcccctcatcgctgatgtggttcacctgatcttgagcaccggccttttgaacgttcccgaccgcctgctggccgcgcaactgctcggagtcacagatgaagaaccgcccgaatcaatcgaccgagaaacgctcgaaatccacgcgtatcaggtggtgctgggacgccgtttctctgagatggctgccttcgccggttacacccagggcctgtcaccctttgacacccaccaaggcgtcaagggcttggagtttccaagggtcatggtgatattgaatgacgaggaggctgggggttttctattcagctacgaaaagcttctcggggtacaaccgccctccgcgaacgacctaaaaaatcagcgtgagggtaatgacgactcactggcacgcacccgccgattgctgtacgtaacatgcagtcgtgccgagcagagtctcgcaatcgtggtgtatacgcctcagcctgaagtggcaaagcaacgcgtgattgacgctagatggttgaaagctgacgagatcgagatcatctag

SEQ ID NO: 71956 - DNA, 1911 bp, Pseudomonas syringae pv. pisi str. 1704B
atgttcatgtatctgcgtgctttagacgttgatggtttcaagtgttttggcgagccgtttaccatcgaattccacgacggtctcaacgttctcgttggggaaaacggagcgggcaaaaccggcgtgatcagcgcgatacgccagcttttcaatgactccgagtcgggaaagcggatcatcagtgagcgcgatttctataagggctttgacgttggagccgtccccgcggaatcgatccagattcaagccacgttctctgacctggacaaagacgatgtcattgccttcgaagattggtgcggaaatcacgacgaagcaaaactgactttcaccgcgcttaatcaggagtcgcgcggccgattcagacaccacacatacggtggccatgagtacaccaaggccttggacacggaaacgctcgactacattcactgcgtttacctaccgccgctacgtgacgccgagaccaagcttcgtgaggggcgccagtctcgccttgctcgtctgttgaaagccctatgccgcaaagatctcgaaacggcgagaaaagccggcgagttgcacccgctggagcaacacgtgggcgacttcaaccgcgagctctccgaaagcgacaagtttgctatcaaattggccaatcagagaatcggtgaaaatctgaaggcagctctggggatgcacctttcccagggcacaatgatccagttttcagaggtcagcttttcccgaatcgtggagggcctgcggctcttgtatttccccaatatctcccaggctgacgctacccagtttcggtcgttggaggaaaatagcctggggtacaacaaccttctgtacatcgcatcgattctggcagagctcatccttgaagcagaggaagatcgaggtgaagaaacctatctgcgcttgttactgatcgaggagccggaggctcaccttcatccccagctccagttacgactgcttcgccacctcaagacagtcgccgaagcacgcgggatgcaggtgatcattaccacgcattcaacggtgatttctgctgctgtgtcggtcgatcacatcattcatatctccaatgacgaaaagcccgtagcaataccactaaggaacacggggcttcccgaccagagccggcgcttcgttgatcgctggctagatgtcacgaagtccaatctgctgttctccaagggcgcaatattagtcgagggcatcgcagaagccatcgtggtgccggagctggctcggattgtcctgcggccctacggcaaagggagagactgcctggatgactatggcgtgtcggtgacaaacctcggcggtatttacttcaaacacttcatgcagctgttttgtgacgtcaatggcgaacagccgggggctgatgtgccagtcaggtgcgccggtctaaccgacaacgatccaccgaagtctttgaagcctattgacgacgggaaaggtggaaccaaagcagtgccatttttaccccacgctgatgagcatcctgttggtaacaacccagcattatcactgcaagaccccattaaccgatcccagttcggtcgactgttcgcaggcatgtacaagacattcgaatacgacatcgcgatggagggggacaatctcaagacgatgttgacggttgcggctggactctggccggtaccggacggatcggtagtgaaggggctggaaaagaacgcgaaactggatttcgccgccatgacatctgccgaaagagccgattacgcgggagcgttacttgatcggctcgattcggatgagatcggcaaagggctctatgcccagtcgtttgcggacgcgctagaggtcttggaaactgacttcgtggtgccagagtacatccgactggcgattctttgggcctgcgggctggaagaaagaccagcatga

SEQ ID NO: 71957 - DNA, 1755 bp, Pseudomonas syringae pv. pisi str. 1704B
atgatgacgttcacccaggagcagttggactaccttgcctcaccgcttgaccagcatgtttacctcaaggcctgcccgggcagcggaaagacagaggtggttggcgctatggtggcccggatcgttcagggatggtctcgctcacccgcaggcattgcagtgctgaccttctccaacagcgcgacggacgaactcagaaacaggattcataagtacctgggggagccgatcggtatgccccatatgatcgctacgttcgacagcttcgttctgaaccggctggtggcgagcatcgccagtgagatcactggatatacgggcaaggagggtgactttcgcattcgtattctagacaagacagcggacatctatcgcacgcgaaagagtatttgcgaccgttggatctccgcgtgcaaatacgactatgaccttggagcgaacaggttcgtattttcaaccggcgagcgcagcctcgataatcagttgaatgctgcagccattgatcaggataccttcaaagatctcatcgccaccaaaaaacggctgtggaagggagggtttgccacctttggcgacatcgacatgctcgccctgaaggcattcaaggataagaaattcgacgcctactattcacgggtcgcgcgccgatttcctttgatcatcgtcgacgaatgccaggatctgtcggccgagcagctgcgaatcgtcgaatatctcacagagttcggcatcaagttccacttcgggggcgatttgaaccagtcaatctatggttttcgcaggtcgaaccccgataaggtcaccgagctcatggccaagctcaagttcgaaccgtatgagcttaagactaattggcggagcggacagggcatagtcgatctatgcaccaacctcctcggcggcgaacggatcagcggcaacccagatattgcgtccgaacaaccgcggattctcgaatacaaggcctgcccctctgagctgttgcctacgatccgcgccatgacacaggcgtacaccaacgtggtactggtggcgcgcggtcataccaccctccagcgcttacgtaatggtgagacctttgaaggcatcgagctgctggcagtcgcgtgcatcggcgccagtacaggcaacctcaaggacatcaaggatagcctgaggacttttgcaaagtggctggcgaacaaacttgagctggaggtcaccaaggtcggcccgtattgccccattgtcatggagtccaggcttgcctggcggaagttcatccatgaaagtctgaagttcatggtcgccaatggtgctggaaactccgatcagacctggtcggcctgggtgcgcaccgcgaagctggcgatccgacaactcccggatcagccctttgtacctacggagctgcaggatgtgctgggcggcctgagaggcctgaatcttgtggctcgcaaagggcagggtggcaagcccgtaaccgtgcgagtagtaagccaagagatgttggaagggcaaccagacacattgcgctacgagacgattcaccaagtgaagggcgaaactcacgatgttaccgtgatggtttcttcccaacagcccggggtgcatcagtctcattggcaagactggctgcgggatcgcggatcagaagcagcgcggtttgcctatgtagcgagttccaggccacagcacatgttgatttgggcggtgaaaaagctcaaagccgaggatcgacctgtgctggcgcagttggggttcgaggtgccgtaa

SEQ ID NO: 71958 - DNA, 2403 bp, Pseudomonas syringae Cit 7
atgaagctacaggcatatcggctgcagaactatcgccgactgcgcgacgtcgtcattgagcttgacgatgagatttccatcttcgttggcgccaacaaaagcggcaagacgtctgccgtacaaggcctgtactcgatgctccgtggcgaagcgaagaagttcgaactcttcgactttagcgcggcgttgtgggccgagatcgacgccatcggcaggacgcctccaggcgatgaggacgcgcccaagcagttgccgtccattcttttggatctctggttccgggtcggtgaagacgacctcgccactgcaatgtcgcttcttccgagcacggagtgggacggtaagtgcgtcgggatccgggtggcgttcgagcctcaggacgcccatgcactcgtccggaagttccacgaactgcatgaaaaggccaacaacgctgcgagcgcactggtggccagacgcagtgtaggcgcggaggcagatgcggaaaatgcggcggcggtggtagcggatcccggcgagtacaagccctggccggaaagtctgacgaagtacctcaccaaggaactgagcaaagaatatacgttccgctactacgtgctcgatgagcgcgcatttgtcggctttcagccaaaggaagttgattatgcgccgctgcccctaggcaaggagccgggtggcgcggcgattatcaagtctctggtgagggtggacttcctgcgcgcgcagcggcacctcgatgatccggatgctggcagctccgaccgcgccgagagcttgtcgcggcgtctgagccgtttctatcaccgcaatctggagaagcgtggcgacgaccatgcagcgctcaaagcgctcgatacctcggagaaagaactgaacttccacctgaaggaagtcttcagcgacactctcaagcgtctcgccaaactcggctatccaggcgtcaacaaccccgagatcgtgattcgggcggccttggatccgaccaccgtcctggggcaggattccaaggttcactacgtggttcctggtgcgatcaccgcgcaactgcccgacagctacaatggtctggggttcaagaacctagtctatatggtggttgaactcctagacctgcacgagcagtggaaagccgaggaagacaagcgggcgccactgcatctggtcttcatcgaggagcctgaggcgcatctgcacgctcagatccagcaggtcttcattaggaatgttttgcgcctccttgaggatgccaacgatcacgcaacgtttttccacacgcagctcgttgtcaccacgcactccccgcacattctctatgagcgcgggttctctcccattaggtactttcgccgtgttagcgagcagttggaccataacaccgaggtaaggaatctttcgctctttaagacgtgcgcggccgacgctccagcgcgcgaattcttgcagcggtatctgaaactgacacactgcgatctcttcttttccgatgctgtcatcctggtggagggcaatgtcgagcgcctgctcttgccagccatgatcgagacggcggccaagcgcctgcgttcctccgccctaaccatccttgaagtcggtggcgcgttcgcgcatcggttccaggaattgattgccttcgttggacttactacgctggtcatcacggatctggacagcgtagcggtcaagacggatgccgagaatgccgccgagcaagacgcaggagccggtgccgtcgacggaaataacgaggaagacgacctgaagcccttcgagctcgaagacgacgacgaagcagcaccgggcggcaagaagaagtccaagaagcgtggcagcacctgccatgctcacgtggagggtgcgtacacgtccaaccaaacccttatcagttggatccctaagaaacggttggttgccgaactctgggaagtcacggcggagcaaaaaacgctgtcgcttgccgaggggaccagcgctgaggttcgggtggcctatcaaaccaaggttttggtgacggtgggtgccacgacctcgcagctctgcggccgcacgcttgaggaggccttcggtcttgagaactccgactggtgtcaggctgaggctaaccgctcggtcggactcaagctgaagcgcgcaccaaacagccctgaagaactggctgagaagttgcacgaaagggtgatcggcaagaacttcgacaagactcgctttgcgctggaggtcctcgcaagcgggccgctcaactgctggaaagtccccacttacatcgccgagggcttagcctggctcgaagccaaagtggcccacgagattgaggcggacgcggctattgccaacgaggtcgcgacaattgagccgactgcagccggtgttgtcgccgttattgcaggcgcggggcagacgacatga

SEQ ID NO: 71959 - DNA, 1932 bp, Pseudomonas syringae Cit 7
atgagcagacgaattgatagcccagacaccgacgccgaccgcgagatccacgcgtgtattgccgagacccccccgcagccgttcgtggtccgcgccggcgcaggttccggcaagaccacctcccttatcaaagcgctggactgggtgatctcagagcacggcgccagcatgcgggcgaagaagcagaaggtcgcctgcatcacatatacggacctcgccgccaaagaaatcttggcggatgtcaacgacgacccgctggttcatgtctcgaccatccacagcttctactggtctattaccaagacgtttcaggcagacattaaggtttggctacagaacgacctccgcaggcggatcaccgaactggaagaagaattcaagaactacagctcgcgtgtccggcagactacacgcgacaggaacaaggctgaccaacagcgttatgcccgaagccttgagactattgctggcgtcaagactttcaactacggggtgggcagtgactacgcgaagggcgtcctcggccacgaggacatccttcagctcgccgatttcctgctgcaaaatcgcccgctgttccgacgggtcgtagcgctgaacttcccgtttgtgttcattgacgagagtcaggacacgttcccgagcgtggtgaagtccttcaaggaagtggaagcccagatgcggcgcaagttctgtctcggtttttttggcgacccgatgcaggcgattttcatgagagggtcgggggacatcccgcttgaggaccattggcgggctatcacgaaaccagagaattttcgctgtgcgaagcagatccttgacgttgccaacgccgtgcgcgcgcagggcgacggcatggagcaagtccgcgggctgcacgaaagggttgatggagaactcaagccggtggagggctcggcccggatgttcgtcctgccgaacacgctgaaccgaattgaggccctggcgagaatccgggcgtggagcgcggcgacgaacaacgacgagggttggacgaccccagacatcgcgctcaagattcttgtcatcgtgcaccgcatggccgcaaaccggctcggcttcggtggcatctactcggcgctgaacgataagacatcggagggcatgaagcaggggatgcaggatggcaccggctggcccgttcgaccgctcctaagttttgcgctaccgatcgttgctgccgtgaaagccggtaacgagttcgcggcgatgaacctgctccggaagttcagcccgcgtctggcgccagtggctcttaccggccgacgtgccgcggctgtattgcgagagctgcacgctgctatgtctagacttgtcgccatgttggacgaggcagggaccaccattggtgacatagcactccatctctttgacacgggtcttttcgagttcgacgatcgctatgtgcgtgttctcggatttgtcagggatgttgcagacgctgcccaggagcccgaggctgctgatgcagttccggccgaaggactatcctcagatgcggcaatggccaagttcttcaagtgctctgcacaagagctttggccctatgagcgctatgtctcagaagggtctccctatgctacacagcacggtgtgaagggcgcgcagttcgaacgcgtcatggttgtgatggacgaggaagaaagcgactaccgaacgtacaactacgaacgtgtcttcgcgagcgctgaggcccgtgctgcagatcgtgcacgagcactaggcggtgatgaaaacacttggagccgaacgctgcgactgctttacgtctgctgcactcgcgcccagcgggggctggtactaacgttctttgtcgccgatccgacgaccaccttggaaaatgtcgtggcgagcgggatcttgccgcgaagcgcagtcttcacacaggaagttttagctggatggccatag

SEQ ID NO: 71960 - DNA, 2318 bp, Pseudomonas amygdali pv. lachrymans str. M302278
gctgtcgtattagcctaaccgaggaagaaactttattggtaggcgccaataatagcgggaaaacgtccgctatggatgcgttgatattttttcttgaccagaagggtagaagcgcggcgagtatcgcttcgggagatacaccagcagcgaggaaattaagtgcgacagactttaccctatcgaactggcaccaattaaatgagtttggtcaggcttgggctgcggctgaagttggaggtgaccagcttagtgactggcaaccgctatgtccaacagtcgatatctggttgcaagtcgaaaaaaatgaaatccaccgagtcagccatcttatcccgacactaaagtgggacggtgggctactaggtgttagaatgatctaccagccaaaaaaccttgagcttctgaagtcggattttgtaactcattttaaagcggctgaacagctcaagcaaacggcgcgggacaatgctaaaaagaagcgtaaagatgaagagctaggacaaaaagaatttgtgctatcaatatggcctagctcattaagggaatacctagatcgggaagtaggcagggcatttgagctgaagtcttatatgttggacccggcgaaagttgaagagatacctaataaggactacaaaccccaggggttaaccgaagatcaactacctcttgatttctatccattcaatggattgttcaaggtggacataatcgatgcaacacgtggattctccgacccaaacgcggctaccgcttcccaagctagcacatctaacttagccagtcagatcaacaggtattataaccggcatttaaacccaacagatcttcctggcgatgaagatctagaagcgctcgaagctatagcgctggcacagcattcgttcgacggacgactgaatgaagtgttcacaaaaccgcttgaggaaatcaagactctagggtacccagggtttaacgacccccatattaggctgtcgagtaaagttaaccccattgacaacctagatcacgaagcggcaattctgtttgagattcaaaaagctagtttagcttcgggagcacctctcctgagtctttccgaaaaatacaatggcctcggatataagaaccttatcgcgatggtcttcaagctgatgagttatagagatcagtggatgcgggttggaaaagccgggaaacgaaagccggatgaggactcgttcatagaaccattgcatttagttcttatagaggaaccagaggctcatcttcatgctcaggttcaacaagtatttataaaaaaagcctattcagtattgaggaatcataaagatctctctttatcgaagagtttttcaagccaaatggtcgtaagcactcactcaagctacttagcccatgaagttggatttgagaagctgcgatatttcaagcgcaaacccgcagcaaactcatttcaagtgcccactgccgaggtgatagatttatcagctacgttcggaaaggctaaaactcggtccgaggaagtgttacagacggcacagtttgttgcccgatacttgaagacaactcactgtgaccttttttttgcaaatggaataattttagtagagggtgcagcagagagacttctaattcctcactttataagaaacaaccctaataaagatactagcttagacaatagctatatatctattcttgaggtgggtggagctcatgcccatcggttgagggctttgatcgataaggtagggcttcccacgcttgtgataactgacactgacgcattagcgccgccagccgctggtgcaggccccaaagcgaaagcttcagctgttcgacctgagcttggcaaggggtataaaaccggtagtcatacgcttatcaagtggttggatgtgaaagacgacactttagatgcggttttagctctgaaatttgaggaaaaaatatcgggcaaggttcgaattgcgtatcaatatggaatatcaataaagtttaatgataaagaagatggtcaagctattccatatactttcgaggatgcaatagcactaacaaaccctgcgattttcagaaatttggtgaagccaacaggcatgataaaaaaaatgcaaacagcactcaatctagggacgatagagttgtgttgtaaagctctttacgatgcgttagagaaaggcaaggcagagatggcacttgatttgctcttctgcgctgaccctaccctgctagctgcaccagcttatatacaggaaggtctcgactggctgaaaacggaactagaagtcgcgagcgaagatctcgtgccaggtgtaatcgagccagtatga

SEQ ID NO: 71961 - DNA, 661 bp, Pseudomonas amygdali pv. lachrymans str. M302278
atgaaggggaaatcaatgaacactgcgatctcaactccgaacgctgttgttgaacaaattttcaagtatatgaatttagacgatcctaaaagtttcttgcttttcgctggagcgggctcaggaaaaacccgaactcttgtagaggcattggagcttatgaagcaacgttatgcaactgagctttcgatgtctggacgaaagattgcaataatcacatataccaacgctgcttgtgaagaaattaaaagacgtatcttttttgatgctaactttatggtgtctacgatccacagtttttgctgggatttaataaaaacttttaccgccgatattaaggcttggcttgaggtgaagttggcagcggatatcgaaaaattattgtcagcaatagcaaagagcagatcccctagcggcgttacagccattagaaatcaacgaagtttagcaagtaagcagaaaaggctttctaatcttgaaaaaataaaaagttttacttactccccttcaaccagcagggctgaaaaaggtgctttaagccatgcggaagtcttaggaatagcggcttacttactggcaagtgaagcactactgcgaaaaatattgtggaataagtttcctgttttacttatcgacgaaagtcaagatactaataaagagcttc

SEQ ID NO: 71962 - DNA, 1797 bp, Pseudomonas syringae pv. aceris str. M302273
atgcaactgacacgcgtcgccatacgcaacttccgaaattttaaagatctcgacgttcctctcagtggcaacatcgtcgttgtaggcgagaaccgcgttgggaaaagcaacctcctgtatgcccttagattactcctcgaccctagtcttgcggatagtgcgcgccagttgggacagggtgatttctgggacggcttgggggagccgttggaagatgaaaagatcactattctcatcgaaattcaaggctttgaagaggatgtggatctgctcgcgatgctgacagactatcggctggacgatgacgctgacacggttcgactcacctacgagttgcggcccctcccaaatcttggccggtttccggcctcggatgaggattacgagttcatctgctttggcggagagactgaaagaaagcgctttggtcatgaccttcgtcgacgtatcaccatggatacactgcccgcactaagagacgcggaaggtgatctcgcaatgtggcggcgttcaccgctgcgcccgctcattgagcgagctttttcggaggtaagtcgcgacgaactcggtgaggttcaggaagcaattaggaccgcaaccaatgatcttacgcaattcgacccagtgagaacgctagaagaaaatctgggagctatgtacgcatcaatgagtgggcccaatcagtatatcgagccccgattaggcttcagcaccatcgacatcactcgtctttatcgcaatgtgaaactattgatagatggtggtttacgaacgatcagcgaggcgagcctcggctccgccaacgtcgtgtttctgagcctgaaaacacttgaattgaagcagttgatgaatgaaaatcgacgagatcacactctccttggtattgaagagcccgaagctcatcttcatccccaccttcaacgatccgtttatcgacatctattcgaagagtttggcggggcgggagatgagagattatcaatccttctgacgacgcactcccctcacattgccagtgtcgcccccttgcgatcaatcatgctgttgcgtgagacccgtcatgaagggaccgttggacggtccacggctgaattgaacctgactgacgaagacgaagaagacctgactcgatacctagacgtgacccgcgcggaaatgcttttcgcgcggggaattatccttgtagaaggcgatgcggagaaatttttgctacccgtttttgcaaagtcacttggctacgaccttgatcacctcggtatcacgatttgctctgtttcaggaaccaactttcaaccttacgtaaagtttttaacagctcttgaaatacccttctcagtgattacggactgggatccgcgtgcagccgcgcgacctcttgggttcaaccgtgcgttggagttggttcgaactattttgcgtattcggaaccgccgaaaccctagaagaattattgctgaacttgaagccttgaattttaaagattttgaagcacggtgtgatggatacggggtattcacaaatgtagacacgctagaagtcgacctctttgaagacggcgatttcgtagcccctattctcgccaccttgcgcgatgaagatttgagtgatgagcggagcgcttgggtagatggctgggaggatgacccagatacgctcgatatcgtcaattacatcaaagtcatagaggctataggcaaaggcaggttcgctcagcggctcgcctctcgtgttgccggcgtggagcctcctctctacatacagtcagccattgatttcgtggtgcgacgtgtccgataa

SEQ ID NO: 71963 - DNA, 1554 bp, Pseudomonas syringae pv. aceris str. M302273
ttgagtgatctgggcgttgagccaggtcgtcgaatattcattggaacagtccactcgttctcccttacccaaataatactgccttacgctagggtcgccagactcggattaccagatgacttccatgtcgcaacaaaaagcgagcgggaccgggcactgcgggcggctctagacgacatggccaaataccctgagccattgagggagtgggaggcaaaaatgaacggctatcgacagtcgattttagatcggggtcgaccggagtggctggaaattaatcctgagcttgcgcgcttggccgaactctatgaaggacggcttcggcgtatgaatttgatcgactatgaggatatgcccttgctggctctgagggcccttcgtgagaacgaatggcttcggaaagcactgttagcaaagtttcctgttctcgtcgttgatgaatatcaggacttgggcaaggctttacacaaaatggtccttggcttgtgcttcaccacgggaatgcgattattcgcggtaggcgaccctgatcagtctatttatggtttcaacggtgctcggccggatcggttacgacgcctctcggagcgtcgtggcgtagagactgtgcgactgcgcttgaattatcggtgtgcgactcgaattgtggcagcgtccggagctttactcgacgaggagcgagactatgacgcagtagcaggcgcaccatcgggggaggtgttttttcaccccttgcgagggcgatatgaggcacaagcatcggtactcatcaatgagcttttgccccaggctctcgctcgccacccgcacctcaggctcggagacgtcgcgatcttgtaccctgcggcctggttgggcgacacaatggttcccgctatccaacaagctggcgtgccgttcattcgcacagataccaatgctctgtattcgcgttccagcagattaatgcactggctggagcagtgcgccatatggtgttgcggagggtggcagagcggatctccacttttttcacagctgaccaatactggcaagcacttattctctaatgcaattcgatccgacacccaagcggctgagtttcatcggggattgatcacaaagctgtgggcctcgcgagaggtcgcgctgccactactgggatggctaactgattttcgcgaccgacttctagctcccctaggcgcagaatgcccagatctggctgatgagttgaccatattggctgacttcatcgatcggatttcgcctgaaggggacagtcatggcatgtgtctcgggagtttagctggccagagcaaaggcaaagatagcttgaatctttcttctctccatagtgcaaagggtcgggagttccctgtggtattcatgtttggcgccgacgtcgggaggatgcctcgtgacggcagcactgatccggaagtcgctgaggcacgccgagtcttctacgtagggcttacacgtgctgaagtcgagatccatatgatctacacacagggacgcgcatcaccatttgttagtgaggtgcagcggcgcatcgaaaatggtgattag

SEQ ID NO: 71964 - DNA, 2298 bp, Pseudomonas syringae pv. aceris str. M302273
atgcaaattcagcatctggaaatcgcgaacttccgcaagctcctatccgtacgggtcgacctcgcagccgagaccacgctcctcgtcggagccaacaacagtggcaaatcatctgcgatgctggctttgcgcaagttcctactttcgaaagcatcgattttcagattgcaagatcttactctgagccatctcgccacaatcgatgccattggtgaagcttgggaggctgcagatgatagcttccccatcccagtcgcaaatgaatgggctgactggttgccaacgttagatatttggcttgaggcagctcagggcgaacttcatcacatccgagatctcataccgaacttcgcctggaaaggcggccatgtcggtatgcggttccggctggaaccggatgatatgccaacgctgttcgtcgattaccgcaaagagcgagcacgagtgaaggagcttcagcaggaaattcaaaaacaggcagcgctaggtacacagccaccatcgcttccgctctggccgcagagcttgcatgactacctaaatcgacggattggtaaaaccttcaagatccgatggtaccgacttgatccaggccagctacgagcaccaaatcctgcgactcgtaaagctaaccggcaaccgcttgcggccactgctacgccacttgaacgcaaccccctaacaaacctgattcgagtccacgagatcaatgctcaacgcggctttggtgacagcgctgacgaaggagtcctagagggaggacatggatcgggcaggaagctctcggaacaattgcgagcgtactacagcaggcatctcgatcctggcgatagcccagatatttcagatttagaggcactcagagcaattgaggcagctcaaactgcctttgacactcgcttgagcacgagcttcgcgcctgcgcttaaggaagttgccggcttgggctatccaaataactccgacccgtccattcgagtttccacccgcctcgcccctaccgacgggatgaaccacgaagcagcggtgctgtttgaattggattccgttggaggagcccctggagcaccgcctcttaggcttccagaaacgtccaacgggctcggataccagaacctcatctcaatgatattccgaatgatggcatttcgagatgaatggctgaagaagtacagaagtcctgaagagcaaagtgctactggtgttgagcctatacatttggttctgatagaagagccagaggctcacctgcacgtccaggttcagcaagcatttataaaacacgcctaccatgtgctttgcagcgacccattgttagcgaagtatccgaacctcagaacacagctgatggtcagttcacactccagccacgtagctcatgaaattgactacgaaaacttgaggtacttccgcaggcttccgtccggcatggccgggatatcaatcccagtctctaccgtctccaacctgagttcagtgttcggcgagtccaatcaaactaaggaatttgttacccgttatcttcgggcccaacatgccgacctgttctttgcagatgcggtgatccttgttgaaggggccgctgagcgtatgatgcttcctcattttttgcggcagcactttcgtttcctagaccagtgctacataaccattttggatattgggggaagtcacgcgcatcggctccgaccccttatcgatgcgttgggcattgtcactctggtgataactgacttggacgcgggtctcctacaggtcggcaaacctgtagagaggaagaaaggccaaactactaacaatccaaccgtgcgccactggatgcgcgcagcaggccttggacatgatgtggactcattactagatctgtccttcgacaataaagcacagcaaattgacgatctgttttcgatcaggatcgcttatcagacgcccattactgtccgcttacccaaaactgggctagatgtcgaagcattaccaaatacctttgaagacagcctcgtcctgagcaatacagagcattttgctaacaaagcggggcgcgggctgatgcgatcctttaccaaggcgctacgtgaagcagaaacatccttagagctcggcaccgagctattcaccaagctcaaggatggtgataaggctgagttcgcactacacgttctcggcgactctaatttcgccacgttgaaggtgcctacttacatccatgaaggcttggcgtggttgcagtccaagctcgaaagaaaaagcaaagagctactgatcgtcccttcagcgattctcgaggtgacgccatga

SEQ ID NO: 71965 - DNA, 1872 bp, Pseudomonas syringae pv. aceris str. M302273
atgagccggcagccggaagctgctacggatgatgttccagatgccgatcagatcattcaggaatgtctgagtctcgaccatccgaagagttttttcctatacgccggcgctggctctggaaaaacccactcattggtcgaggccgtgaaaaacctgaagagtagggaacggcaacggctgacgtttgaagggcgtcaaatcgcgatcatcacctatacaaatgctgcatccgaggaaatttcccgccgtcttgaacacgatccattggtggtcgtatcaactatccacgcgttctcttggcggatgattcaaggctttaataccgacattcgtgagtggcttagggccaagctcacgcgagatattggcgagcttaatgagaagctcggaaaggcccgaggacaaaataagacatttctagcaaatcaagcttcaagggatagcaaagctcgtcgccttgattccctggatgagatatcaacattcatttacagccctaccggcgacaatcgcggtagacaagccctaaatcatagtgaagtcattcaaatggcagctgcttttattcagcagcctccattgctgaacgttatggcggatctgcatccggtacttttgatcgatgagagccaagatacttatgggcctctcatggacgcttttctccaagcacaatccctcatccctgaccgtttttgtctcgggcttctcggcgataccatgcagcgtatctacaacgatggaaaggtgcgcttggaggaagcgatccctcgagactgggctatgcccgaaaaacgtatgaaccgtcggtgcccaacacgggtcgttgatctaatcaacgtaatccgtgcgagcgcagatagtcatcagcagaagccaaagcctaacgctatcaaaggcacggttcgaatgttttgcacccaacagataccaggtcaaggtttcgagctggaggaagacatcgcacgccgcatggccgccatcaccggcgacggtcagtgggcaattggtaaagacgggagaaaatccctgattcttgaacacaagatggccggacgccgaatggggtttgagggtgtgttcacaccgttgtatggagttgagcacttgcgaacggggctactggatggaacactgccaatcttgaaactgttcttcgaacaggtagctcctattcttcaagctgccaagacgaacagtttcagtctcatggaggctgtgcggcttcagtctccgctcctcgatacaaaatctataaaagaggcgcctgaccagttagccttgcttgataaagcaggagcagcaactgagtccttatgtgaactattcaatgccaacgatcccttgatcggaaaggtggctcatgtacttttcgaaactggcttactagatctccctgatcgtcttgtgacagctctattactgggcgccacaagtgacgctcctccccagacatcggatcgtgatgcgttggaaacccatgcataccagattctacttggacgccccttctcggaaatggctgcgttcgccgggtataccgaaggactatcccctttcgacacacatcaaggcgtgaagggactggaattcccaagagtcatggttatcctaaacgacgaggaagcaggtggtttccttttcagttacgacaagctcctgggggtcaagcctgcttctgacagcgatgtaaaaaatcaacgcgaggataaagatgactccttggctcgcactcgtcgcctactgtacgtcacttgcagccgggccgaagaaagtctcgccattgtggtttacaccgctcagccggcaacggcgaaacagcgagtgattgaggcaggatggctcaaggcagaagagatcgagattctgtga

SEQ ID NO: 71966 - DNA, 1953 bp, Pseudomonas amygdali pv. tabaci str. ATCC 11528
ttgatactcaagcagatgcgcgtgtgtggtttccaatcgttcggcgcagcgccggtgattatcgatttccgaaagctaaccttcctgatcgggcctaatggttctggaaaaacggctacgttgcaggcgctctgtcgccttttctcgattgaccccaatcaacggcggctgcgcaaatctgattttttcgtcgcacatgatgaagaagataggccagatgagcgaactctgtggatcgaggcggatttttacttccctgaaattgccgatgagagcaaggagcacccgaccatcccgtgcaactttgggcacatgcggctggataacatcaaaggcgtaccgcgcgtacggtaccgtctggatgcctcactaggactggacgatgatatcgagcagaccttgcgctatgtctctgaggtcgacgaggacgggaatccagttgcaacgtcgcccgtaccgcgtgatgagcgcaaccagatacaggtgcactatctacctgctcgtcgtgacccggcagagcacatcacctatgggactaatgcgcttctaggccgcctgttgcgggcagtaaactggacggagcaacgcgaaaaaatcagccaactgtccgcagatatttccgatagcctcagcacgaaccagtcggtcatcaacctcggggacggaatagctaacgcttgggggaaactgcacaaaggcaagtttttcaaagacccgagtctgactttcgtaacccatgagatcgaagcgctgctgaggcatctctcggtatcattcaccccaggtcacggggaacagcaggtcgacttctctcgtctgagcgatggacaaaagtcgatgctttacctgacattggtactgacctctcaggcaattggcagagcagtgcttaagggcgatgatgactcgttcgacatggacaagctcaagcccgccgtattcacgttgatagcgctagaggaacctgaaaacagtctctcacctcattatttgggccggatcgtatcgtccttgaaggctctagtgctagataaggggaattcagatacgcaggcaatgatcgccacgcatgccccatcgatgctgcgtcgcgttgagcctgagcagattcggtatctccggctcgacgattctcgctgtacggtcgtaaccaagattacgatgcctccaaaggccggtgaggcctacaaatttgtacgggaagccgtacaagcatttcccgagatttatttttctaggctagtggtgttgggggagggcgatagcgaggagatcgttcttccgcgattgatggctgcagaaggacttatagtggatgaggcggctgtatgcatcgcgccgctagggggacgccatgtgaaccacttctggaggcttctcaacgggctgaaaattccacacgttacgcttctggatctggacgctgcgcgcaatggtggcggttgggggcgtgtcagatatgtggcaactgagctcaataaatatcttggggatgatgggtatctctcaaaggcgcagatcactgcacttccgaaatggaatgatcctttaaacaagtttttgaaggcggaaagagaccgcaagtcggcgagccatttaactgagctcgagaagtttaacgttttcttttccgcgccgatggatttagatttttcgatgcttgttgctttcccagcagcgttcgatgttgatgacgatgatctcgtcgatcccaagttgagtcagataaagtcggtactgggtgagaaattccatgatcgctatcaatacacacgcacacagcgcaagcacttcgcgtcgtaccaccagttatttaagatcgacagcaagccgaagtctcacattgaagcactctctaacctttccgacgatgacttaagggaggagatgccagcctcgctcaagcgactggtcaagcatgtgatcaagatggccagggagctccacgaatga

SEQ ID NO: 71967 - DNA, 1668 bp, Pseudomonas amygdali pv. tabaci str. ATCC 11528
atgatcgaggtcgaagcctggaaaccatccaatggcatcgtgcttgaacccaatgcagagattgcagcgaaggagcaacagcgctgcgtggccctgactgctggccctggctccgggaagtcagagctgctcgctcagcgtgccgacttcctgctcacaacaggggtgtgccgttatccaaaacgcattctggccatcgctttcaaagtcgacgccagtaacaacctgaaggagcgcgtccggcgtcgttgcggcgcgacgtatgcaggtcggttcgacagctacacattccacggattggcgaagaggatcatcgagcgctttagaccagtattagctggcgacgatgctttgaactcgggtttcaaagttgtcgtcaagggcaaggctcaccccgttcaaactgaattcaaggaactcatcccgcttgccattaagattctggatgcctatccggcggctattaacgcagtacgccagacctacagcgacgtctttctggacgaattccaagactgcacggatgagcaatatgagctggtgacgaggctgtttaagggatcagggcgtcgcgtaactgcggtgggagacgtaaagcaaaaaatcatggggtgggctggcgccttggaagggatattcgccgagttcgtcgatgatttcgaagccgagcacctcaatatctatcgaaacttccgttcgctgccgcacctgctcaaactccagaacgagatcatcaaagttctagatccggactcagaaatgcctgctcacttactcgccggtgaggggggagaggtacacgtgttgtcctatgccgattgtgaggaggaggccagtgatctagcagagcgcatctcccactgggtcaacgtggaaggcattgctccttccaaaatcgccatactcacgcgaatccagccggaggcttactgcatgcgactgaccgctgagctagatgcttgggggattagctatcgaaacgaaaacaaggcgcaagacatttcgactgagcccatcgcccaagtcatcgtggattacctgttgtgcatctacgggcttagagagcctaaagcttggactcgtctcacccgtcgcatcattccggtagaggacgatgcagaagggaagctgaagaccaattggagccgatacatcaaagaagcacgcaagtctgcttcagctgatatggcgaccaaaacgtttgcccaacgatggacacttttggaggagttcctcgcgatggcagggccgacgcagctagccgggctttcccacgattacgagtccagggagcaccttcgcgagctcattgaggaggtcaagaaatacattgacgaagctttggcgaaagagcctgatcttctgaaagcgttggctcagctatcagatgaccagtcgattcgaatcctaaccgtgcacaagagcaaggggctggagttcgatacggttgttttgctgggtgtcgaagaccaggcctatttcggcaaggatcatcatgaagttcagtgcacgtttttcgttggtgtatcgcgcgcagaaagaaggcttgttgtgacaacggttcgtcgtagagaaaaccttgggcaggttaactattggaaattagcccgcacttctcaggcagaattcttggagtatgtgaatctttggaaaacccattctaactaa

SEQ ID NO: 71968 - DNA, 2127 bp, Edwardsiella tarda FL6-60
atgtatattaaaaatttatcaatacgtaattttagaaattttcaaagtacaaagttgaactttaagaaggaatgtgtaaatacgatagttggggagaactcatcaggtaaaacaaatgtttttgaggctatgagattaattcttgatgactatcttccatattataaaagatttctttctgaaaaagattttcacagaggatgtttgcctgtttttggtcagtggatactaattagtttggagttaggtgacatttctggagatgaggagtctgaaatcttatgccaattaaatacgacagttgatgcgggtggtacagggcgggtaacatatatttatcgtcctcaattctacataagagagaaactttttaaattatcatctattgaaagtgttgaaaaaagaaaggaggcttatgaaggattgttgaaagagtatgttatcgataaaaccacttatgaggctttgattgtttaccagggaacttgtgattttactgatgaaaatgattatattaaagttgtcggtgaattttctaattttattttttcgaatccctcgattgagtatatagatctactaggaaatagacagcgaggctataacttgctggaccatattagctgcacttacgctagagcgttaagagatgttgttagtgaattaaaaaacaatagatttaatccatttcaaaagttactggattttatatctaaagatatttcaaaagacgacgaactcacaaataatattaaagatgtaaataataaaatatccacaatagcagaggttaaaaaactatccacaggtattttaacatctattactaacgctgttggttcgacttattctccattattaaatatttcttctgagcttccttgtgaagtaaaagaccttgtgaaggttttacaactcaaggccggggattcgttaagtgatggttatacgtctgaattgtcagaaatgagtttaggtggggctaatttaatatatcttgctcttaaactttatgaatatgaagaaggggtgagtaaaaacttattatcaaatttccttattattgaagagccagaggctcatattcacacacatattcaaaaaacactttttagcaacttaaaaaataaaaaaacgcaagtgttcatatccacacattcaactcacatttcatcagtctctaatatatcatcaactaatgttttagttaagaagcttggatatactcaagcctgttctccttccttggggcttgatgagccaacaataaataaaatagagcgcttccttgatgcaatacgaacagatattttatttgcaaaaaatgtaattctaattgagggtgatgcagaagaaatattgataccacatttagtaaagaattcttttggtgtaacattagatgaattaggtgtgtcactaatttcagtgagaggaactggatttgaattgttgtcatcattgtttcatccgacaagaataacaaagagatgcgcaatacttactgatgatgatattaacatctataaagacggtaagccggaatatgttactcaggtaatgtatgatgatgctgtttcctcagaaaaatcggggaaagatagaattaaaatattggaatcaataactgcgaataatgatcttattaaagctttttttacggaatatacttttgagattgatttggctctaagtggttccaaaaaatattttgaggaaatagctagagaatcttttgaaaaagagttttatttaacgccttatttagacgctttccagtcatccgacgatattaaaattggttctttcgctttgaaattagcaaacaaacataaaaaaggttggtttgcaatgaaagtcgtagagaaacttgatcgtgatttccctataccaattgctttatgtaaagcacttggttttacaagtgattttaacaaactaacacttgcaagagtgatcaaatataggtctgattattatactcaaactactggggaaaatataatagaaagagtattctctgatgatagtcttgagtatatagttgaaaatatcgaaccagtcctagacgtttttaaaggacattatagcagtgatcctctggtttatcttttaatggaggcatga

SEQ ID NO: 71969 - DNA, 1692 bp, Edwardsiella tarda FL6-60
atggataatgaaaaaaaagagttattaaaaattaaaaaaaatctatttgtctcagcttgccccggagctgggaaaactaaatttcttttagccatgcttgaagataatattaggtatggctcagaaaataaatggcatatagttcttacacatactaatgctgcagctgatgaaataaatttacgattagataatcaaaatgttatcaatgatagaatttggtgtggaacaatacattcatttttacttgaatgggttgttaggagatatgcgggtgcaatggtacggacaaagaatgggtttagattaatatctgaacgtgaacatcgtgatataatacgtaagattgagaaggataaatttcccaattataaattaaaatttaaatgggatgagtacggtggatctcaagttgagcctttttgcttatgcaatgaacctgaaaatatattagatgtacaaaaaaatgaggagatggctcgagaggaatacgaaaggtataagatggaatccagaattatagatttcaatgatatattgactcttagtcgtgatttccttgctaacaatgaaaaggtctccgagtatctatctaagttgatcggttatatttatttggacgagtctcaggatactagttatattcaattggatgctctttcctcaattacaaaatacaacaggacaataatgcttgttgtcggtgataatgatcaagctatatatcaagatctgggagtatctataaaaaatgatgtcagtataaaaaagatattaaagctaaatgatttagccgttagacaacttactggatgttacagatctacaaaatcgttagtggagtattataaaaaatactcctactctaaatctgatgttcaatctatccgagaggaagtaggtaaatttcctgttatcagagatacgttgcaaactgaattggcagatagaataataaaccttatcagaaaatataataatcttaaaggtaatgttgagggggtggctatcattggtcctaataaatattacttaaatgctcttataaatgatttgtatgatagatcaaatgaatttgtatttgatttctattctactaatccgctctacacactaaaggatacagtttactatgatcttgttcgtcttacattgcttgatgtgtcagttaaaaactatagggtaagacaagcattatgtacatcaataaaagataaaataccggagtttgatagtttatcttgtagtgatttaaaaaggacaataaaacagttcgaaacaaagcgaactgtatttattttttggttgaaggatttctatgattttcttttctctaacttaccaaattcccaaaaaataatttctgattatttaatttgtcgttctaatatttccgcttttcccgttagagctgatatagtttcgatacgaaaaataattaacaaagaagctaatgttgttaaagtaacaacaatacatggttgtaagggagaagagtatgattatgtaatctctatcggatatcatgatcaaatcgttcctcatgcctctgtaattgaaaagggggttgaatactcggaaagtgttgcgaaaagactaatgtttgttgcattttcaagagctaaaaatcacatgaatatatttatcgatgatcgaaaacctgttagtccttattttttgggaaattcatga

SEQ ID NO: 71970 - DNA, 2190 bp, Staphylococcus aureus subsp. aureus ATCC BAA-39
atgtttatatctactcttcaaattcgaaattttagaaattatgaatccgaaatctttcgattcgataatgagacaaatactattataggtgagaatgattcagggaaaaccaatgctcttactgcattgagaatcttattagatgatagttattactatagtagtaaaacactgaaagaatcagatttttttcatggaattcaaaatgggtggcaagggcattggattattatctctgcgacatttgaaggaatcagcgaagaagaatttgacaatgagatttgtgcttccatttctttaaattctgaaagtcaaacaatcttagaagaattgatttcaaatgcagataaaggtgtaggtagtatttctctatttattagacctaacaaagctattagaaagcaattatttgatatttccactgaattagactctcatcaatttaacgaatttagaaattctattcgtctatccgactatgaattttactacacatctaaatcaaatctaaatttctgtatcaatgaaaattatgataaattggtaggaagactcaatgacaatatagctagtaatcctgaagaagacgatgaagctctgttgggctcaagaattgacatgtcagatattttcaagcatatttcggttgtttatgttgacgctcttcgagatgttcttagagaaatgaaaaacaatcgaaacccagtcaaaagaatcatggaaacaattgaatcaaaaatatcatcagataatgttgagtcattaaaaacaattatacagcaattaaatgagactattaccagtgttcctgaaattaggaaaattggcgaaaatattaatcggcaactaaatagcataattggttcagtgtattctcctaatcttcttctttcctcaactatgtcagatgatatgggttttttagcaaaatttctttcaatgaagccagaacaaaatatcgacttagacttactagggttaggacatctaaatatgatttatttagctttgaaaatagtcgaatttgaagcgtgtcgttcaagagaactacttaatattatgttgattgaagaaccagaagctcatattcatcatcatattcaaaaaactctgttcgaaggattaaatcttcaaaaaaactatactcagattctcatgaccacacattctgtacatttagctgaagtgtctgaaatatctcggatgaatgtattaaaatcgtttaatggcaaatctatcgttatgaatccagcaaataatctgaactcatttgctaaagaaaagttaaaaaagaacaatctaaatctaataaacgcagtagagagatatttagatgttaaaagaaatggattgcttttttctaaaggtgttatcttagttgaaggagatgctgaagaaatacttattcctcaaatagtaaaaaaattatttggtataaacttagacgaacttggaataggtttgattaatgttggtagtacttcgtttgaatatatcgctagcttgtttgacgatgatagaatacagagaaagtgtgctattgtaactgatttagatgaacaggcaatcccatcagaacatcgattgtataaaagcactgcacaagagaaaggtcaagcaagaaaagaaaaattatcctccctttttaatgaaaacaattgggttaattgtttttatgctaatacaacatttgaaattgagtttttagatgtgaataaagaaaatattctaacttatgtcagtccaattatagatgacgcattcaaagataaaaaaacaataactgcttataaagaagaaatacaaagtgaacaatatttagaaagaaatttagcgatgttaaaactagccaatcatgttggtaaggggtggtttgcaattgagttaggtgaaaaaattgactttttaatcaaaattcctaagtatattcttaatgctattgcttttgcatgtcaggaaatagtagatctctcaatttataaaaaaattctactccatacaatcgacttgtacgaggaaactacagaattgtcagctttatcagctagtttaaaaacaagtgatacagctgatttgaatatagcaataatttctttattagagtactttggtaaagatgaggatgttgtgtatctaatcaatcagatagaaaattacacaaaaatactttatgctgaggtttcaaaatga

SEQ ID NO: 71971 - DNA, 1794 bp, Staphylococcus aureus subsp. aureus ATCC BAA-39; identical to SEQ ID NO: 71697

SEQ ID NO: 71972 - DNA, 1971 bp, Streptococcus gallolyticus subsp. gallolyticus TX20005
atggacagtttatatatatctagagtagttataaagaattacaggaactttaaggacttagatgttaatttgcaacacaagtcggtaatcgttggtgagaacaatgttggcaaaacaaattttatcaaggcattgcagctgattttagatccttcactttcagatgaagatagaatgctatctgaaagtgattttaatgattctcttaagaatcctatggagaataatcaagaaattttaatacagatttatattagcaattacagaagaaacgttgcaataatgacaatgttatctgatgcgactgtcttggatgctgaaggaaatgaagtgcttttattaagctataagtttttcccacatatagatgagtttggaaaaaaagaatatcaatatgaagtatatatgcgagatgatatgtctagaaaatttggttcgagagaaagaaagtatcttaatataaaagtaattaaggcactaggagatgtagaggcagatttgagaaacagcaaaaaatctccggtaaaaaagatgcttgatgattataaaatcagtaaagaagttcttgaaaatatagcaagtgaatataaagaatgcggtgatcgcgttttggatttagatgaaatcaatgatatgacaatgcatatcaatgaacgtttttcagaaatccttgggaatcatgactatgatatttcgttacaggcaatggaggtggatccaacaagggtattaggatcgctgaaaatgttgatggcaaatcgctctgtattggattcaagcttggggctagataatattttatatatttcgttggttcttcagatgctaaaagataaaacagttccaacttttgtttctggttcagaatatagtgaactattaacaaaggaaaatagcgaaataatagatgaatgctatatttccaatgcaggtggaaattatgttttaagaactgatttaaatgaagagaactatgcttcattgtatacatttatggcagacaatggacatggaaacaatgcagttactttgctggctatcgaggaacctgaagcacatcttcatccagtttatcagaggttaatctataaagatgttattaatcgaaacggatttcctattcttcttactacacattcaacacatattacttctgtagtaccaattaagtcattggtacacttgcatcaagaagcagggaacacagttgctcattctacagcaagcatgcctatgttggaaggggaatttttggatgttgaacgatatctcgatgttaaacgtggtgaaatatttttaggaaaaggtgtgatactcgtcgaaggtatagcagaggaatacattattccaaaacttgctgaattattaggtaaaccgttggatgagaaggggatagtagtttgtaatattaattgtacgaattttaaaccatatatgaagatgcttaattctcttagtataccgtatgcagttataacggatggtgacttctatattgaaaatgttgacgatagagatgattcaaatagaaattatcatgtgatggagaaagatgtaaaggataatgatacctgcggatcccttggaagggaaaacgctattaaaacattcgaagcgttggatgatagtgtgccggaaaatgttgatttagctttatatttttcagaacgaggatattttattggtaaatacacgtttgaggtagatatgatggaatgcacgtctactgaagctggtgaaagggcttttactgatacatttgatcagttagtcgagagtagtcgaaagcagaataactttaaaaacagattggagaatcaagattatgagttctgcttacgaagaattgaagatcagagtgttggtaaaggaagatttgcacagattttctcggggaaatgtgttactgataactgtccagattatgtaaaaaatgccattgaatatatttatgcgaaagtagatgaatga

SEQ ID NO: 71973 - DNA, 1830 bp, Streptococcus gallolyticus subsp. gallolyticus TX20005
atgagtacgacgacttatattgaaaaactaagtagaattgaaaaagatgaataccagaaggctgcctttgatagtcaaagtaatacagttgtattagctgggccaggaagtggaaaaacaacagttttgactttaaaagccatgcatttgctaaatggtgtaattgcagaaccgcgtggtttggcatgtcttacttatagtagagaggctgcaagagaatttacagagagattaaaagaattaggtttggtaaggggaaataatatatttcttggaacggtacattcattttgtctcacagagatactgggtaaattttgtgatgtatattcattaaatattccgacgccgataaaaattgcttctgaaaaacaaagagcaaaactatttgagatagcaaagaaaaatgttgggtgcaatgataagtattttaaaattgagagaatgaattgtacaagaatgcttagtatttctggagtaagtaatatttgtgttgatagagacgaaactgcagagataatagctaatgaatatgaaaaactattaaaccaggccggtgttattgactatgaaacaattattattgagtctacaaagctattacaggaaaacccttatgttagagagtgtatatctgcgaaatatccgtggcttttaattgatgaatatcaggatttggggcgaccgcttcatgaaatggttctcacacttatagacaatacaaaaataaaattctttgcagttggtgatccagatcaatctatatatggatttcagggagcagtacctgattatttaattgaattagctgatagacctgatgttcagaaaataactttattgaacaactatagaagcaatcaagacattattgacggttcagaacttgtgttaaatcaacagcgtggttatgttgcgaaaacacgagaaaatgaagatgctgtttataaatttattgaagtaaatgaagagttggatgaccagattgaatattttgttaaaaggatcgttccaggacttgtaaaaaacggcattccctatgaggagatagcagttcttgttgggaataattcggaatgcaatagtattgcattaagatgccagaaagagaatatcccatactatatcgtaaagcatcaatttaatcggagcgattttgtaaaatgggtagaaaactgtgcttcgtggattgaaggagataaagatattgttttttcggatataggtgacttttggatatcgttgataacagtaaatggcgcaatgtatttgacagatgaagagaaactaattatcagagagcgactgtataaggttcttgtggaaagcaaagattatgaaaaatcactgacgaaatggtttgaatatgtaaggaaagagctatgttttgataagtatcttgaacaaaatacgtatttccaggatgaaaaagataatattgataatctgatgaaagaaatgtctggtagtgaatataaggaatatggaatagataagttttctaaaatcgggaagcccgagaatcaaattgttatttctacaagacatagttcaaaaggattagaatttgaggcaatagtaatgatgggaatggaagaagatcattttccaagttattatgttaaaaacgacgccagattattagcagaggctaatcgtttgtgctttgtatgcgtaagccgagcaaaacgtgtgtgtattttaatgaaatcaagttattatacgattaaaactaaaaatggtccgtggcgaaaagagttcaaaccatcgatgtattggaatatattatactcaaaatatggtaatattaatacaaagaaacttcactaa

SEQ ID NO: 71974 - DNA, 2040 bp, Streptococcus sp. oral taxon 071 str. 73H25AP
atggaaattaaaaaaatctatattcaacattatcgtttattaaacgatttttctttagagttgaaaaatgatttatccttaattgtgggtaaaaacaattgtggtaagacttcggttttatctgtgttagaaaaaatattcaataaaaattccaatcgcaatttggtatgggaagatattaatttaaatcataggagggaaatctttgagaatataaagagagtctctgatattcctgattcggaattatcgtctattttagggattaatcttcaaatttggattcaatactcagaattagattcttatcaaaatatccaaggatttatgatggatttaaatcccgaaaataattttattattcttgaattttcgtatataattcctactcaaaagcttcgcgagataagtagtttgacttgtgattttgcagatgatttttcaaaatttgaatcatttatgaagaaaaatctgaataaatttttcgaaatacagatttattcacgtggatataatcctattactcaagaaatgacagaagaaaagtctgatttacatgaaatgaaagatgttcataaaattattaaagtaagagggattagtgctagtcgagaagtatctaataaagaaaataaccattcattatctaagacatcaaatcgattttataaattaaataatggcgaagaaattaacagtaacgcaaataatttactgcaatctgctattttaaaggcagatgaaactttaaccagagcatatagtggtgatgatagcgtcgaaggaatttttacttcagtctttgaacgcgtcaaaagatttggtggaaatgatagtgaagcagagttggcaattcattcatcactgtctgagaaagatattttaagtaataatacgacactgtattataagcatgatgatagtctattacctgaaacatataatggtttgggatatttaaatttatatggaattatttttgaaattgagactttaatggcagatataaaaaacgaacctgctgatattaacctaatatatattgaagaaccagaatcgcatacacatccacaattacagtatatttttatcaagaatattaaagatttgctaaaggaacacaatgatgaactaaaagaaagtggagattttagttgtattcaaactttaattacaactcactcatctcatatagtttctgattgtaactttgatgatttaatatactttaagcgtgatgctggaacggtaatatcaaaggtttttaattcattgaaagaagaatatggaaaagatcaattaggatataaatttgtaaagcagtatcttaccctaaacaatagtgaattattttttgcagataaagttatttgtattgaaggtgatacagagagaattttacttccaacaatcatgcaaaaagtggatatatctaacccacttaaccaaagttcaatgataatgccactactttctcaaaatatttcaattattgaaacaggtgctcattcacatgtatttaggaaattatttgattttttaggaataaaagtattgataattacggatattgatccagcaaataaaaatgaaaataatcgcttgacttcttgctcagcagtagatgctacctctacgacaaatacttcaattaaaaatttttttgatatttctggagatgaagttttttcaatagtagcccaaaagagttttgcagaaaaaataacatcagataatagaattcgtattgcatatcaaattcccgaagatgaaaatggttatcagcctgctagttttgaggatgcttttatcagtttaaataaacaattcattattgatcaaaaagctggttttattcaatttgaagctttaaaagactttgatgatagtgaaatagaagatttctataaatttgctagggataaagtaaacaaaaaatctgcatttgcatcaagtttattatattttgaaggtgaagaaaatacttggaaagtacctaactatatttcggagggattattatggttgagagaacagtag

SEQ ID NO: 71975 - DNA, 1926 bp, Streptococcus sp. oral taxon 071 str. 73H25AP
atggttgagagaacagtagaaccagaggtagaaaaagtatttgaagtaataaaacaaggtcaaaattttattcttgagggtggtgctgggagtgggaaaacttattcattaatttccattattgaaaaaatatctatggaagaaccaaaaaaatcgattgtatgcatcacttatactaacaatgctgttgcagagattagatctcgaatcattaatgataatttacgggtttcaacaattcacgagtttatatggcatgtcattgaaaatttccaaaaagagattaaagaatgtcttgttgagttaataaatgatgatgcaaaaatcttattcgttgctccaaaggaagtattaggtgaggaaactatttcgcttgattactttgatggtgtttgtgttgaatatactgaatggtattctatgagcataactgagcaaaataaagttcgaataagtcatgaccatgttcttatagttgctgaaaaaatgttttctacatatcctaagttatgcgacattttgatcgatatagctgattatatttttgtagatgaatatcaagatactagtccgttagttgtaaaaattttattggaatatatacagaatagaactaagaaaaatattgtaggattttttggagattctatgcaagccatctatgactcaggagtaggagacttaagttcgtataatctaataaagataacaaaacctcaaaatcgtcgcaatcctaaaaaagttattgatttagctaataaatttagagatgatggattggttcagactccatccaacgatgatacagcacctaatatggataatgggagtatcattccaggaatagtgaaatttgtctatgggaatgatattaatcaacttgaaattcttagaggtagtcaactttttagaaagttagaatttaatgcaccctcaaaaacaaaagaattgcgtctgacacataaacttaatgcagaaatggcaggtttttctaagttatttgagttatataatactgatttatttgtaaaattaattacaggtataaagaaaaaaatcaatgtgaacaagatagatgataatggaaaattatttaaagatttagtagaagaatctcaaatagttgttagaaggggtggtcccttaatagtcgatgagattaaatccaattcagaactatcagctttttatgatgaaattaaaacgtgctcgtttgaagaagttagtagtaagagtaaagttaataaagaatcgctattatcttataaatttaatggattaagtagtagatatgaagcgggcacagatagggataggattcttaaaaggttggatttagtctatgagctagtagaactatataaaacaggtaagcataatgaatttttacgtattactaagtttaaaataacttcgtccaaagataaaattagtctatcaaatgttatgacagaaatctctggtgatgatatcacaattggaagagtaatagagcttgcagaggaacatgaactaatttcaaaggatgacctatttactaattttattaacaataagggatattatttatggtcgagacttaagataatgccatttcaagaatatgtaaatagtattgattatcttagagagtatgtatcggttataacgcagcataaggttaaagggagtgaatatgagaatgttttagttttattagataatgggaaatggaatcaatataattttgataccttgtttggaaaaggttcttctaatgagaacgttcaaaatagaactaagaggttattctatgttgcaattactagagcgatgaaaaatttaattgtttacatgccgagcaatgatcgtcagattattgaaaaagcaaaagattattttgaacagagtgatattgttaatgttctgtcattagttgatgagtaa

SEQ ID NO: 71976 - DNA, 2010 bp, Paenibacillus polymyxa E681
atgaaatcaccttttatttcaagaatcaaaattaagaattttagaaactttaaagaatttgatgtttgtttaagccacaagcaagtaattattggggaaaacaatattggtaaaacgaatctcattcgtgcaattcagctcattttagatcctaggttgagcgatgatgatcggcaattaattgaatcagacttttttaatggtcttaacgccccgatggcaaacaaagaagagattgagattatgattgaaatacaaggattcgaacataataagacattgttggcggtcttatctgatgccacagtttcaaccgatccaccaaccttaagatttacatatcattattaccccataactagagaagacggatctactgaatacatgtttaatgtctatcaaggaatagactcgacaaaaatgttttcccatagacaaagaaagtactttaatattagagtaattagcgcactcagagatgtagaaagcgaattgaaaaactccaaaaaatcaccgataacgcaactcttaaaagagtacgatttcaacaaaagggaactggaggaaatagcaagcaatttaaaaacacaaagcaatcagttgctttctatggacgaaattaaagatttagctttcaatattaactctcgtttcaataaagtaatggggtttcagcctgactctcaattacacttagaaacaatggattttgattcaaaccgaatcttaacaacacttaagctggtgattggccaaaataagagagctactaacgaaacaagcatggggcttacgaatattctatacatctctcttgttttactttcacttcgggataacacagtaccaagttttcttaagtcggatcattatcaattcttactaactcttgataacccagaaattcttaaaaaatgctatgaagaaactgaaaagggtaactataaacttataacagatatctcagaagaagattccaatacactctatgcatttctggatgattctaatcagaatccaaaaggttttactttactggctttagaggagccagaggctcatttacatcctacacttcaacgaattatttataaagatgttatgaaaggaagcacatctgttctactaactacacattcacctcatatcacttctgtcgcgcctttagattcgtttgtacatttgcgctggacttcaaatggaacacaagtcaaaacttcttccagtacaaatttatctccaagtgagaaacaagatttggagagatacttagatgtaaaacgtggagagctttattttggaaaaggagtaattcttgtcgaaggaattgctgaagaatatttaatcccaaaatttgcagaacttatgggtctgccgttggatctaaaaggaatcctagtctgtaatattaactcaacaaactttgctccctacattaaatatttagatactctggggattccctatgtttgtattacagatggagactattatataaatgttcccaatcccaaaaaaaatgacggttctctaatgagaaaataccatactatccgagattcggatgatgatatacacaaaaacttcggatatcttgggaatgaacttgtaggggagatactaatagatctaaagaaaattactagtgatgttcttgacctagaatggagtgagcaaaataaacactttgctgaacatggctttttcttgggacgttatactctagagactgaaattatgcttaaaagcaattctaatgtttctgctcgaaatgctataattacaacttttgaagagttaacaaatggcggagatcaacaaaaatccaactttaaagctgaactcgaagcaggagaatacgatgcttgtttacgcaaaattgaaaatagtgataacaaaataggaaaaggtcgtttcgcacaaagattatcaaccaaatgtttaaaagttcacatacctggatacgtaaaatcagccatccaaaaaatctatgacaaagtggatgcttag

SEQ ID NO: 71977 - DNA, 1803 bp, Paenibacillus polymyxa E681
atgaactattatttaaaaaaactagaagaaatcagaaaagatccccatcagtctgaagcttatatgtccaataacagtactgtagtcattgctggtccaggaagtggaaaaaccacggtactcacacttaaaattatgagactacttcaagaagagattcccttatcaagaggtctagcttgtgtgacatataacagagcagctgccaaagaatttaatgatcggctacaattgtatggctataaccgaaggagtaatgtttttttaggaactgtccattctttttgtattgctgaagttatcaaaccctttgcccatctttttgattattctataccaatgcctttaaaaataatatcgcagaaagagaagaaacaaatttttaatgaagtcctttcatacttgaatatttcaccaaaggaattatccattgatgaaatggataaagagagaagtttaagtattaccggtatgagtcaggttactattccgaggtatgacttagccctttctgccgccgcagaatacgaagacaggctccattccctaggaaaagttgactatattgatatcgtgaaatacgcaacattgcttattcaaaatgaaaagtatgtaaggaattgtttggaggctaagttcccgtggattttagtcgacgaatatcaggatttgggaaagccattacacgagatgatacttgctatttttaactcaacgaagattaagatttttgctgtaggtgaccctaaccagtctatctatagttttaatggtgcaatacctcactaccttttagagttatataacatcccaaacataaatcccataaaattattaacgaattttcgaagtaatcaagaaattattgatgcttatcagttagccttacctccggctagtatcgaaaattatagagcaggaacaaggattggagaaaaggcagagtttaatttttttgtctgtcaacatggtatagaggatcaattcaaagaagtcattcgttcagttattccacaatgcgctggacaaggggtacccttagatgaaatctgcgttttggttgcgaataattaccatgccaaaagaatgagtgaactttttcaagaagcaggtatcccctatcatattaataagcgtaaagacttcgaaattagtgaaattgttaagtggttaatccagtgtgcatcttggagtataaaattagggagagaatctttttctgacgcatttgaattttgggctggcgtaattatgcaacataaaggatactccatcctagataatctgactgaaagaaaaagattctacgatgttttacgtaaaagtcgcttacattctcataagctttcagattggcttaattcggttgaagaacaatttaacttatcagcccttctaacaaattctgatgcctatcctgatgaaatggataatttcaaaacattaattgagttagcaacaagtggcgaatttagtgaattctcagttgaaaattttgtcaaattactaaaacctgagaaccaggtaactatttcaaccaggcatagctctaaaggtctagaatttgaagtagttattcttttagggcttgaggaagaaaactttccttcatatagaagccttcaaagcaccgatccaaacaaactagaagaagaattcagaatgttttttgtttgtataagtcgtgcaaaaagggcttgttatttagttcgttctcttaaagagtcaaacccttggggaagggtcttcaataaaaacccttctaggttttggacaatgctttttgatgtgtacggtgaataa

SEQ ID NO: 71978 - DNA, 2070 bp, Streptococcus pneumoniae 670-6B
atgaagttaacaaaagtaattattaataattttagatcattcggtgaaagtcaaattattgaattaaacaatcaaactgtactgattgggaataatagttcgggaaaaacaactgtattacaagcattgagtaagctgttttcggacaaacaaaatgatagaataataaaaaaaagtgattttcaccttccaaaaggttcaaggcccggagaaaatactagaaacctctttatagaaactatttttgagtttgatgaacttgatggaactccctatagtcaagcaattccatcgtttttcgaacactttacagtttctaaagatggtgccaaaccatttctacgaatcaggttagaatcttcttgggaagatgatggaacagttgaaggaagtattgatactcaattctattatatttcatctgatgaagatactattagagatgaagacaaacatcgtgctcctagaaaggatttggataaaattagggtactttatgtacctgcttcaagaacgcctgagaaggagttgggtaatgcttcaggtagtatgttaagtaggttggtaaatagtataaattggaccgaagatgagataaatgaaattacagataaaattgatgagttgaataacacctttttatctgaaaatggagcattgactcagatcaacaatgagattcagaagtcatgggaattatatcatgaagataaccgtttttctcaagcagagttgattattaattcttctgagatggcggcagcacttagacagattgccttaaaattttcaccaacaaccactgaagaagcatttacagtttcagatctaggagatggactgagatctattttttatttttcacttgttgattcgatacttgatattgagttagaaattaccaaagaccgtgaagaaaatcctgataatccaagatttaagttgattccaccagtactaactatcctagcaatagaagaaccagaaaatcatattgctccacatcacattggaaaactgataaaaaggtttaagcaattaggcaataatgacaactctcaagtaattttaacgtcacattctccagctattgtaaaaagaattgacccagaagatttgaagtatttaagaatagaaaataatgacagagttcttcaaaccattgtttctgatatacagctacctccagctatagatgaatcttataaatatattaaaggagcaattcaagcttatcctgaactatattttgcgaagttagtagttctaggtgaaggcgacagtgaggaactgctattaccaaagttttttgatttacttgggaaagaggtagatagctctcagatttcaattgtccctttagggggcagacatgtcaactatttttggaaattattgaatgctctcagaattcctcatattaccttgttggattttgataatgagagatacggaggtggttggggaagaataaaatacatttctcaacatctgtatgagctgaacacagagtttcaagaatggttccatactcagagacttgattttaatgaaattgggtcacgaggttgtgaatcgataggagctcaacgtctgattaattggtttaataaactcgaagaatttaatgtctacttttcatcgcctttagatattgatttcttgatgctacaacattataaagacaattatctgaatactttatccccaatagaaggaccagttgtttcatataatgattcggatggaagtagtaaaaaagtgaaattgagtgatttagactgtcttgatagattgcagttagaaggtttcaacaaacgtaaagaggaagcaataagagctactttaaaagataagagtggacatggcgatagtttcaatgaagaagaaaaagaattaatgatttggtatcaatatttctttttaggtagaggaaaaccaacaactcatatgcaatttttatcatctattagtgatgatgaattaacaagaaatctaccccctgtatttgaaaaaatagttaacagtgctgaagaattacttggagatattcaacatggtaaagagtga

SEQ ID NO: 71979 - DNA, 1818 bp, Streptococcus pneumoniae 670-6B
atggtaaagagtgaggagtggtttcctaaaggagatatcattttagaagagactgcattaggagccgtcaaagatgtgactaactgtttagtcattgctggaccaggtgctgggaaaactgaattactagctcaaaagttagactatctattctctacaaataaatgcgtttctccgaaaaaaattctagcattaagtttcaaaacggatgctgcatcaaatttgaaagaaagagttaagaaacgttatggtgatgaatatgcttctcgttttacctcattaacctattcggcttttgaaaagagaattttagaccaatttagagatgttctacctgaggatatacgaccatcaagagattatttgattgaagattggtatactataaaagaactactctctatgaatggaattaatgttaatggatggagaatgtcagatataagaagatatgtcgaaaacatcatacttaacaatggggataatcacaagtttaaaactgacttactaaaaggaacacaagataataagccggtcctcttgtataggcaaataacaaagttgagtactcaaataatagatactaacgaatacatccgtaaagcacttcaaatgacatacgattttgtatttctagatgaatttcaggatactacatatgcccagtatgatttattaaaaacttgttttttaggttcgtcttgtaaattaacagcagttggagatgataagcaagccattatgagatgggcaggtgcaaagcctgatatttttccagactatattcgagactttaatccaaatgaatatcaattgttgatgaatcaccgctctgtacctaagcttgtagaatttcaaaaagaggttcatcagatattaaatagtaatcacagttctattcagacaaataattatccagaatttcaagagggtgaaataacattatttgaatttgaaaatgaaagtttagaagctaagttaattgcaaatgatatagaattaaaaattcaaggaggtatacgaccatcagaaatttgtatcctagcaaaacaaaaggttggtatttatagtttcgaattgatatctatattaaatagcaaagggattaaagcaagaattgaaaatgaatatcaggatattttaaaagatcctacgtgtaacctattattagatttaatatcatgcagtcaaggaaaacgagatcctttaatttgggaaaatattagtaatttttatggaaatatcaatggaatagatgagttaactgatgaattaattttagcaaaatcctataaggagattgacaatatagttagtgatattacttacctaatttcaaattttattcccaatgaagaaagtatgctaaaattaattgattgtattattgaaaaaatagatgaaaaaagaattatttccaatttttcaacatacaatggaaaaagtgacctagatatcattgtcaagaacttttcaaagttattatacatagaatattctcaaacacaaggtgaatggctagatacagtctctagtttcaagggtgaaaactcaattccaattatgactatccataagagtaaaggattagaatatgaggtagtctattttctaggcttggaggattctgcattctggagttttaataatcagccggaagaagataaaagtgcattctttgtcgcactttcaagagcaaaaagtcacttaatattcacatattgtaaattgagaaataatagtccgcaaaataatagaaatattaatgagatatattcattgctgactcaatccaatttagttgatgttattaattaa

SEQ ID NO: 71980 - DNA, 1731 bp, Cyanothece sp. PCC 7822
atgaaaataataaacctcaaaatccagaactatagaaaccttgatggtgttgaacttatttttcatccagatattaactttattattggagaaaataatttaggtaaatcaaatttacttaaacttctcaatatactttttaatcaacagcgttttaaggaagatgatttttataattctgatagagctatagaagtagaattttctttagagcttgaaaccctggaaatagggatgtttaatgatttatttgatcctgaaaatagtcatattttaaatatagtagcagttcaagagtctgtggatgataatcttgaatttaaacataaagaatcaggtagttttattccaagggctgacttgaaatgtattaactatattgattatgattcactcagaaacccttcttctgagcttaaatttgataaaataaaaggtgctggaaagtttttaaactatattgtctttaaatatttagaaaatagtcaaactcaagatctagattttatagacaagtctaaaataaatgaattgttgttagaagtaactggaaatttgcaaaaaattaagccgtttaaagatttttttatagaagctattttagaaaacaatcaagaaaatttactaactaaattaattattctagccgatgatcaaaaacgacgattagaaaatctgagttatggagttcagttttatagccttattccacttgcattactagaaaaactgttatctttgaataataaaaaaaattttaaaaaatgtatttttgaagatgaatcaacagccgaaaaatgtttacctatactaatagggttggatgaaccagaaattcatttacatccttatgctcaaagagcattagtgaaataccttaaaaaaatagtaattaatgaagacaaagatttttctgagctactaagaactttattttctatagacagactcctaggtcaaataataattgtttctcattcccctagtattttattagatgattacaaaaaaattattagattttatgtggatataaatgataaaaaattaacggtaaaaagtggaaaagagattgttttagagaaaaagacagaaaagcaattactaagaaatttaccttatattaaggaggcttttttttccaaagtggtaattttagtagaaggtgatagtgaacttggtgcttttcctgttttcgttcaaaaaatgaacataaatttagatgaattaggaattagtataattaaagcaggaagtccacactcaatagtgcctttaatgaatttgttaaagaaatttggtattcttagtgttgggataatggattctgatcaaaaaaaaatttatgaaagtaaaaagattgaaaatttattttttacagaattagaggattttgaagatgagatatttaatagcttggatcttttagattatatattatatgttgagtccgaaactccaaaaaaacttaagtttatggtgcaaaaggctcaacagttagtatcaactactatagaccataacaagtcgttatattctcagtttaaaaatcttaatcaagagcaaattaaaaaactaaaattcgagtcaaaggaagaaatattaaaaatcctacgtaacactaaaactattattaatggtagatatctagctgaacagctggatgaaataccacaaatatatcaaactgttatcaaaacagcagaggaactatcaaactatgttaagtaa

SEQ ID NO: 71981 - DNA, 1809 bp, Cyanothece sp. PCC 7822
atgttaagtaagttcgagccatcggaaatagaagaaaaaattaaagctttacattgtaatgatgagaaacaacttgaagttattttctcacaagccaaaaaactcattgttgaagctccagcaggttatggaaaaacaaaaacaatgatcagtaaaatagcttatatgctggctagtaatcaagttaaaaatcccaagaaaattcttgctttaacatttagtgtcaatgcagcttacaaaataaaaaaagatgttgcagaacaactccccaaacttcttcaaacaaaagaatcttattttataaaacatcaagacaacttatttatttccaattatcatggcttttgccggcatattttaaaattatatggttatttattacatgaaactttaagaaatatagatactctaaaaacttttgatgactctaaacaagaggatttgaatcaaattacaaagttaggatatgatcagtacaaaatatttatagattataataaagcagtaaaagattgtaatgaaacatatattgaaaaaaattttgagacttatgttagagaagtaaaagaaaaaattttaaatcgtcaatatattcctttcaatgcaataatattattgattctagaattatttaggaaatatcctaacatactagaattttataaaaattatttcccgaccgtaatagttgatgaatttcaagacactaatattttaagttggacactactaaaaaaaataatatctaatgattcaagagtgatttttattggagatagtttgcaacgaatatatggctttataggcgctattcctaagctaatgcgtgaagcagaagtaaaatataacatggaaattattactttgactaaaaattatagatttaaagacaatccagaaatgctgcaattagataaaaatcttaggctaaatgcagaaaatatccaaaaccctactattgataaaaatgctgaaattatatttttcaatttaaccaatcaattagaagaggcaaaaaagattatagatataattaaggatttacaaaataatcatttagctgattcctgtaaaattgcacttttagtaaaaaatagaggtaaaaatattgataaaatactaaaggttttgcaagaaaataaaatagcttacttttatggtttatttagtgatgaagaatatgattatttaaaatttcataaagaatgctctttactatttattgaacatcttaaaaaagttcatgtaatttcacaaaaaactttaagcaagctttatgatactatttctgaatctatttttttaaaagaaaataaagaaaaattaaccttgcaatctttgatgaaattattaaaagtatttttttatcgtatcaatactgaatataatttcttaagttttgaagataaaataattttcattagagatacttttgaaaataatgctcttaagcaaaatatggaataccttgatgaaaatgtcattgtagcaactattcatggagctaaaggacttgagtgggactatgtgattatgccggatatggaacaatactctaatccaagttttcagggattatgcaagaattgtaattacagaaataataattgcaatattcaaatagaccctaataatgaaacaaagtttttagaagagttaagtgtattttatgtaggagtaactagagcaagaaggcaaattttcttttcagctagtaacactcgtataaattaccaagctgttgaaaagtctgcaaatattagttgtcttctaaagctccctggaattaaactaaataatgataattaa

SEQ ID NO: 71982 - DNA, 2190 bp, Enterococcus faecalis TX0027
atgtttatatctactcttcaaattcgaaattttagaaattatgaatccgaaatctttcgattcgataatgagacaaatactattataggtgagaatgattcagggaaaaccaatgctcttactgcattgagaatcttattagatgatagttattactatagtagtaaaacactgaaagaatcagatttttttcatggaattcaaaatgggtggcaagggcattggattattatctctgcgacatttgaaggaatcagcgaagaagaatttgacaatgagatttgtgcttccatttctttaaattctgaaagtcaaacaatcttagaagaattgatttcaaatgcagataaaggtgtaggtagtatttctctatttattagacctaacaaagctattagaaagcaattatttgatatttccactgaattagactctcatcaatttaacgaatttagaaattctattcgtctatccgactatgaattttactacacatctaaatcaaatctaaatttctgtatcaatgaaaattatgataaattggtaggaagactcaatgacaatatagctagtaatcctgaagaagacgatgaagctcttttgggctcaagaattgacatgtcagatattttcaagcatatttcggttgtttatgttgacgctcttcgagatgttcttagagaaatgaaaaacaatcgaaaccctgtcaaaagaatcatggaaacaattgaatcaaaaatatcatcagataatgttgagtcattaaaaacaattatacagcaattaaatgagactattaccagtgttcctgaaattaggaaaattggcgaaaatattaatcggcaactaaatagcataattggttcagtgtattctcctaatcttcttctttcctcaactatgtcagatgatatgggttctttagcaaaatttctttcaatgaagccagaacaaaatatcgacttagacttactagggttaggacatctaaatatgatttatttagctttgaaaatagtcgaatttgaagcgtgtcgttcaagagaactacttaatattatgttgattgaagaaccagaagctcatattcatcatcatattcaaaaaactctgttcgaaggattaaatcttcaaaaaaactatactcagattctcatgaccacacattctgtacatttagctgaagtgtctgaaatatctcggatgaatgtattaaaatcgtttaatggcaaatctatcgttatgaatccagcaaataatctgaactcatttgctaaagaaaagttaaaaaagaacaatctaaatctaataaacgcagtagagagatatttagatgttaaaagaaatggattgcttttttctaaaggtgttatcttagttgaaggagatgctgaagaaatacttattcctcaaatagtaaaaaaattatttggtataaacttagacgaacttggaataggtttgattaatgttggtagtacttcgtttgaatatatcgctagcttgtttgacgatgatagaatacagagaaagtgtgctattgtaactgatttagatgaacaggcaatcccatcagaacatcgattgtataaaagcactgcacaagagaaaggtcaagcaagaaaagaaaaattatcctccctttttaatgaaaacaattgggttaattgtttttatgctaatacaacatttgaaattgagtttttagatgtgaataaagaaaatattctaacttatgtcagtccaattatagatgacgcattcaaagataaaaaaacaataactgcttataaagaagaaatacaaagtgaacaatatttagaaagaaatttagcgatgttaaaactagccaatcatgttggtaaggggtggtttgcaattgagttaggtgaaaaaattgactttttaatcaaaattcctaagtatattcttaatgctattgcttttgcatgtcaggaaatagtagatctctcaatttataaaaaaattctactccatacaatcgacttgtacgaggaaactacagaattgtcagctttatcagctagtttaaaaacaagtgatacagctgatttgaatatagcaataatttctttattagagtactttggtaaagatgaggatgttgtgtatctaatcaatcagatagaaaattacacaaaaatactttatgctgaggtttcaaaatga

SEQ ID NO: 71983 - DNA, 1794 bp, Enterococcus faecalis TX0027
atgacaaatatcttcgaaaaaatcgtaaatgatttaaatttagaacaaaaagatgttgtggaaagtgaagataacctttatgtaaatgcatgtcctgggagtgggaaaacaagggtacttacaaggaaaattgcttaccaagcaattaaacacgatggatcactaaaaagaataattgctatcacatacactaatagagctgctgaagaaattaaggaacgcctaagtttacttagtatagatgatgatattaatatttgggtggggacaatacatcagttttgtcttgaatttattatttatccttttaaaatgaatctctcaagagtatcaaaaggatttacaattattgatgattatactcaaagagcttacgtcagccaaattaataatatgctgaatttaaatctcaaaacgtatgaactgaacaaaattgatttgtcactttctcatgattttaaaattaatgaagttcagtatactcaagtttctgaaatgtatcacactatgttggaaaaaaataaagaaattgattttgatatgattttactagtagcgtataaaattttaactgtaaacagtaacgttgcacgtaatattgctagtaatataagggcgatttatgtggatgaatttcaagatactagagaattacaatacaatgtaatagctaaattacttcaaaacaaccctcaaattcagtcaatgtttgttggagatattgaccaagcaatttatggatcattagatggtatagctaaatcagttgaagaactagaaatgctaactagtcacacttttcaatcaaagacgctacatggctgttacaggtctaatcagagattagtagacttctactctaattttcagagttgtccttacgagattgaaagcagagggaataataaaaacgaccgtggttttataagttatgattgcaaagttactaaggaggatttacccaacataataaaaaatataataaaggaaaagattgaaagcggcattcatgaaaaagatatttgtgtacttgctcctcaacactgtcctctgttttcactgggtgagtatttaaagaaagaattaccgtattgcaattttgatgctataaatatatcaccaattaaggtaaataatcatagtttatttttcaagttagcaattttgtactttactgaatcaggtgaaaaggttcgaagaagaaagctaattgcaaacgatattttaattatattaaaaaatgaatttggaatagaagttaaagattattttattgacttagatttattacagctaataaacagtgtgaaaagaatgtatagtggagacgacaacggtgttgatttatacaaatttgttaccaaacatatatttgttaatcttaatattgacgagaaaaattacccgtctatttttaagcactatctattttttattaacgaagtagaagatcggataaaaaataattcattatctagtagtgtatctagttttaagaagatgtttaaatctcgagatggtatcacacttactacagcacataaagttaaaggaaatgagtatgatactgttatcgctattaatcttctaaacgggaaaattcctcattggaatgaaatttttaatgtttctgataaaggaattagttcagcgagaaaactactatacgtaatttgttcaagagcaaaaaataatttatttcttttctcagaggtgggttattttacgagtaaaggagacttgctttatcccactcaattattagataaaatagaatttgattataatatttaa

SEQ ID NO: 71984 - DNA, 1701 bp, Escherichia coli W
ttggaaatatcatctctgaaacttaaaggttttagaaattttaaagatgcatacatcaattttaattcgaacactctgatcatcggagctaatgatgttggcaaaagtaatatgctgcattcgctaagaatgctattagataaaagtatctcagattcagaaattgaaccaaatgaacttgattttcatttagaaaatggaaattcatgtgaagaatttgaaattattattcattttaaaaatatcaatgaagatgcagtactttctattttgaaagggaatgtcagtgactcaggtgaatcgttcattaagtatttcgcacaaaaatcggatctcagctataaactttttattggtgattctttagagtctttacaagaaatcaattctcgctattatcttaaatttgttaatttaaaatatattcagtctcaacgagatttagagagatttattcgaaaagaaaaaagacaactcttaaaaatcgcacagcaatcactgaactctgatgaaagagaagaagatgattatttattaggagagataagttcagatttacagttaattaatgataagatatctcagcttatatatgtagaaagagcaacaaaagaagtcaacgatgaacttaaaaaacttgcacatcattactctgaatattctgttcagttagatactggagccattggaataaatgactttattgataacctacaacttggagctaatacaaatggttctaacgtaatgcttggaggagacggacgaaataatcaaatcttattagcattatggaaagcgaaaagtattaaggaacatgatgtcgataacgaagttatcttctatgttatcgaagaacctgaagcacacctacaccctcatcaacaaagaaaattagctgattatttgatagctgaacttccaggtcaaacaatcatttcatcccactccccacaaatagcggtaaacttcgagccagattcaataataagattgcttgaccggggggggcacactgtagccgcaagtgaaggatgctcgaaaggtatttcagatggctgggaagatatgagctatcggatgagtatattgccagcagaatcattcttttcaaatggtgttttcttaatcgaagggccatccgaaattttattttaccattccttggctaaaagtttaaatattgatctggattatttgaatatttcattaatttcagtggatggaatatcatttaaaatatatgcagcaatacttgatgctttagaaattccatgggtaatgcgaactgataacgatatatcaaagctaaaaggtcaagagaagtggaactatgcaggtataaaccgatgtttagatatagttggtatcgaaaagtttgagcatagcgataaaaaaataacatctctagatactcttaccaacggtgactggcaaacagtatctgaggtaataaataaatcgggagtatatttgtcaaaaattgatttagaaaccgaccttgtcgaggaattgagtgctccaatattagatgcgttagataaaaaagataatcaaagtgcaattgaatacttacaaaagaaaaaagcaataagaatgcgtatacttctaaaaaaaatcaaaaaagaccttcataaacttaatgcgggtgatttggttaaaccgttaaaccatcttgtaaaaatagttaaaggtgaatga

SEQ ID NO: 71985 - DNA, 1626 bp, Escherichia coli W
atgagcattttttcaccaaccactcagcaaagattagccattgattaccctaaaagcatggtaataacagcatgccctggtagcggtaaaactacagttataaaagagaaaattagaaatattaccggttgtcttccggagcataaaggagtcattgctattactttcacaaggaaagcaagttcagaactggagcgcagatgtaaagccgatgggcacgatataaaacatagtttttttggtacgattgatagcttttgcttaaaggaaataatcattccatttcttcccagaatatggggtggtaaaccaacagaatgtaaagtacttaaaaagctagattctccttataaatattacttagaggagcatttttttggaataccatcagtcgttaatgtcaatgaagatcccggctataagagactgtacgatgagggaatgctgtggatgagttcatttgctgccttagctttaaaaatacttaatgaatctcctgcagcaacgcgatatatcaaagcaaggtatagccatatatttatagatgaatatcaagattcatctttatctcagcatcaattatttctaaaaataaatgaacttggtttatgctctattgctgttggtgatgtttggcaatcaatttatgagtttcgaggcggaaatgctgaactgttacttgacttagttagagataagcaggtatttgcacattttgaaataaatttaaatcataggtgtcatccatcaataattaattatgcatctaggctactcgatccaaacttcgtgttattaccaagcgaaaatataaatgtttacagaaagagattatctgggaacctaaaagatgtttcgatgacaatatcatcatggatttcaaaatggttaaatgaaggaaaatgggggttggagcatgctaaccaaatagctatttttgcaagaaaagagcaatcattactattattatgctcaggattaacatcaacttttagagtttatattgatacgccattagataaattgggcacagaatgttcagatttatataaagaccttctagcgtataggtataaggctataggcactgcgcaagaattaattgataaagtatttgatggcttgattataaatgacaatcagcagtttttattaagaaaaaaaattaaatccctcagggctaaattaacagatgaggaactaattaataagctccacgaaatcgctgaaatgctaaatattcagttttctatatctaatgataatgcagttttggatattatatcagacgatatttacttaaaacagtttatgccatcagataaaaatgaagttcaagtaatgacacttcacaagtctaaaggacttgaatttaaaatagtattgcatttggatatggatgaatggtcttttccatatagaacagtgaatgaagttgatagaaacacagcactatatcctagccttccgcaagaaacaaaccttcattatgttggtattacaagagctgagaaatgctgcgtattaattaatgcagagttacgccaaaactcgactggagcatttaagaagtctgaggcatcttactttttcaagttgccccaactagagggtctttatcgttag

SEQ ID NO: 71986 - DNA, 2028 bp, Sinorhizobium meliloti AK83
atgcaattgcataagatttcagtaaagaactttcggctgttgcacgatgttgaagtgctactcgagccacgaacgacggtgatcgtgggccggaacaactgcggcaaaacctcacttaccgaggtcgttaaacggctgcttcacgacaagactgccgtcttccgcttggaggatttcgcgttctgctgccacaacaagttctgggaagcctttctggccttcaagaatgcagctgaagagcaggatgtccgcctgctgttgccgtcgatcgagatcaagctcacgttcacgtacggaccggctgatcccttgggcttgctgagcgaattcgtcatcgatcttgatccggactgttccgaagctgtcgttgtcggcagatatacgctcaaaccagctatgatgacttcccttttcgccggcctcgaggatacggaagcgacgggtaaggacgagttatttcggctgctgcgggagcgcattccgaacttgttcggactggacctattcgccgttgaccccaatgacgcgaccaacacaaaggcgatcgagttgtcgctgttgcggtcgctggcggccagcgggttcatcagcgcccagcgggggctggatgacgaaagtaaggaagatcgcgtcgtaatcgggaaggtactcgaaaacctgttcatgacggcgaaaaacaatccggcagacgccgcaagccatgaaatggcaaaagagctggaaggagcggtccacgagatccaggacaagatcggcacggacttcaattccaagctgaatgccctcatgcccgccctttccctgttcggccactacccaacggcgggggactctacgctccttaccgagacgacgcttaacgtggataagctcctgactaatcacacacgggtgcggtacagtggtgtgaacggcattcatctgcctgagacctacaatgggctgggcgcacgcaatatcatcctgatccttctgcagcttcgacagtttttcaaacagtacctggccatggagccgaaaccggcagttcaggtcgtcttcattgaagagcccgaagtccatctccacccgcagatgcaggaagtgttcatccggaagctatcggaaatcgcagatctcttcggagaggagcataagctcctgtggccggctcaattcgttgtttcgacccactcgtcacatgtcgccaatgaggcccgatttgacgccatccgctattttctggcgaaacttgacgcggaacatggatcactaaaaaccacgatcaaggaccttcgcaaaggcctcacagggaaggggacgccggaagaacaggagtttctgcatcagtatatgaccctgacccggtgcgatctcttcttcgcagataacgccattttgatcgagggtacgacggagcggcttttattgccgaagatcatcgaaatgatcgatgtgggccagcctgccggcaagaaattgaaaagccagtacctgtcgataatggaggttggcggcgcctacgcacatatctttttcgatttgttggactttctggaactccgtaccctgatcgtgaccgacctggacagtgttcggcaaaacgacgcgaagaaatgggtagggtgtcctgttcacctagggtcgaagacgagcaatgcctgcctgaaatcatggtttcatgcggaggtgacgcccgatcagctcctgctggtgcccgacgagtacaagatcgtggataagaagcggattgcttaccagattccggaagcggatggattggcgtgcgggcgaagcttcgaagatgcatttatgttggcgaacactgccttgtttcccctcgtgggaaccgaaacggaaaaggcgcagaccgcatgggataatgccaaggacgagaagaagtcagaattcgcgttacggcatgcgctgcgtgtggagaactggacggtgccacgctatatccgcgaaggcatcgtctggctggccgagcctgacacgcccccgctgatcgttgcggccgaagccgcgcctgcggacattgccgcatga

SEQ ID NO: 71987 - DNA, 1743 bp, Sinorhizobium meliloti AK83
atgatcgaccaaatgcctgacagccccgcccttattgccgcgcgcgaagccgatcttcaaatggaaaagtgcttgcgcgaaggaacgaatttcctcatcgaagctggcgctggagccggcaaaacgtattccctgattgaggctctgaagtttcttcttgatcacgaaggtccgcgccttcggagaggtagtcagaagattgcatgcatcacctacaccaacgtggctacggcggtcataggtcggcgcattgacaataatcctttggttttcgtcgaaacggtgcacgcgttctgctggtctcttgtgaaaagcttccagcctgcggtgcgacaggtcatttcggaaagtccggcgtggcaagagaagatcgccgcagccgggggcactatcgacgggcatgcagtggaatacgatctcggctttcggcgtatccgcgataatgtcgtgatgataagtcacgacgacgtcttgacgctcgcgggagcattgctaccgaaggaaaagtttcagaaactggtggccgccagatatccgtatattctcatagacgagtaccaggataccgattccgagatgatggacgcctttaaggtgaacctgttcggacgcgaaggcgggccgcagttcgggctgttcggagaccattggcagcaaatctatgacaaaacgtgcgggcacgtcgaacatcctcagctgacggccatcggcaaaggagcgaacttcagatcatccaccgccgtagtgggcgtcttgaatcggatgcggcctgaactgccccaagccgttgccgacgaaaacctcgtcggctccgccgtggcgttcttgaccaacacctgggtcggcgatcgccgcgaaggcgggcactggaaaggggatttgccggcagatgctgcccacacctatctccaggcgttcaagggctatctggaagccgaacacggctgggattttgcccccgctaacacgaaagtactgatgctgacgcacaacgtgctagcggcggaacaggggtattcccagatcgcgggcctgttcaaatatacggatgatttcatcaagcttcaggacgactatatggcgttcttcggggaatccgtcgagcctgcctgccaagcgtacgctgcgcggcggtacggggacttttaccggttgatgggaacagcggtgcctgtaccgtcccaacgcgccgagaagctgtcgatcgcatccgccatcgacgggctgatcgaactacgcactaccgggacgatcggcgatgtcatcgaccatatccagggtaatgcctaccttcggctccccgacaaggtggcaaagcgggaacgcgacgcactcatctgggagggcgaaggcgatccccccgaccggatccaaatcgccaggggccttcgcgagattccctatcgggagatcatcgcgctgttgcagttcatcgagggaaatactcccttcgcgaccaagcacagcgtcaagggcgacgagttcgaaaacgtgttggtggttctgggaagaggttggaacaaatatgattttggcacctatcttgaatgggtggcaaatccgggggcggttccagcgaataagcaggccgcattcgaacggaaccgcaatctgctctatgttgcctgctcacgcccaaaaacgcggctggcgcttctgtttactcaagctctttcggacactgccgtaagaacgttgaagacttggtttggtgctgacatggtggaagaatttacgccataa

SEQ ID NO: 71988 - DNA, 1701 bp, Escherichia coli KO11FL; identical to SEQ ID NO: 71984

SEQ ID NO: 71989 - DNA, 1626 bp, Escherichia coli KO11FL; identical to SEQ ID NO: 71985

SEQ ID NO: 71990 - DNA, 2103 bp, Enterococcus faecalis DAPTO 516
atgtttatttcagaacttgaaattgaaaattttagaggttttaattataaaactaaaattctactaaataatagtatcaatgtcttaataggacaaaataattctggaaagactactataataaaagcaatggagcttttatttagtgatggatctaagaaaaaattgtctgtaggtgatttctataagaatatcacaatagatgatataaaggctttgccacccaaaattgtgatatctgctaaactgactgaatctgaagatgatgaagaatactcagatgatttaattactgtttcaacttggttaactaaaattgaaaaaccttatgaagcaagaataacttatgagtattatttaccagaaaaatatattgatgaatataaaaaaataatgaatactgtgaatagcaatgaaattgaagactattggaacgaaattgagcatagctttattcctaaatttaagtatcatatactaattggggacccaaaatataaaaatacaatagatgctgaatcgctgaagacatttgattttcaatttttaaaagcagttagagatgtggaaagggatatgtatagaggcaataattcattacttaaggaagtaattgatttttttattgattatgacgtgaaaaataatcaagatttgacttcagacgagatgctaactcaaattagaaaaaataaaagagagttttcaaaaaaggcttctggtttaataaatgacctccagaaaagaatgaaatctggaaaaaaagaaatgctgaaatatgcaactcaaactggtgctacatttgagaaattaacaccaacttttgaagggaagatattagatactgagctttactctgctttaaaattgattgttgaaagcgagaccggtatcaaaataccagctgctcaaaatggtttaggatacaataatttaatctatatatcactattgctagcaaaaatgcaaaaaaatgcttcaggcacctattttggagtgaacgctaaaaattattctatacttgcaattgaagaaccagaagctcatctacatcctacaatgcagtataagctattaaaatttttgaatctaaatagtgagaaagaagtaagacaagtcttcgttacttctcattccccgaacataacagcagcagttgatctcaatagtttaatcgtggtagagaataggggagataggattgaagtttcatatccaggtaaagcttttaatggctctcaagaagatatagagtcaaaaatgtttgtagaaagatttttggatgtaactcgttctgatatgttttttgccaaaaaattagtgtttgttgaaggtctagctgagcaattacttgttccagaatttgcagatatgctagataaaaatttagttgacagccatgtttctgttattaatttaaatggtagatattttaatcacttcttaaaactttttgactcaactaaatcaaaatttgctatgaaaaaaaagattgcctgtatcaccgatatagatcctgttagaaagttgaaagatgatgaagatagtaaagctgcttggaaaaaatgtcatccgatttttttatatcaagattcaaatgtatatgaatataaagcctattccaacctaatgcttgaaagtgctcaaaatttgagtgataatatcgaatttttttctcaaccgctgttcatcagttcgactctagagtatcaattgatattagacaactctacgtgtgaggagttaataacggatagtgtaattaataaaaaagaattgaagaatttgatagaaaaatatagtgaagtaggaagtatagaactaaaagactttgtagcattattaggctctaatactactaataacgaaataaaaaaaatttataaggaccatcacttcaataaagaagagtttatgaaacatataatagcaactagatatttagaatcaatatccaaaggtgtagttgctcaagaactggcaataaaaataatgatgataaatcaaaaaaacaatgaacctggagaaggagaggagcagatagtattaaatgtcccagaatatattaaggaggcaattcattggatacatcaacagaattaa

SEQ ID NO: 71991 - DNA, 1722 bp, Enterococcus faecalis DAPTO 516
ttggatacatcaacagaattaataactagcaaaagtttacttccgatagatagccatctaaaaataagtgcagggcctggtgcaggtaagacaactcttttagcgaatcatgtaatagaagttataaaaaattccgaaaaaatttcagaattaagacgagtagcatgtataacatatacgaacattgctgctgaaacattaaaaagaagattaggactatccttagattatgtagagatcgggacgattcacaactttttatacaaacatattgtaaaaccttatttatggatattatccgaggactatactttcgattttgaaaaaataaaaggacatgatgatattatacctagttactctatattgagtgaatgggcgactgtaacaaagcaatttaatttgattaatagtgaaaatctaaatgaaacatcacaaaaaatacaaaagataacttggaaactagatactaacgaaaatccaattctttgttttccggaagtatggcagggaaaagtgggcaaatattctattaaaaaaaattcattaatggattacaaaaaaatttgttgggcaaaaggaatgattcatcatgatgatgtcatatttctcagtttaaaaatattagaaaaaaactgtaggattgtcgatattataagagcaaaatttccctatattatgatagatgaatttcaagatacaagttcaatacaaaataacataatgaagcagattgcagataaagaaaccattgtaggtgttattggagatgaatgtcaatcaatatatgaatttgcaggagctaatgtagaggaattcataaattttgatatcaatgatttaagacaatataagatggaagaaaacaatagaagtactgttgaaataattaatttgctgaaccatgtaagtagagatgccagtttgaaacaattttctccaaaagaaaagagaggtgaaaaaccgaccttatttattggaaatatgcatacagcatatcaacaagcaaaatctgttgttcttgatagtcccttattagtactgacatatcgaaaagataatccaaaccagttgaaatatggagttgaagatgtagacagtgaggaattaaagcttagtttattatttgaagatgatgatagaggtagaaaactgtattatgtaattcaaagtattgaatatggaaaagaaggtagatttaaggaagcgataagttctatgttaaaagcttatcgtaaggaaaaagaatttactgatagagatagtttaaaaaatttgcagagattaataaacaattattcggctattcaaagtttatcattattggagttttacaataaatttatttttggttttttttatactcagaaaaaaataactagagggaagaaaaaggatttttattctaacatcttatatagagatattgcttgtactgtagatttgaatgaaacaaggagcttatttagaacaattcacaagtcaaaaggtgacgaggaacagaatgttatgttggttattgataataaagacaattttaatgaagaaaaagagttgcaatttttattagatccagcaataaatgataatgaagatcatcgtgtctatttcgtcgctattagcagagcaaaagaaaatctctttatcaatataccagctttatctgaaaaaaatagtattaagctggaaaaattggatatattcaacatagtatatgtctga

SEQ ID NO: 71992 - DNA, 2103 bp, Enterococcus faecalis DAPTO 512; identical to SEQ ID NO: 71990

SEQ ID NO: 71993 - DNA, 1722 bp, Enterococcus faecalis DAPTO 512; identical to SEQ ID NO: 71991

SEQ ID NO: 71994 - DNA, 2265 bp, Escherichia coli UM146
atgaaaataaatttcattgaaattaagaattttagaaagttgaagtctgtccgcatagatattgcagaaaaaaccactctctttgttggtgctaacaatagcggtaaaacggctgcaatggaggccttaggacatttcctcgttgatgcctcgcggtttagcgtaaatgatttgacactttgcaattgggcaaaaataaaagatatcactgaacaatggttaactgaggaaaatatagaccttgctaaatcacaggaagctttctcagatctttttccttgcatggatatttggatcgaagcgaaagaaaatgagctccaatatgtcaatcatatactaccaacgttagagtggaatggaggtttaattggagtaagactgagatatgaacccaagaaatttgatgttttctttgaggacttcatatcttcccgccaaaattcattagatatacacgaccgaatttctgagcggattgataaagaaaattacacaatagcattgtggcctaaagatatttatgaatatctttcaagaaagttgaactcaatgtttacaatcaagtgttatagcttagatccttcgaaattagaatcatctgataatggaatagccaaaccccaaagaatagacagtcagcaaacattacttgatggcatacctctcaaagatctaataagaattgatgagatcaatgcacaacgtggctttggaagcccctctgctgccgacaaagagaatagcaaattaaacacacagttgagagattattattcgaaacatcttaacccaatagaaagccctgaactatcagatatcgaagctctacaagccattcgtgatgctcaggatacatttgatgaaagattaaaaaactgtttctctcaagccataaaagaagttgaaggcctcaactatccaggagtaactgatcctaaactaaaaatctctacaaaaatagaaccaattgatggcttaaatcacgactcagcagttcaatatgagttaactaatgctctaagcaatgtatctttagactatttaagattgccagagagttacaatggactaggttatcaaaacttaatctcaattgcatttagactaatggggttcagagatagttggatgaaagttggcaaagctacaaataaaaaattagcagacgacaatcaagaggattttccagcccccctgcatttggttttgattgaagaacctgaagctcacttgcatgcacaagtgcaacaaatcttcattaggaaagcatatgatatattgaggaatcataataatttaggcgataaagaagagcttcatacacaactcattataagcacacattcgagccatattgcccacgagtgtaaattttcttctttacgatactttagaagaattcctgcttgtaaagaacatgagatccctgtatcaacagtaatcaatctttccaatgtttttggtgtaaatgatgatacggaaaaatttgtaataagataccttaaggcaacacattgtgatttattctttgcagatgcagtaattcttgttgaaggcccagccgagaggattttagttcctcacttaattagaagacactaccctttcttaaatcaaagctacattaccttattagagattggtggtagccatgcccatcgactaaagaatctgattgttagtttgaatcttttaactctaattattacggatttagaccctaaggattcacaagatggcaaggttaagccctctaaaaaagacagcggtttcgttacaagtaatacaacgcttgcaagttgggttccagaagttaccggtgtcgatgaattgtataaactcacggaagataagaaagaaaagaaatataatgatttcttttatgtttactcagcttttcagattcctgttttggctgcattcaaaggtgttaaccaagaatttttaccaaacacgttcgaagactcattagtctacaataatctagattttttcagtaatcttactggtaatggtttagtgaagaaattcaaagcatcaattactaattgcaaaaatgcagaggaatttggagaggaatcatttttacacttatctaaaggtaataaagctgaatttgcattagatatactttaccatgacgaaagcgataaattaaatacacctaattatataagtaatggtctaaagtggctcgaagaaaagataaaaataaaacaattagagcttgtttctgatttagccagtgatggagaaaacaaatga

SEQ ID NO: 71995 - DNA, 1839 bp, Escherichia coli UM146
atgactatcaaacaaactgaggaaatattagattctaatatacataattacttaacgggcactcaaaagcatagtttccttctttatgctggagctggctctggtaaaaccaggactttagttaatgttctggaaatgatattgaagagtcactcagaagagttcaggctaagagggaaaagaatagccgtgataacatacaccaatgcggcttgtgatgaaataaaaagaagagttaaattcaacaaattaatagatgtgtctacaattcatagtttcctatgggagctaatcaggcatcactccagtgatataaaatcttggttaatggaaaacattgctgcggagatagctgatttaagggacaaacaaagcagaacaactagagtttcacaagcttctttagaaagagaaagaaagatagtttccaaagaaaaacgtctgcaaaacttatcagatgtatataaattcacatacaaccctaccggggataataggactaaagactctctaaatcattcagaagtcattaaactcggttcttattttctagatagaaaatatactatgcagaaaatattggttaatcgccatccaattcttttaattgatgaaagccaagatactaacaaactgctaatgaatgcattactcgaagttgagaaaaataacagagatacattctcggtgggtctgttaggggacatgatgcaaaggatatactctgatggtaaaagtgatttagaggcatgccttgacgaacactggaaaaaacctgaaaaaagcattaactatcgttctccaaaaagagtggttgctttaattaatttaattagaagtcaagtggataatcataaacaaaaggccagagaagatgccgaggaaggatatgtaagaatttttataaaagaatgtcattctgataataaagatagagatgaatcgtttgtaaaaaaaagaatgagagaaattactttagatgatgattgggaaaaccatgattcattagtaaacaccctaatattagaacatcatatggccgcaacacgtatgggctttatagacatgttcactcctctctatcaaattgagcgattaaaaactgggcttttagagggctctctgggtaatataaatttcatttgtggaattgtttcaccattaatatccgcctgtattaaaaatgatacttttactatcactaacattttacgaacaaatgcacccttattaaaaagagaacatcttttaaaaaacacaaataatacctcgccacttacacagatcagaaactctcttgatatgttaaagagttttatttctacaaaccccgaacttatcacaattaatttactacataagataaatgaaataaaattacttgacgtcccagattctatacaagaaatcctagaaagtaacgataactcacaagatgatatcattgaagcttggcagaaagcgtttagctctcctttatgtcaatttgataaatattataattatgtcaaaggcaagacaaacatcgatactcatcagggagttaaaggtctagaatttcctcgtgttctagttttaattgatgattctgaggctaaaggttttatgtttagttatgacaaacttttcggtgttaaagaaaaaaccaaaactgatttagataatgagaaagaaggtaaagatactagtgaagacagaactagaagactattttacgtcacatgtagtcgagcacaaaaaagcctcgccattcttgcttatacagataatacagaaatgctaagaaaaaacctattacataaaggatggtttgattcgagtgaaatagaaataatttaa

SEQ ID NO: 71996 - DNA, 1695 bp, Pseudomonas aeruginosa 39016
gtgccggaagagcgccagctctggatagaggccgatttcctcttcccggagctggcggaagatgaagacaacagcaccgttgctcctcactttggccacatgcggcttgatgaggcggatggaattccgcgtgttcgttttcgcctcagtgccaccatgggcccggatggtgacatagaagagaccttggtttatgtcttggacatcaatgcggatggttcgccgctcaacacagcgcaagtgccccgttctgagcgcaaccatatccatgtccactacctgccagcccgccgtgacccagctgatcacattgcctacggcgccaatgcgttgctcgggcgcatgctgcgtgcggtgaactgggatgcagagcgtgatgttatcaagggtctcactgaccaaatcagcgacagtctggcggccaacccatcggtagatgcattcagcacaagcttgaaagcggcttgggatactttgcacaaaggcagtttctttaccgacccgaaaatcaccttcgtggcctctgaggtcgaagccttgttgaggcatatgtcggtttccttttcgcccgggcacgatgagcagttggttgacttctcacgtctgagtgatggccagaaatccatgctctacctgtccctcgtgctctcgtcacaggccattggtcgcgccgtactggctgaagaggacaaatcattcgatgtcgacaagttgcggccaccagtttttaccttggtggcagtcgaagaaccggagaacagcctttcgccccattacctcgggagaatcgttaattctctgaacttgatgacaggtaatggcgacgcgcaagcgctgattgctactcacgcgccgtcgatgctgcggcgcgttgctcccgaacggatccggtatctgcgtctgaccgaggggcgaacatcgcgcgttacccatatccagttgcccgataccgcggacgaagcacacaagtttgtgcgtgaggctgtgcaagcctttccggaagtctatttctcccgccttgtggttctgggggagggcgatagcgaagaaatcgtgcttcctcgactccttcaggccaaaggtgctcctgttgacgagtcggcagtctcgatagcgccgctgggcgggcgtcacgttaatcacttctggcgattactgtctgccctgaaaattccttacctgacgctgcttgatctggatgtcgcgcgccatcaggccggctggggtcgaatcaaatacgtgaatgatcaattgggtaaatatcggctagatcagcagcttcccaaggattatggcatcccaaagtgggactcgaccgagaatatggttcgggacttcgacaactatcttgaggcgcttgaggatagagatgtgtacttctcgtaccccatggacctcgatttcgcaatgctactcgcctacccggacgcctacggcgtagtgagagaaaagcccgatgagtcaacgatcaaggctgtccttgggaaaagtcaccacgatgcaagtcaatacagcgaggacgaacagaagttgttcggcacatatcaccgcagcttcaagcttggcagcaaaccggcagcgcatattgatgcgctcgccaagctcagtgatgagggcctgctcgcgaacatgcccgaatctctcggacgcttggccgatgccgtgatcgccaaactcgcggagttgcccgagtga

SEQ ID NO: 71997 - DNA, 1677 bp, Pseudomonas aeruginosa 39016
gtgataaccgtcgatgcatggaagcccgctgatggactaacgcttgagcctaacgcccttcgtgcagccaaggaacagatgcacagccttgctcttacagcaggcccaggtgcaggcaaaactgaaatgcttgcgcagcgtgcagatttccttctacgcacaggagcctgccgctatcccaaacgaattctggctatctcgttcaaggtggacgccagtagcaacctgaaagagcgggtaaagcgccgctgtggctctgagctggcctcgcggtttgacagctacacctttcacgcttttgccaagcgcattatcgaccgcttccggcccgtgctaacgggtgagtacgcgttggatgctgggtacaaaattgctgatcgaaaaccaggaccctcgcggagtctgatcgagtttgccgacctggttccgctggccatccagattcttcagaaatcagaaatggcacgtaatgccatccgccagacctacagcgatgtctttctggatgagttccaggactgcaccaatctgcagtacgagcttctgaaactcgcctttcaagacaccagcattcgccttaccgccgtgggcgataccaaacaaaagatcatgggctgggcgggtgctctggacggtatcttccaaaccttttcagccgattttgcagcgacaccgctgaacatgtaccgcaactttcgttcgaagccgcgcctgctgcgcctgcagaacgaaatcatccgggtgctcgaccctgcgtcagtcatgcccgatgagcagcttgtcggcgatgagggcgaggtattcgcttggcgcttcgaagacagccgtaaggaagctgagtatctagcggacttgattgatggctggataaagaccgaacagctaccgcccgcggaaatcgcgattctcatttccaaacagctcgatctttacgctgaccatctcatggtggcactggaggcgcgcggcattcctttccgcaatgagcagcagatgcaggacatcacggtcgagcccgccgcccgcttgatcgtggactatttatcttgcctctacggccaacgcgagccaaaagcctggattcggctaatgaatcaactggttcctttcgcggatgaggacattcagtcgaatgctcgcaaggatcttgatcgactaatcaagcaacaacggaaagaagcggctattgctgacctggtcgcggagccttcttctggctggtgggagtttgttcgagtcttcttgaagcaaatcagtctcgaaaccctcgtggcgctgtcgccggactatgagtcccatgaacggctcaaagaggtcgtccgaaacaccaggacgcgcatcgaagagttgctcaagctggagccagacttgcctaaagccctggagcgtttttcagacgaccaagcggtacgaattctgaccatccacaagagcaaaggtcttgagttcgattcggtcatcatcatggccgtcgaaaacgaaatcttctttggcaatcaggctgaaaaccgctgcgcatattttgtcggggtttcacgcgccaagaggcgactagttcttacccatgcagatcagagggagcgccctgctggctatacgaaacgttgggatacgcatcgttctgcccaaactgaatattttggctacgccataccgtttttgagccaacagcaatga

SEQ ID NO: 71998 - DNA, 1410 bp, Lactobacillus iners LactinV 01V1-a
atgcttaacagatatataaatgatcattatttatggatatatacaaatggtaaaaccgaaactaatattgattcaaaattggctaaaaaaatctttgatatacaatatattaatgcggaaagaacaggtactgatgttgctatagaaataaaaaaagatatcagttctttattaaaagatagcgaaaaaaagagagagtatgacgcacttatttcagaacttaatgataaattaaaagaacttcttgaaccatctattactaagatgtcaaatttatttaactacgaaaaaaatgagataggcttagaaaaaggcaatatttccataacttcccaaataaactcaaaactatccgcagaggattcctatataacagaggtaaaggatactaaatttaattataacttgccattagtatataatggcttgggatataataatctagttaatatatatatgtctattaaattgtcagatgtgaaaaaagggaaagattttaaaattttgtgtcttgaagagccagaggcacatttacatccagcaatgcaatacaaattgttcaaatttattagtaacttaaataaaagcaacaaattgaatcagcaggtttttgtaactacgcactcaagtaatataactgcggtgtctggtttagattcaatgtatataattcagtatgatagacaaggagaggtttcagattgttttcaacagagcttgaagcgccaattaacggataaagacgacagcacttttaaatcagatgctaaaaatcatttaaataaatttttagatgttactcgttctgatatgctgttcgcagacaaaataatactagttgaaggtattgctgaaaaaatactcttgccgatattcatggaaaaactaggttatccatatgaagatgaccatatatcaattgtagaaataggtggaaagcattttgaatattttatagaattatttaatggtaacccagtaaaaaagaaaattctttgtattaccgacaacgattttaaatggtttaatgatgatggagaaaattgtttgttcaaagaatacttagaatatgaagctccacatcttaaaaagttaataagccgttataagtttaatgaatttaaaatagtcactcaaataaaaggtggaagcacatttgaagacgagttatttatagaaaactttaaaaatgaagatattgtatcatccctatttgggttaccactaagtaatacaatgaaagaattttgcaaaaacaatggattttctataaatgattggattaaaaataaagaattaattgatggcaggagtattaaattaatatcgaagtacctggattgttataagaaaaaaatagaattagatccagagaatcaagagttttatgaaaaattgatttttttctaa

SEQ ID NO: 71999 - DNA, 1422 bp, Lactobacillus iners LactinV 01V1-a
atggttaaatcaataacttcaggatatatacttacaaaaaatgaattattgaatcatattaagatttatgcaggaccaggagccggtaaaactcattttattgtagaaaatataaagaatataatatcgacaaataaattaattactaattcagaaaacagaaagattttatgtataacttatacaaataaagctgtagatgaaatagctaacagacttcaaggatttaatgagtatattgaaattaatacaatacacggatttattattgaaaatattattaaaccatttcaaactgatctaataaacataatgaaaaatgattttaatataaaagtgtgcaatggaagtactattagttcacaagtggagggattgtcattattacatggtatagataaggaaaccatatataaatacattaacatagaaaaaaatacttcggattcctattcatatagtaaaatgaaaatgagtgaagtacaagtagatgtggataaatttataaatggtataagattaaataaagatttgaaatctagtttaactaatccaaagaatttttctgtggaagatattgttcctttaaaaaaatatatttggtctgaagtgagaaagcttacacatgatgaaattttgtatttcggatatcgaattattcaaacgaatccaatagctttatatacgttgcgagttaagtttccttttatttttgtagacgaatttcaagataccaatcctatacaaacagaaataataaaacttataggcagtaaatctacaaaaattataatagttggagatgttgcccaatctatttatagttttcaaggagctaaggtttctgattttttagagtttaatataaataatgaagttgaagagtactctattgatagtaatcgtagatcaacagaaaacattgtaaatttttgtaattttattagatgttcagacaaaaatatttttcaatcaagtataaggaaatataaagatgacaaaacaattattgaaaaaataagcataaaattcttactgggtagaagtgatgaagtaaaaagaacactttattctattttaaacgataatggagttatactggctcgtagttgggtagatgcatttaaatttattcagaatatagaagaaaatcaatctgttattctgaaaaaaatttataacagttattataacacaccaattatgattagagatgaaataataaaacataataatgtgatgtgggttaaagcttttaaaattatatttaacttgtgggaaggttataataataaatcttttggtgatattatattaacactgcaaaagtattttcaaatatctccatctaagatagaaataaatcatatatattcaatatacgaattttttaaaagaattatttatagatgtaagctctga

SEQ ID NO: 72000 - DNA, 2145 bp, Vibrio antiquarius; identical to SEQ ID NO: 71882

SEQ ID NO: 72001 - DNA, 1905 bp, Vibrio antiquarius; identical to SEQ ID NO: 71883

SEQ ID NO: 72002 - DNA, 1614 bp, Oceanicola batsensis HTCC2597
ttgagagcgcttctggccggaacagatgatccctatccgcgcttcagcgtcgatgacgttcaccttcctaaggggggctcggcagcgggtgatattgtcttcgattatatcttcaaagacctgtctctcgacgatgaagccgactttatgcatgggttaagggctgatggcatgggaaaggcggaagcccttctccgagtgacctatggcgatgcggataaatccggacggctgcggtcaagaaaaacctgcggcgtccatcacgacatcgcgatgacggcgaccatgctggaaaacctgcgcagcgtctatctacagcctctgcgcgatgcagagcttggcctccgcccgagccgttcaagccagttgtctcggttactgcaccttttgtctgatgacgctggaaaagatgagatcacccagaaactcgcagacctcgataaggatataaaggcgcttaaagcaattgttgagacgcaagacgccatcactgggcgccacaatagcatgctgggcgatcagctggcccagatgttggcggttgagcttagtggttctgatttcacgaagctcgcctcgcgcctatcgttactggtcgacagcttcgagatagaacgtaacggccttggctataacaaccttatcttcatggctgtggttttgagcgaactcgcgaagaacgcggattcggcctatcgcagcttgatcgtcgaagaacctgaagcgcacctacatccgcaattacaggccgtgctcttgcggtacctatcagacatcaaggtctcggaaggcgagcggcccgtgcaagtcttcgtcacaagtcactctccgaattttgctagcatcgccgatctgaacgccgtcgaatgcctggttgagacggattcaggtgtagaggtcttccatccgaggtcagtcagttttggcaagggcaagaaggagaagcttaggcgctacctcgatgtaacgcgcgcagaactctttttcgcacgccgtgtcatcttcgtcgaaggtgccgccgaactgatgatgatcaatctgctggccaagagcatgggctatgatttgcgagaccacggcgtcagcctgataagtgttgaaggattgaacttcgactccttcatgccactcttcggggaaacggccatcaagataccagttgccgtcatcacagacgctgatccatacaccgtcgacgccgatggcaaaaatcagcctcactatccatccgcaaccgagagcattacgatttcaagcaacacagcgtcgatgaaggagcgagaagacgaatttgtcaaagtcttccacggccagaagacctttgagtacgacttcgcgcttcacgaaaacaacagaatggccatgctcgcagccctcaaggacctgcatcctcagatcggcgatgaccttgaaactgagctcgcgtcgaagacggacgacagggacaaagcagaggcgctgttctcgggcatgttcgagcggcccaaaggtaaaaaaaatgttcagaagggtgcattcgcgcaagcgctcgcggcgcaaattgaggacaacaggctgaacgtcgaaattccaacctacatccagaatgccgttttacatgtgtgcaagccatga

SEQ ID NO: 72003 - DNA, 1725 bp, Oceanicola batsensis HTCC2597
atgatcgaactgtcgtcgcagcaacgggagatcgtggaggcgccgctcaaacccatggtggtaattgcctgcgctggaagcggtaagaccgcgaccgcggttcggcggctcgctgagatgcgcaagcgcattgacgatcggcacggacactgcgcgcttttgtctttttcaaatgtggccgtcgacacatttaacaaggactacaatgccttgctgcaggcggagcccagcgataaccgtcgaggcggcgtcgaaatagccacggtcgacgcatttatcacctcgaatattatccgcccccacggccatcttgtcatgggatgcacgaggacgcctttcctcgtgcatggcagcgaacctttcctggcgaacttcaaggtctgggacggcaagagacctcagccaacaaccgcgcttcagcccgtcattgtgaagggagtgggtcttcagtttgaagtcggacgggccaataccgttgttgatccgaaaactgccgccgaggcgatccggaagctggcaggtgtcggtgcttactcgcatgctttgggaagcttatgggcgctgaaagtcctgaagacccagccgctaatccgccgcgcactggcccgacgctatccgcacatccttgtcgatgaggcccaagacatcggcaatctgcaccaaagtatcctaatgtcgttacaggatgctgggacgcaggtctcattgatcggagatgtcaatcaaggcatctatgagttctctggcgcgaccggtgcgtttatccaacagcatgccgatcgcgatgaagtcgatgaacgcaggctcgagactaattttcgatcggtcccgagtatcgtcgcgatcgcaaacgaactctcagggcgcacagacacggccgcgcgcacggcgcccgctactttgtccggcgcatattatttcgcttacaagaaagaggagaaagacaatgcaatcaaatcctttgcagcactgctaggtcaggcgggtataggtgtcgacgatgcggccgtgctctgccggtctgcggaatgggctgccgattgggccggcggtgagaaggagcaaggacagggcgtcttgcgacacttcgtgaacgctgcaatccagcgagacaagtttagtcgcttcgatgacgccttcgagcactgctgcgctggcgtcgtcggcctgctggatgacagccatggggctttgctctctgagcttacccgccacagcggagttgagcggaattttcaggcgctgcggcgggtgttgtggtcgttcgtgaaagatccagccaggggggtacctcatgcgtctcttgtggcggatactgattggcaacctgccttgctggcgcgggccgaaaccatgctcgccattctctcggcagaacatggtttcaaggctgctgccacttggaaagccaaactcgcgaagcggaaaattttcaaccagccgctaatgcggccggcggaattggggattgaggtgctgccaacgttccgcgtttccaccgttcacaaggtaaaaggcgaaagcatcaggggcgttctttacgtgtgcaatcagtcgcacctcgacgaaatgctcggtggcacagagacagaagtcggcaaaatcggatatgtcgcgctcaccagagcgcgtgatctgttcgtcttgggtgtacctgccaccaatctaaaaaaatatgctcccaggctcgacgaactcggatttacaaaggctggcggggcttag

SEQ ID NO: 72004 - DNA, 1590 bp, Oceanicaulis sp. HTCC2633
gtggagattaaggatttcgaggaagacctcgatgtcctggcggtactgaccgactaccgcctcgatgacgacccggagacagttcgccttacctatcagttgcgtgctcagcctggcctcgatcacgcccccgctagtgacgacgatttctcattcgtctgctttggcggtgaggatgaagctaagcgctttggccacgatcttcggcgccgcatcacgatggaccttttgccggcgcttcgggacgccgagggggatcttgccgcttggcgccggtcgccacttcgtcctctcgtagaggatgcgttcatcggcatcgacaaggaggcgctcaaagaaatgggagacaagatcgcggaggcaagcgcagcggcgattgaattcaaagaggtgaaggcgctcgaagccagcatcgcagagctgtttttggcaatggctggatcgaagcaggatgtgcatccatcacttggattcagcgcgactgacgccacgcggatcaatcgtcagatccggctgctgatagatgaggggcggcgcggcgtcgccgacgccagcctgggttcggcaaatctcatctttctcacactcaaactactcgatcttcagcgattgatagctgccaacaaacgcgaccaatcattgctagcgatcgaggagccagaggcgcacctccatccacacctccagcgcctagtctataagcatctgtttgagacgatcgtcgatggcgaatacggtgtcgatgacaatgatgatggggaggttgccgggccgctttcggtcattttgaccacccactcgcctcatattgcaagcgtcgcaccgctggggtctctcctgcttcttcggtcgcacttggacgagggaacgaggggatactcgaccgccgaagccgacttcaccaaagccgacaccgaagatcttgaacgatatctcgatgtcacccgcgcggagatggtcttcgcgcgcggcgtcatcctcgtcgaaggtgacgcggagcggtttctgatcccagcttttgccgagaatatggacatctcgctcgacgagcatggcgtttcggtgtgctcggtctccgggaccaacttccttccctatgtgaagctgctctgtgctttaggtatcccgttctctgtcatcaccgactatgatgaagtcgacgagaaacctcgcgcctacaatcgggcgctcaagctcgttcggatcatagacgtggccgctggcggtgacgacaccaacgcggtgatcaaatcgatcaaggacaaagacacctggggcaagacattcgctgagattcgaaagttcggcattttcgtgaattggagcacgctggaaactgaactgttcgaaggcggctatgcccaagagatgatagagaccctccacgagcacaattttagtgctgagcgtaaggcgaccctcaacgcgtggaaagcgaagccgaaggatttcgatgctaacgaactgctcaacatgatcgagcagatgggcaagggccgcttcgcgcaaagactggcgacgcgcgcagccggaaagctcgtacccgactatattgcggatgcgatcaatcatgtcatcgatctcgtctaa

SEQ ID NO: 72005 - DNA, 1797 bp, Oceanicaulis sp. HTCC2633
atgtcatcgatctcgtctaaccgggccctctatctcaaggcggccgaagacctgcattccaacgagaagcagtggcaggcttttgaatcgaccgggcactgcgtgttgcttgctgggccaggcagtggcaaaaccaagacgctgactgtcaagctcgcccgaatgctcagcgaggatgtggacgagccacgcggtattgcttgtatcacctacaacaacgaatgtgcacgtgagctcgaaagccgcttggaaacgctcggcatcgcaccgggcggacgtgtctttatcggaaccgttcactcattttctctcacacaaattctgcttccctacgccaaagtggccgggctgggcctgcccgatgaattcacggtggcgacacggcagcagagtcgagccgcattggccgccgctcatgcgaaagtcataagtggaccggagaacccccagaactgggacatgcggctcggccgtcatcggcgacggttcctcaatcgcgagctgccggagtggagaacgctcgatccgcagcttaccgaactcgtcgagacgtatgaagccgaacttcgcgcacgccagctgatagattttgacgacatgccgctcctcgcggtgcgcgcccttgccgccaacaagtggcttaggacagcgatggtggcgaaatatccaatcctagccgtcgacgagtatcaggacttgggccgtgcgttgcacggtatggtcatgggcctctgcttcagcgcgggcatgagattgttcgcagtcggcgacgtcgaccagtcgatctatggctttaccggcgcaacgccagagttgctgcgacgtctttccgcgcgcgatgacgtcgagacggtgcgactaggtctcaactatcgctgcggctcgcggattgtcagtgcgtccgaatatgcgctcggagagaaccgaggctacaaggcgcccgacggtgcccacgaaggaacgatctattttcacccctgcactgggggctatgccgggtacgcacgatatcttgtcgaggagctgatcccggagatccgcgagcgtcggcccgacaccaatctcggcgagatcgccgtgctgtattctgcggcgttcctcggcgatgaagtcgcgaatgcggctgcagaatatggctattccgtcatacggaccgatggcaacgcactgtatccgcgcggcagcaggttgatgcgatggctggagcaatgcgcaatgtggtgctgcgggggctggcgatcaggcatacctcggctgtctcgtgtagtgagcgaagggaccagactattccatgaaaccataacagatgaggatcagcggctcaccttccaacgcgacctcaccgcagcgttatgggataggcgggatgagacgctcagcctccacgattggctggcagctctgagcgaagacatcatccgtccgcgggtcgatctcgcccgatcactcgctgatgaatatggcacactaaccgactttctcgtgcgtatcggtccagccggcgatgtcgatgattttccgttaggtgagttcgccggaatcgggagtggcctcgatcgtctcaatctttcgacgctacatagcgccaaggggcgcgaattcgatgtggtgatcatgttcggcacggaggaaggccgactgccgcgtaacaatgccagccagaacgacgtccgtgaggcccgacgcctcttctatgtcggcttcacgcgtgcgcgatatgagatccatctcatgtatgggcagcacaaaccgtcgcgcttcgtgacagaaattcaggagcgcctcgaaggtgaatga

SEQ ID NO: 72006 - DNA, 2025 bp, Roseovarius sp. 217
atgtacataagagaattacgtctcaagaatttccgttgctttggcgaccatgaagaggtcattagtcttgatccagagatgacggctttcattggtgataacggcagtggaaaaacgaccgttttaaaggcccttcaaaggctgttcggcagcacttccaatgaacgaagtctgagacgtgatgatgttcacttcggcgctggcgaagttcctggccccgctaaccaaggcgacgatactgaggctatgccagttgtctccagccgggaaattcatattgaggctatactggacttccctgaactgaccgacgccacggaagtgcgctccgacactgggctagatgtctcggtcgagacttttcatgcaatgtcatgcgccggcccaggaacgccccttcaagctagaattaggcttgaagccaactgggaatatggaatcgacgaagacgacattgttcaaaggatatattgggttactaccactgaagaagttccttttggcgaagacgacatagccaagatccctatgtctacagcgcaacgcagacggatccaattgaagtacctacctgcgacgcgcaataactccgccgtagtgaagagcgcgatgaaagagcttcttgtttggctcgagagatttggagatctaacctctgggaaacagcaacttgaaatccagaggaccgagcttcagaaggtttttgacgatcttcctgccgtgaatggcgttgtaaacgagttgacgaagaactggggaaagctgttcaaaggcgaactgtattcagaagccaagctcaacatactagctacggaaattcacaaggctcttcgcgatcttactttgaagttgagcccatctgaatcgggggcagaatacgcgatcgaggacctaagtgaaggccaagcatcacttttatacatctctatcgttgcaagtataattcagctcaatgaacgccatataggcaagtctgttaccggatatcgtgatgtcccagagttaaaaccttggttaaccattattgcgctcgaagaacccgaaaatcatctttcgcccttttatctgtctcgcatgatagccctgatgtcctcgctgtgtactggtgatagcgctatggggatactgacgacacattccgccggtgcaattcggagagttaagcccgaacaaatccgttatatgcggcacgatgagcaaaatcgagtatcatattcaaaaagcataaacctcccaccaaagactgatgagaaatacaaatacatctatgaggccgttcgttcaaatcccgagctgtatttcgcaaagctggttgttctcggcgaaggtcgttccgaagagatagtagttccaaggctggcaaaagcatttcatcctgatttggatttggaccctgcgtttgttgcattcgttcctttgggtggtcgccatgtcaaccatttttggaaactcctaaatgatctaaacatccctcatgtaacactgctggattacgacttggggcgctataatgcaggatgtctgcggctcaagtatgcggttgatcagttgtcgtcatttggaattatgcctgacttggaaaagcccaaagatgccaacgcatggagaggcttggataaagacgagttggtaaaatggtacgtttgggtgaaatccaatggagtgtatttttcactcgcactcgatctcgacatgatgatgttgaaggcgtttcctaaacagtatcaatcaatttcaagcatcaaagatacctccacactcaatgcagatgacttcgtggcgagcgtatttggaaaggctgggaatggcctcgctgattataagaagaatgcaccaagcaccgctgagctagccatttacgatgacttgttcaaaaaagggagtaagccaattgctcatatcgaagcgatggcatcgttgactgacgacgagctaaaggcacaatgtcccaagtcacttaagaaacttttcaaagactgtgctaagcgcctcgggattgaacttggccctaggacgtccgaatga

SEQ ID NO: 72007 - DNA, 1338 bp, Roseovarius sp. 217
atgacacttggctggtgggaaaatcagctatcaagaagccctcagacactgacctttgatatggttaagacccttgcgcaaacaattattcaccacaattctcccatcaagagagcattcctcaacacttattcgcacgtttttctagatgagttccaagacacaaccttgccacagtatgctttgctcaaagaaatcttcggcggatcgaatgcagttttgaccgcagttggggacaacaagcagctaattatgacgtttgcaggagcaaccaacgaaagattccgccaattctcgattgattttggcgctcaagatgttgcactggcatccaactttagatccaatcaaaggatcgttgacattgtaaactcaatggcaaaggcgattgagcctaattcaataactgtaaaatgttcaaaagcggcagatccaatacctatagcttcagacggcgtgatccatttttcaagcgatgatgaagagcgcaaaggtcttgcggaatttatctcccgtgagatccagaatggttccctgaacgccaatgactttattgttttggtaaggcagaaggcggacgagcacgaagataatggtttgagggcggcactcgaagagaaaggtctaacacttagaaacgaagcaagaacagtcggtgaaagtggcatttcgatacaagatctatcttcagaacctttggccgaagccgtcattttatttattcaagtagcaaccggcgatcgtcgacgccgggcctatcccgatttgattcaattgatgtctacttcgcatggttcaatgagtgaacatagtgcggagcagtttggccttgaacaaactttgcgaaaggcaacaaaggcgtttgatgaatttgtcaaatcatctaacaaatcgttctcctgggaggccttagtcaatttgatcacttcgcaactcggagaggacaaactgcgaaggctcgcgcaagaatataagaaccctgcgcgattggacaaagttaaagctggcatcgctgcatttctagatgaatgctcgcagggagctaaaaactggcaggagcttgtcgaccggtatcaaggcgtagaccaagttcgactaatgacagtgcataagagcaagggattggaagcgcatacaatcatatttttctctttaaaggatagctcattttactacaaagcggatatgaatgaggaggcgctgaccttttttgttgcagtctctcgggcagagcaacgagttttttttacaaggggtcgtggtagtatcgaaaaattgactcccctctatgaactactagcgcaagccgaggtcccaaacatcgaagcatttccctga

SEQ ID NO: 72008 - DNA, 1071 bp, Nitrobacter sp. Nb-311A
ttgacacttggccttgccgagccgtcatttcaggcaatcgtccgggcgctccgcatcctcctgacaaacgcggcgatgacggatttcgacccttcgacgaacggacttggcctcaacaacatcctctatgtttcgatcctgatcgaatatttccacaggcgccttgcgcagcagaaatcggcgggacagatcattctgtttgaggagcccgaggcccacctgcatccgcagcttcagctcacgctcttcaaagcgctgagcgcacttcccttccagtctgtcctcacgacccacagcacccacatcaccgctaacgctgacctggaatcgtacgtcgtcctgacacagaccggggaacctgccattgcgtcggcagtcccggccgaagacgccgggttggacgaaacggagctgcgcgacctggagcgctatcttgacgcgaccagatcgaacctcctgtttgcccggaaagtaatgctggtagaagggccggccgagctattccttattcctgcgctggtcaagcaggtgaagggaatcgatctcgaccgcgaggggatctccgtaatcccgatctacggcgtgcatttcgacgtatacgcgaagctcttctcgggtgagtcgctacccaagaagtgcgccatcgtcacggacggcgacctcaaacccagcgatgcagaccccgatcttgagggagaggacgacctgccgccgccccccgatctgaaggagcttgagaacgactacgttcgtgtattcgcctgccagaccacgttcgagcgtgctgtcacgctggcagggacgctggaaatgtttgcgcgggcggccgacgatataggcgctcccactgtggcaaagaaactgcgcaagggtgcggcggagcttgacgacgatgacctcgacgaaaagcagcgcgatgcgatcctgaatcccttgcgcaagatcgtgctgagtaccgcgaagcgcttcggcaaggcccgtttcgcccagattgccgcccgccatgtcgatcaggcgacgagcgttcccaagtatctcggcgatgcggtcaggtggctcaccgaaccatga

SEQ ID NO: 72009 - DNA, 1776 bp, Nitrobacter sp. Nb-311A
atgacgctgaccgccgagcagaaagacgccgtgcgttgcgaagacgaccttatgctcacggcatgtccgggcagcggcaagacccgggtcatcatctccaaactatcgcgcgttatcgacgaaatacgcgacacgccgcgcgccgtcgcgtgcatcacatacaccaatgcggctgttcaggagatcgagagccgtctgcggcaccaccttcagccgggggacgatgcatactacgagatctgcacgattcactcattctgcctcaaccatatcttccggccgttctgccatctgatcaaagggtacaaagacggcttcaaggtcctgacgccggagagcgccgagtttgagcggcatgtcactgcgatctgcgcccagcacggcagatacaatctgaccttcaaggattttgaggacttcacccagctccgcatggaccttgacggaaggcccgttggaatcggaatcgaacgcggggcgctcacaccggaagtcgcgaccgcctactggaagcgcatacgcgaagcgggattcgtcgacttcgccaacatcatctactactcgctgcttctgctgcgtaggcggcccgaaattcttagctacgtgtcggcgaagttcgcctggattctggttgacgaatttcaggacacgaccgacttgcaggtcgaaatcctggcattgatcgccggaaaggggcggacacgtttccttctcgtcggcgatccgtgccagtcgatcttccgcttcgcgggcgcgcggcctgatcttgccgaacagtttgccgggcgcattaccgcgcgcaccgacaagcagctctccggaaacttccggtcaagctcgccgatcatcgcgcatgcgaatatgctgtatccgcgaacaccgccgatgaccgcggtggggcgcgcgcggaagtatgccgaacagcccgtgtggcagcacggtgcgtctgccttcactgtcatcacggattatttcttgccggcgattgaggcgctggaaattccgatgggagaggcagccattctggcgccgacgtggtattcgctgttccccctcggaaggcggctccgcgaatatggtgtcagcatcgtgggaccgggagcgcgcccttatcgccgaaacaggcagttcgccccgctggccgagcaggtctgcggctatctgatggaacccaggcccgacgcaattgccgggatcgaacgcacgctgttcaacacgcttctggatgtaaccggccgtccgcacttcgatatcttttcgtaccgtggccgcgtgattgttttcaggcttctggatcacgcgaggcggcttcaccagattcatatgggcggcattgcttggcttgaggcggcagcggcggcattctctcaggtgcttatcgagaaggagtatctgacctccggcgacaaagacgtgtttgcgatatcggtcgaggaaatgaagaccgacatgcgcaacaacagggtcgatctggctaatctgacgatcgacgaccttggaatctacgcaagcccagatgcggcactcaaattggcgacgttgcataacgcaaaggggcgggagtacatggccgttgccatgatcgacttgcacgagggcaggattccgttttatcaggcgcgaagcgcagaagatatcgaggaggcaaagcgcctgttctatgtcggcgtcacgcgcgcaaagcggttcctgctctatgtgaccgacgcctcggactcccgcaacgggccaacacggtttttgcgggtaggtaccggcgttggggtcgtgaattag

SEQ ID NO: 72010 - DNA, 1881 bp, Leeuwenhoekiella blandensis MED217
atgtatgtatcccaacttgaaatattaaactacagaaactttaaaaattttactgtacaactaaaaccagttacacaaatcattggcgaaaataatatcggtaaatccaaccttttggattcattaggtttaatattcagccaagaagtatctttcttcaaaagacgtatgttagacatttcagactttaattacgagactattctggaacttaaaaaagcaatccttgatacttctattgaaccaaagaatatttcatatcctaaaattgtaataaaagctacacttaaagactgggatttaaaacaagaggctgtaataacagactggatgagtaattctgattttacagaggccacacttacttatacgttcgcaccaatatcatcttttgataaaattgaagaaataaccctacaaaggcaatttcttcaggattacgaaaaagaaataggacctgaagaatttaaaaaaataccccaaagcgaaatactaattctaataaattttccaatttcaaaataccattatcgcatacacggtggtaaccaaaatgaaagcttggcaaacgcctaccatctaaaccaactaaaatttgagctacttgatgcattgagggatgcaaaatccgaactttcggcgagtagaaataatgggctgttgtttagagttttaaatgcaaatgaggaaaccgattatcaagatttgaaaaagcggttagtgggtcttcaaagagctatcgaacaaaatgtggctatttcaggtataaaaaatcgcatttctgaacaacttgataaaatttcattaagtacggaaacgtccaataacgttgttgacctaatattctctcttccaaatgtttcagacttgcttagaaaattgagcttaatttacaatgataatcctataaaaattgaacgtaatggaactgggcgaaataaccttttgttcatttcgttgatactatcatttatagaagacccagagcgtgcacagtccactttttttagaatcgtgggacttgaagaaccagaggcacatcttcacgcaaatcttcaaaatcacttagcctcaaatcttgaagggctcataaaaaaagaggatggtacttatagaaaggatatacaactgatcctaacttcacattccaaccatattacaaccaaaatagatttcgataacaccgttgtccttcattacaaaaatggcaatgttcaagctcattatatattagatggttttggaactacagctgaagagaaaagacaggtaaactacctcaaaaaataccttgatagtgaaaatgtcaatttattttattcaagacgattggcattggtagaaggaatttctgagaaacttctctttcctttattctataaaatccagactggcgaaacaattgaccaatctgcaactgccgtagtaaatgtcaatgggcttgcatttaagaattttcttcaaataattgtgaatggttttcatactaaatgcttagttcttacggatagcgatattgggactcaatctgaaaatagagcacaagaacttaaaaataaatatgatggcgtaaacgaaatagatatccaaatttctcagttatctacatttgaaaaggatttaataaactgcaataaatctggaagtggtaagactattttgtgcaaagtgattccaatagtacgaccgaatgcaggaaaaaaatatgtagaagaattaggcacaaatgatattgatatcgaagaatattttgcattgattgaagattataaaagtgagtttgccttacaactttctttgtcgttgactgaagaccaaagcggtttttcaatcccaaaatatatagaggacggaattaaattcttagaccctttaatgtaa

SEQ ID NO: 72011 - DNA, 1566 bp, Leeuwenhoekiella blandensis MED217; identical to SEQ ID NO: 71863

SEQ ID NO: 72012 - DNA, 1707 bp, Synechococcus sp. WH 5701
atgcagctgaccaaaatcgcgatcaaaaactttcgtggaatcgaggaactcgaaattgatcttgcaccatgcactgtccttatcggcgagaataatacaggtaagacaagtattctggaagccatttacacgtgcttaagccggaacttggcacgcaaggtggttccatttggggattatgatttccacctcacggcggccatgccagaccctagctcttcgccgccaatagaacttaactttacgtttgtcgagtcagaggaaggtgaatggccggatgcaatagtccaagccttcgacaaggcttatcaagcacgtgctgataacaggctggaaattcgctttcgggtcgttgctgcttacgatcctgcctcgaaggacttctttctcgattggacctttcgggacctggctgataacgaattgacaggagctaaaagtccgcaacttgtaagagagcttcagcaactcaacccagtgttctttttggctgctgtaagggacgcgggccatcacttccagggacgctctcagttttggggatcctttacgaagaatccgcagatcgatgacgccactcgtgctgaactagaagagcagattgaagcaatcaatcagataattctcgattcacatacgccgtttgacgaggtgaagactcaagtcgcgaagactggcagactggttccattggcttcgacagatctcgtaagtgtagaggcaattccagcgcgcatattcgacatgctgaacaagacgcaggtaaagcttgcggcaagaggcggagcaaagttgcctatcacccagcatggagcaggaacgcagagcctttcggtgttgttccttttcgaagcgtttctcaattcacggctggctgaagcgtacgatccagattcggaaccactacttactcttgaggaacccgagtcgcatcttcatccgtctgcggtgcgatcgctgtggcaagtgctgagtgggatcaggggccagaagattattgcgacccattctggcgaattgattgccgccgtccctttgcactctattagacgcttggcgcggaaagccgggaaggttgaagtttttcaggtgaatgaaggcacgctcagtcccgacgacgaacgtaagatcaactaccatgttagagctaaacgtgggaatctgcttttcgccaaatcgtggctgctcgtggagggtgagagcgagttttggtttctacctgaagctgcacgtcttctcgacttagatctcgaactcgagggagtgtgttgcgtcgagttcgcccagtgcggtctcgctcccctaatcaagcttgcaactgagcttggtattgagtggcacgttttcgcggatggagatcccgctggacagagatacgcaacagtcgcgcggggattactcggtgcaacacctgaagcccagaggctcaccctcttggcagagaaagacattgagcacgccatgtggtctcatgggtactcagccgtttacgactcagctgttggtgctccgcaacgggccaacatcacagctatccctggtactcccgattatactgagcagacaatccgcatggcgattagctcaacctctaaaccacacctcgcaatcgaggctgtggaagctgcccggcaggcaggctcgccgggccttcctgccgcgattgaaaccgcaattacaacagctgtgaacaacgcgcgactatga

SEQ ID NO: 72013 - DNA, 1809 bp, Synechococcus sp. WH 5701
gtgttgacttaccgtatcgcacgcctactcaacgatacagctggcgagcgcttcagaatccttggcgtgactttcacgaataaggcggcgggggaaatgagatctcgattagaaggcctactggatgtcagcaaagatcgggcgctcctgacaactttccactcttttgcggcagagatcttgcggcagcatggacattacattggtcttaggccagacttcacgattctggttgaacaggcggaccgtgaggcagtagccactgaggcgatgaaaatgctcagtgaggatgtcgcggatacaatcccaggagcgtctaatgctttaccacttattgataagatgcttgcagagtgctcgaatcctgaggaactggccgagaggctaggcgagcataagcacaaagagtttctgtcccagcttttcaatgcttaccgttccaagctcattaagggcaaccacttggattttgcgtcccttatcggcatggcggcacaacttctcgaagaacgcccagcaatcgcaaggcagtttcaacgtgtttatcgctacatatgtgtagatgagttccaggacacaaataagacccaatttaggctcctctgctcactcgttccggaagagaggccaaatctgttcgttgtggcagatgatgatcaactaatttaccagtggaacggagccaatcccaagcgcctccaggagcttcagaatcgcttctcggtggagattgtgcagttgcctgagaactatcgctgcccgccagctgtgattgagttggcaaataatttaattatccacaatctggaccgctctgccggcaaggagcgcctcagagcacataaggtttcaacggctgatacccatttaagagtattctactttggtgatttcaggcaagaagtcgaatgggtggttgacgagttgaagaaaactcctcctgacagccgtaacagcaccgtcgttcttggtagaagtaaaaagcttttggacgctgtgattacagagtgcaagcagcaaggctttcctgcatacatctccatacgcaaaagtcagtttatcagtgcgcctgtcacttggctgcacgcggcattaagacttgcaaatgcaaggcaggacagagaacagcttcgaagagtctgcaaagctttcttctccctagaagggaataatattagggtagaagatgtagtagcgacatcctcattccagggtggggactatcttcgcggctggcttgaagccgcactagatcagcaaactgtttcagttgccacgcgcggttttcttgagcacatgaagaacactctgctcgagcggctcaatcactggctattcatcgattccgcattccggtggcttgatgcaattcagaatcagcccgccgccacggataatgccttcgatgagtatcaggtggaaaaggatgtctggttcttattgcaacaggaggtaatccagcagtacggaaaagacgaggtaagccttcactctctgcttcaagagtttgatctacggtcaaaagaggccccgccacccaaggacgcagtgcgctgtatgacaatacacagttcaaagggcttagagtttaagcgtgtttatctcctgggcttggttgaggaccagcttccgagttgggcggccagaaagaaaggcgatgatagctttgaaatgagcgaggagcgcagaaactgttttgtcgccattacacgagcagaagaagagcttatcttgtcttactcagatagatactttggatatccaaagactccgtcgcgcttccttaccgaaatgggaatcaagatatag

SEQ ID NO: 72014 - DNA, 2115 bp, Psychromonas sp. CNPT3
atgtatatcagtcgcctctcaattgttaactataaaaactttgagcaatcaaactttaatttttctaaagattctgtaaatacaatcataggagaaaatgcttctggaaaaacgaatgtttttcaagctatgcgtattgtattagatgactctttaccaatgaatgcaaagtgcctatctaaagatgactttcatcggggattgggagaaccttttggacattggatagtcatttcgatttttttcgatggattgggcgactctgaagaagaacatgttttatcaaattacattcttaatgatgatggaaaaagtacggctactggttctggtacatattcgtttatctatagacccaaagcgcatatacggcaggaaatgcacttacttagtagtcgctattctgataaagatgaacgtacagatgcaattaaaaaatttatttctaagcagtcgattacacgagaaacttatgagcctgtagcatttgttcgaactaagttagattttactgatcaaaatgtttataaaaaaatagtaggtgactttgataattatatttttccagaccctaacatggaagacagtacagaaatagggaactataagcccccctatttttcaatagtgaaagaagtcgcttgtacatatgttaaagcacttagaaatgttgttgctgatttaaaatatcacaaaacaaatccgttatataaattacttaccctagaaagtaagcatattgaagacgaaaaagatgtagcaaatgatattaggaaggtgaatgaaaagatatcatccatccctgagattgaagcattaagtaaaagtatttcaaagtcgttaataaacacagtaggttccacttactctccgaagattaatgtgtcatcacagctccctgaagactttactgagcttattcaatcactaggtctaattgtagaagactcaattaattatcaaggaacaggaaagatagaagaccttagtttgggcggagcaaatttaattttcttagctttaaagttatatgaatatgaagcaattcgggataatgaagcacatataactcactttttaatgatagaagagccagaggctcatattcataatcacattcaaaaaactttatttgaaaactttaactttaaaaacacacaagtttttgtatccactcattcaacacaaatcagctctgcttcgaagatatcttcaatgaatatactcgctcgtaaagaatcaaaaacagaggtctattttcctgcaagtggtttggatgaacctaacgcacaatgcatagaacgctatttagatgcagtacgaagcgacatcttattcgccaagagtgtaatactcgtagaaggagatgcggaattaattttaatacctgcattagtcagagaaactttaggtgtgagtttggatgaaatgggaattagtttagtaaaaatggatgggacagttttcattcatatttcagatcttttccataaaaccagaattaaaaactattgttctatcttaaccgacttggatgcttcatttattactgatgaagactttgcttcagacaaatatgtaaaatctcaaatcgacgcagagaagtctggtgcattgagaaaggctaaaatgaatgaatatataaaagataacgaatatgttgaagcattttatgctgaaaacacatttgagacagaattagtcagataccctgaaaatgtccaattattcaatgatgtagtaaagacaagttatacaaaggaagccgttagagagaaggtcataaacaatatatcttctaaggatatgcctcttagatattacagtaccctgaagtttgcaaataaaattggcaaggggtggcttgctacaaaaatgattgagcatgtcagtattcagaacgtagttcccacatatattttgaaagcaattaagttttctttaagccacaggaatttgagcgaaatatgtttaaaaatgatggattataacattagccaaatggaaaaaaaggagcaaaagaaaataaacagtaaatctacttttgaagcgaagtttaaagcctatagggaattctttaaaaatgattcctttattaaattcatggatatctaa

SEQ ID NO: 72015 - DNA, 1746 bp, Psychromonas sp. CNPT3
atgccatacagtaatttaactaaagaacaaatgtcagcagtaacttttgaagataatttattactttctgcttgcccgggatcagggaaaacaaggactttggtttcaaagttatattacattctggaaaattcagataaattatccattggtaagaaaaaagttattgcaataacttacaccaatattgcagcggatacgatttctgagaggctactttcatacggaataaaagatgactctctttgggtaggaacaatccattcattttgtttacaatggattatcaaacccaacattaacaaaataccaaggctaaagcatgggtatattataatagatgagtatgaacaagaatcgaagatgagagagttaagagaagaattcgaaattggcaattatgatcctatacaaaccgccttagatttgaattatcagcctatctaccctaaaaattcagttaaatataatttagtagtagattatcacaagtacctacgtgataacggctatatagactttgagttaatacttaatattagctacaagttattaaaaatgtaccctgcattgtgcgatcgacttgctctgttagtttctcaccttcttattgacgaataccaagacatttcagaagttcagtatgagattattaaactaattatcatgaaaaggcattctaaactcaccttaattggtgataaagagcaagcaatctatactggcttaggggcaatagtcaaagataaaatagaaatagaaaactattttgaaatagataatatttgtgaaaaaaatcttacatggtgctttagaagtagccaaagaattattgattactacaaaaagtatcaagatgacaagcacgaaatagaatccaagtcagacttaaaaaatttccactctatcgttcatttagaaaataatatagataagactcagttagcagactacgtaattggagtggtagaaacacacctaaaacaagggattaatgcgaatgaaatagtagtattgtgtccaagttggtttggtgtaataaatttatcaaaagaaattgacctaatggacaaatctttttccataaatggctttctggtttcgcctatacctaagaaccaagataacatttggttgagtctgatacgcctaatgttactgaaaccttgtataagcaattacataaatagaaataggcttgcaaatgaactttcagataacttataccattcaggttctttaggaagcatacttaatcctaaggttatactgagaacgataaattctcttgtaatagagaccgacatagagattgtagaatggattaatttagtaattgattctttttgcaatattctcaagatagacataatcggtaattctgtggcaaaagtaggaaaatgtagtttaattgattcagcgttagagagaatgaaaaaatatgagatgcaatatagagcaaatgatctacataaatttttttcagcttctaatggagtcaagctaactacttgccattcaacgaaaggagatgaatacgaagttgttatatgcacaggcttacttaaagggaagattcctaattggaacgatattattggctgtgacaaccttcatcaaaactatgtagctcgtcggcttctttacgtaataggatcgagagctaaaaagcatctgtatatgatttcagagaaagggtataaaactaaatcaggggcagattatgaaacaacagcacaactataa

SEQ ID NO: 72016 - DNA, 684 bp, Sphingomonas sp. SKA58
gtgctgatcgaaggaaccgctgaacgccttctccttccggcgatgatccgcaagaccgacgctgccgcgcaaggcgagccgcaactaagcagtcagtacctcactgtcatggaggtcggcggcgcctacgcccatcgcttcttcggcctgctggcgttcctcgagttgcgcacgctgatcatcaccgatatcgattccgttgcgcccggggccaagaacaagcgcgtggcggttcgtgtggccgagggcacattcaccagcaatgcctgtatcaaaagctggtacgagcccgacgtgagcccagcccagctgctcgacaagtcgaccgaggagaagaccgacggcggacgacggctcgcctatcagatccccgagcaggatggcggtccatgtgctcgcagctttgaggatgccttcatcctcgccaatccagaactcttcgatctcggcgagggcgaccaggcgacgctcgcctatgagcatgcggccgaacagaaaaagtccagctttgcgcttgaacatgcgatcgtaaacaccgagtggcggacgccgcgctacatcggcgaagggttgcggtggcttgcccaaggcaatccagcgccgaccctcgggccagacgcgatcgccgccgagttggtcgccgaagtgattgacgcggctgatggggcccaggtcgatggctga

SEQ ID NO: 72017 - DNA, 762 bp, Sphingomonas sp. SKA58
atgcgagacggcattgaccgctcgcttccctcgccgttacagccgagcactccggcgatgaggggcttcttgaaagacagcattctggtcatggtcattctccgggggctggaggttcaggcgaagcgctatggcgagatgtttgagagcctaggcgccggcaggccgtgcatccgtcggcatcacgacaaggtcgcatggacgcagtctctcgaacagcttatccaattgcgagcgaccggcacgatcggcgccgtcatcgacctcatcaaaggccaggctcacatgcatctgcccgaggcggtgctggaccgcgagcaacgcttggccgacgccggacccgaaccggtcgaaggcgagtctcggaggatcgcccagctgcgaaggctacgggacgtcgcctacaccgagctgatggcggtggatgcgttcatcgatggtcacacgcccttcgccaccaagcacggcgtgaagggtgcggagttcgagaacgtgctcgtcatcgtcggccgtggctggaacaagtataatttcgcgcagatgctggaacggctcgacccaggccccccggcagacaaggtcgaatccttcgagagcaatcgcaacctgttctacgtcgcgtgctccagaccgaagcgccgattggcgctgttgttcacccagattctaagcgagctcgcgatggcgaaggtgacagctttgttcggcgaggccaatgtgatcccgcttccagcagatcccgcgggcggggccgcgccatga

SEQ ID NO: 72018 - DNA, 1914 bp, Mariprofundus ferrooxydans PV-1
atgcgtgtgcggcgtctgacgatagagaattttcgtggggttagatctgggcaggtcgattttcgtggccacacgctattggttggcgggaacaacattggcaaatcgactgtctgtgaggcgcttgatctcgtgcttggaccggaacgtttattccgcagacccgtaattgacgagcatgacttttacaaggggaagtatctatctgcggataataagccagtagagatcatcattcgagcactgttaaccgacctttctgaggaagcggagaggcgttttcatcgtcacttgcggcgctggaacgacattgacggtcagtttgtcgatgaatccggcgacggtccggaagcggcagatgctgaaggtacggtttgggcgctgcctgttgtcttcattggtcgctacgaggctgatgaggatgattttatcggtaacactttcttcgatcatccggtcgatgagatggatgaggaagagccggctgagcagcaacttggcggcggtcgcaagatatttgggcgggagcaaaaacggctatgcggctttattttcctccgcaccttgcgaacgggctcacgcgcattgagcctgcaacgcggctcgttgctcgatacagtccttcgtttagatggatctggtctcacagagatgtgggagaaaacactggcgggattgcgtggtcttgatccagctatcggagagatcgagcagctcaagacgatccgggatgaaattcggaagcggttggcacgtttcgtaaatttatcggaagacgatgacgcgaccgggttctttgcgtccgatctgactcgagaccatttacgagacgtagtccgtctgtttcttgccgcccagccagccccgcatcaagtaccatttcagaagttggggacaggttcgatcaacctgcttgtgttcgcgcttctgacgtttatcgcggacctgaaaggtaatcgctccgtgatattcgccatggaggagcccgaaattgcgttgccaccccacacgcagcggagggtgatccgttttatcctttcagaaatggggcaggcgattgttacctctcactcaccttacatcattgagcagtttgagccgacccaaatcgtcgtcctcgaccgaaatagcgatgcggtgttgtcgagtcgaaccgtcgagttgggtgacatcaagctaaagaaataccgccgagagcggcgtcagatggccgaggccattctgagtcgcgctgttattgttgtcgaaggcgcgacagaggcagccctgttccctgttgcttcggaagtgatggagtccgctcttggagaggagtatgagcatcttgatctagctggcgtgacggttttcaatgccggcagcgataaggaagtgccaatatttgggccattctttaaggcgttgggtaaacctgcgtttgccttctacgacaaacaagatgtagcgccagatgcggcgaccgccgcgaagctggccgattacacccaagtttgggagtcccctgagaaggggatcgagtccgtgctcgtaagtgagatgccagtcgcgacgatgcgtcggtttcttaactccgtgaaagaccgagacgactacccggctgataagagaattattgacgataacatgagcgatgccgatgtagaagcacttaccaaagcagtgctgaagataagaaaaggcgataaccagccttacgcggcgcttctgatcagtgaatgcgaaaatgaaacggagcttcctgtcaccattagaacgattctggagtcggttcatgctacacttcaatcccttgtaatggacacagaatcagaagatgaaccaaaccagggtaatgaggcggcagctaccgacatatctgaggccgaagcattagagcctactgtacctgactcacgggaaggcgatgagggttag

SEQ ID NO: 72019 - DNA, 1575 bp, Mariprofundus ferrooxydans PV-1
ttgccgggtcagaagcttctgtttcttagtttttcccgagcagccgttcgtcaggtgctcaaaggctgccaagagattctcacggcggaagagcggcgcgccatagaagtcagaacctatcacgcattctgtatggagtttctggagagccacggcaaattgctctccggcaaagctgtatcgataatgtatcctacccaggagcgacttgagaaggctaagttcgatggcgactggaaggaagaacgagcacgactagcgaacgacgaagcacgatattgctttgatctttttgcttccggcgttgcggaattgctggaacgttccacggctttgaaggagcttctggctaattgttatccaactgtcatcgttgatgagttccaggatacggacgatgagcaatggcgtatcgtgaaggctctagcgtctgttacgagagtattttgcctggctgaccgggatcaacgcatattcgactatcgggacgatatcgacccgcggcggatcgagagcctctgtgatgcggtggcaccgcaaacttttgatctaggaggagaaaaccatcgaagcccgcgcggtgggatattgggattcgctgatgccgttctgagaaacatatctccacttccagaggttaatgacgtcaaagttgtatactacagatcgaacaggtttccagcgactgttcatgcagcagtgatatggaccttgagcaaacttcgcaaggaaggtatagaagatccctgtgtggcgatcttggcacgcagcaatcgccttgtcgcccagatatctggaatactgagcgagacaaatgaatataacgggacgcagttgtcgccgattgaccatagcgtagtctgggatgctgagctttctgctgctgcaggggctgtcgttgcctcgattatggaatggtcgaatgaaagcgcagaagctcctgttgcggttacgttggaagcaatcgctcatttttatgagttgaagaacgcaacgtcaccgtcaaaggatgctttcgaaaaggtcagaaaattccgtgcggatggcgagaaagtacgcaaatcggagaatccgcgcataaacgctgcaaaaggtctgcttgccgcctttgatgaaggcgttgagtttatcggcgatccgttggtcgattggcggacggcgagaagtctgctgaatgacattcgtccgctgaatgagctgtatcgcgaagctcggatggtgcggctgtttcgagctaccgatacgttaggtgcaggacttgcagagttgtggttggagaccgggcattaccaaggggcagcttcactggttaccgacacgctcgaatatgagcgtctgatcgcggccgatcaagaacctataggctgcgtattgatgtccatgcacaaatcaaagggcaaggaattcgatggggttgtgatcgttgaaggtccttattccggtttcttctttgatatgacccgagagcagccgccgtttgaaaggagtcgccgcttgcttcgcgttgcaatcacaagggcgagaacgcatgtgaccattgttcgctcagacggcgctcgtgctctcgttgactag

SEQ ID NO: 72020 - DNA, 1698 bp, Vibrio cholerae 623-39
atgtacatcagaaaggtaacgattaacaactaccgtagtttccgcactttcgaagctaaacttcaacaactgacagttgttattggtgaaaacgatactggtaagacgaactttttcaccgcactttcgttaccgttaagcggcaacctaatagacttcaaccagaagcgtttgagtgtttctgatatcaacaaagattccgttattgattttctaacgtccgttgtcaatgatgacaccgaagagaatcagcttaaaaagatccctaaagtatcagtaaccgtagagttcgctgatccgaaagatgcttatgaaacagcactgttagctaagtggattgttgcagatggagataaagaaacttacaaaatcagatacgactttaagcctaaagacgacaaagatttgcttgaggtcgtgaagaaatcgttcgctggtaagactttagatgatattaactggtttactctacccgttgagctatacgactaccaagtcgtctctgtgaacaacgaaaagcctatcgcatacagtgacttaaaacacgtcagtctccatagcatcaatgcagagcgagatgacttctcagaaagcagttcaatgaagtccaatagcattttcaccaaactgctcatgaacactctcaacgatgacgacaaaggtcagatcaataccgcctactctgagttttttagtgctattgaaaagactgaaacattcgacaaagtcattagaactaatgacgattttgagaattacgacagtattatcaaacagcttgagtgcactcctaacctgcctaacttgaagaacatcttatcgaacatcactttgaaatacgggaatgaatttctgtaccaaaaaggcttaggaaaacgaaatcttatctacatactcatcttgtttgcttactacaaatcatgtggtgatacattcaacttgtgctgtatagaagaaccagaagcacacttgagcgttaacaaccttcgtttagtaagagacttcattgagaaaagctcaagcaacagtggctcgcttgtacaaactatcatttcgacccataacccatcgatcatcaacaagctaaagatctctaatgtgttggcgtttactggcgagaaagcaattagtctgtctgatactccaactaagctagttgactacctaagaaagagacctaacttcgacatcttaaagctgctgtttgcgaacaaagtcatcctcgtagaaggtccgactgaagaaatgctaatcagcacttatctgtctaaacagccagccctcaacgacattgatattattccaattggtcaacgtggttacgccactttcttagatatatggctagccttgaacaaagataaccagaacaagaaaattggtgttgtccgtgattatgacaattcagatgcggctaaagccaaacatgatgcctatgacacagcgcatgcgaatgtcactgtaagaacaacaacaaactacacacttgaaattgatttagtagaagcagaagacaacctagctttactaaatgatttattcgaaatggaaggcgacctcgacgcagtatccaaacacatgattaatggtaagacagcaagaatgcttgatgtatgtgatgcgatggttgatgaagagaatccgctggatattaagttaccagctcacatcgctgaggttatcgaggcggtatcatga

SEQ ID NO: 72021 - DNA, 1377 bp, Vibrio cholerae 623-39
atgatagaagtacagattgctggtgcaggtgctggaaaaacttatggtttagcaaagactttgatagagcacatcgaagcttgtactagtcacaaaaagacatttgcactgacgtacacaaactctgcaacagcgaagatagagcaagagataatcaaacagcatggctttattccgtcgaatctctgtatacagaccgtacatagcttcttgttaaacgaaatcatctacccattctcgtcattcactctcggagatgtgtataacgacgcatcaataatgatgttaccgagcgatgctagattcaaaaactggcacttaaagcgattaaaagataaaaacatcattcatgccgagagcgtctacaacatcgctaaacaaattgttgatgaaaccaccagcaagcacaacaacagagcgaagaaagctaaagtccgcagacttttggctattctaggaagctgttttgacaagatattcatcgacgaagtccaagacttagataaagatgcacttcgctttttcgaagttctaggcagcaacgatattgatatatacatgatcggagatccaaaacaagcaatcaagtttccccaagatcttgatgctttcgttcaaaaattagctcaaaaaaaatacgcgaccatactaccgatcaacaatcaaactaggcgagtccccagagagatactaactgtctcaaacagcttctgttatgaaaatcagcaacaagagtcactatcagaaatggttggtgaactcatgtacattgaatcgacggacgggcgatatgacgatctactaacgcactacttagatacaaaacagcttgtttgtatcgacaaaaagaatggtcgctatacaacttcatctaaacacaaacactcattcccacgagagatcgaggaaatgattcgtgattctaaccacaagaaagacaaagctttgtttgttaaagcagctttttctgactttatggacgatgcgatcaatgaagataataagaaagccataagtaaactcattgctcggcattcattggctcttaataaacagcacttcgcccaattacatgagctatgcaattcatgcacaaaaaatgatgttcaattcaaagtccgaagtatcgaatctatcaagggattggatgctgatgtgtgtgtaatcatacttagccctaataccatgaaatacttaactcaaaatggtattagcaaagcaaatcgatttaataaagaatggaaaaaaatctatgtcgctcttactcgtgccaaaaagaggctggtgttagctttagatcacgatttactcgctaaagaagatatggcggctgttagggattccataggtgaactgggattcgttcctcataactag

SEQ ID NO: 72022 - DNA, 1854 bp, Vibrio cholerae 623-39
atgtatttacattgtttgaagctagaaaattttcgaagatataagcagctagaggttgaatttaactcaggtctgaaccttttagtaggtgaaaacgattcaggtaagactgcaatcatcgactcaattaagtacgtcttgaacacccaaagttatgaatacctcagaccttgtattgaagacttctatttagatccaacccaagatgaatctcatcgttctagcgagtttcgtattgaatgtgtattcaagggcttcgataaagaagaagctaagcacttcatcgattggattggtactgatgacgagaagaattattttctgaagatatggatgtgtgcatcgagaaagaacgatagagtcttctatgacgttagagcaggaagtgatgatgaagggtcacaagttaatggagatgcgcgtgacttactaagagcaacatatctcaagccactgcgtgacgctgaaagtgagttgacacctaaaaaagggtcaaggctgtctcagattctttataatcatgaggtctttgcaaatgaagaagacaatagactactgagaattatgtctttaacaaataaggcgattgaaaagttcttcacacattatgatggaaaagagttgctgacagatgtgaatacatatctggaaaatttttctttagaaaacaataagctaaactcaagatttaacgtgagtgatagttctttaaagtctgtgcttgaaaagttatctctgaaattattcaaccaatcggtttcggagaacaacaatcaaggtcttggatctcacaatcttttatatatcgccgcagaattattgctactcaaaaagagcaattatcaggggctgaagttgggattgattgaagaaattgaggcacatttacacccacaaacccaaattagattaattgaggctattcaaaagattagtgaagagaacaaaatccagttaattctaacaactcacagtacaagtttggcatcaaaagtgaagctacagaacttagtcttatgcaaagacggttgcctatatcctatgggtaaagaatatactaaactacgagaaggtgattatctatttctagagcgttttcttgattcaaccaagtctaatcttttttttgcaaatggagttattctagttgagggagatgccgaaaacattttattgccatcattcgctaagaaactcggattcgatctttctcagtatggtgtatctattgtaaatgtaggtagtacagcattcttacgttatgccaacattttccttagaaaagataataaaaaactcaatctagacatttctttgataactgatgtagatgtaaagccatttatatacgaacccaaacaaactaaagagaaaacaattgaaggagagaaaaccaaaatcgaattgactgaggaagaggttgaagagaaaagattaattacaaaacaatcaatcctcgataaatacgaagtaccaataactgtgttcgtagccccatattggacacttgaatatagtatagctagaagttgcatgagtgaactattctatcaggcggtttacatttgtcacaatacaaaatcaaaagactatgtgtacaccattgatgagaaagtgagtctaatagcagaagctaaaaaaacatataagcagtggaaagatgttgataggttaagtgttgatgaaatagcttataaaatttacaaagaaattgtattagataagaagatctcaaaggcagttatcgctcaagtcttcgccgatttcattagtgacgcaaactttgatggcgtcattgaagatgaaaatatcaactatctagttaatgcaattaagaatgtaactagcaaatga

SEQ ID NO: 72023 - DNA, 1902 bp, Vibrio cholerae 623-39
atgaaaccaataacagataaagacatatcggatgttgagaaaaggttgtcattggaattcgatgatggaagtaaagaatttattaaatgttccgtttctaaagatatacaggcttgtccaggagctgggaaaacgacatcactagttgctaagctcgatataatttctcgacaaatgccattcccagataagagtggtattctagttctcactcatacaaatgtagctgttgatgaagtgaaaagtaaattgggaaataacgcaagtaaacttttaggttaccccaatcatatcgggacgttccagtcgtttgtgaataaatatttggctactccaatgtacataaaattatacaaaaagaagcctgaaaagattgattcagatctattcgaagagaagttaaaatcgatactgacatccaactttattggtaatttcatattacagagatcaaatgataacaactataatcgagtagaagattttataaaggcgcttgaaattcatcaagacaaaatatttttaaaacaagcatcaaaaagtaaaacgattatatccaataaaagtaaaatattttacagagttaagagttatctagaaaaaaacatcatcggaacaataatttctgatggatatataacattttcgcattgctatgaattagctaataggtacttagaggaattgcctgaaataggaagcgttattagttctagattcaagtatgtttttatcgatgaaactcaagatacggataatgggcagttcgagcttctgaataagatctttggtaactcaaaatctatcattcaaagaattggcgacaatgatcaatctatatttaactttgatagttcagataaattgacttggaatgtgtcaaaagaccatatcacaatcagtgataccaaaagactatcaaaaaagatatctaaagcagcaagctctttctcaataactaatcacgatcttatcagtaataatgatattgagattgatcctgtagttttagtatttgaagatgacaatatcgaaaatgtcataccaaagtttgctgaattgatatttattcacaatttgcatcttatcgagaagccaatattcaaagctattggaaatattggaaaggcacatgacacctatcataccataccaagctatgtgaatagtcactatgaagaagacgctgaagctgttaatggtgatgactttagagataaactcaactcatatggtaatatttctcctaggcatgtaaatatccattactggactatattagttcagtatttaggtgatgttggtgttaacttcgatgggaagaaatttaataaacgaacactgactcactatttaaaaattaacaaaaaagaaatttatgatgaactcaatggttactccattagtatatttgaagagattgaacgtgttggtgctcttaatccatatttagtgcgttcacttcaatcattatctgcttttctggattttgtctatgatgaagcgttatttttaacagtaattagaaattataaagtaaaaaataataagacaagaggagataatattacagttaaaaaaaatgatacgactatcgatatttccgtatctactattcataaagccaagggcgaaacacatactgcaactcttattctagagacctataaaaatggttatgacataaatcaattattacccttgttaaagggtaaacgaaataccatgtttcctgcaaagaaaaaggttctttatgttggaatgaccagaccgactcatttgttatgtttagctatacatagaagctatgataagtctaaaactaaccgagttacgctgaatgaacaagatttagatgagattagaaaaaatggttacgaagttattgatttggcaatataa

SEQ ID NO: 72024 - DNA, 2151 bp, Dorea longicatena DSM 13814
atggaaattgtaaagattagagttaaaaattacagagcattaaaggacttttcaatggactggcagaagaccctttctctgattatcgggaaaaataattgcggaaaaacatcattaatatctataatgcaaacgtttttttcagagggtaaaggtccggggattcgatatgatgattttaatttagagtttaaattaagattaactgattgtatagcatgtaagaaaagtgagtgggataatacagatatacagggaatagaattatttttgtatatcgaatataacgagagtgataatatagcaaatatttctccattgcttatggatttagatccagataatcatatggtcgtattgaagatagaatatgttttgaatgatattaatcaactaaaaatggactatgataaatattttgaaaaattatcttctggtaagaaaaatgctagaaataaacaacaattatttgaacgttttatgcgtgacaaatcgaaaaattatttcaaaactgtttataaggccattaagtatgattatacaatacacgaatgcaatccggacatatttacgatacttgataaaaatatccttcatttgtctcgtatagtttctattaaatccattggggcaaagagagaaacagataataaagaaaatgatacatcactttcatcattatcaaaccaatattacgagcgtgtaaaaggtgaagctggtgatccggtacttgaagaatttgaagcacaattattgaaaacagatcatgaattgactggattatattcaaaagtgtttgaagaaattgttggaaaagtaaaaagatttggtggaacaaaagaaaatgaaaccattattcaaattaattccactttaggacgacaagaattaattaaagataatacggttatgacttacaaaagtggtgatcaagaactccctgaaagttataatggattaggatacttgaatcttattagcatcattattcaaattgaaaccatcatggcagaatttagatgtgatagtgataaggaaaagatgcctgctgatataaatattctgtttattgaagaaccagaagcgcatacacatccacaattacaatatatttttattaaaaatataaaagaattactgagagaaggaaaaaaatgtaaggatggatcagatattgttgttcagacattgattactacccattcttctcatattgtcgcggaatgtgattttgatgatataaaatatttttgcagagtatctccatatgcagttatttcaaaaaatttatgttctttggaagcagaatacaaagatgaaactgatccaaataataaacgttataagttccttaaacagtatcttactcttaattacgcagaagtattttttgcagataaagtgattctctatgaaggagatacggagcgcattttattaccggcaatgatgcgtaaaattgatcaggaagaggaagcatcaggaatgccgctgttgtctcaaaatatatctattattgcggcgggtgctaactcacaactatttagtcctttattagcatttttagatattaagacattgattataacagatattgatgcagttaaaaagaaagaaataaaagggaaagggacttattatgttgcctgtgaggttgaaaaaggcgaaaagactagtaatcatgcattgaattattattttaaagaagcattagagaattggggaagaaatgatttaaccttttttaaaaaacaaaatgcaagacaaaaggtattaagctatatacaaaaaaactggcaacaaaatgaagatggcaagctcatgattgcatatcaaactaaagaagaaaacggaaaagaatattatccacgaagttttgaggatgcgtttttctgttgtaatagacagtttattattgataatatatcaaatttccattgcttaaaaaataaaaagtattttgatgaaaaagatgaaagtggtatttatcaatattccccatatgaactggctgaaaagtgtgtgaaaagtaaaccggcatttccaatggaagtgcttttaaacagtgaatcagatggaaaatgtgattattcgaattggaaaataccatcgtatattaaggaaggattattgtggctgaagcaggattag

SEQ ID NO: 72025 - DNA, 1470 bp, Dorea longicatena DSM 13814
atgtttgaaacatatcctaaattgtgcaaaattgtatgtagcaaatatccgtttatttttgttgacgaatatcaggatacgtctccgttagtaatagaaatattgcttgaatcattacaaaaagttgttgaacctagtattgttggcttttttggagactcgatgcagtcgatatatgatgaaggcattggagatattgaaaattatataaaaactggaagagtgacaaaaatagaaaagaaacaaaatcgtcgtaatcctcaaaaagttattgaattggctaataaattacgcacagatgggttgatgcaacaggcttcagatgatgcgaatgcaccaaatatggaaaatggtgtgataaaaaaaggaagcgtaaagtttctgtatggaaatgatcttaaaatggcatattcatctgaatttatgaaagattggaattttgaaaattcaaaacaaacgaaagaattacgtttgacacatacccttatagcgggagaggctcattttgaagaactttataatatttacgattctgatccagtattgaaattaaaaaaagatttaaaagcttatgttaaaaagaagcaaatagaaattgaggaggataaaacttttgatgaagtattaaatgagatagagtggttttatcaaaaaggtaaaaatacagggaagagtcatttagaggtttttcttgatgatccaagtaatgaaaagttatattctcatgtaaaagatttaccatattcagtggtgagtaaattttattgggaaaaagatcaattaatagacgataagattgaaaaagacggaaaaataatcagagacgctaaaagggatgcattgattgcacacttgtttagaattcaagatattattgcattatatatttcttcaaattatagagatttattgagaaaaatcggaagaaaaattcagaggaatagtgataagagagaacttcatgatgaacttgaaagtttgcggctaataagccaaaaatcaattggagaagtaattgattttgcaaatgaaaaaagtctttgtgttaaaagtgatgcgtttaattcctttattgaaaaaaatgagtatttatattggcgtgtttcagcggtaccatattctgtatttcaaaatttatattcatatatagaaggaagacgtccattttcaacacagcataaggtgaagggattagaatatgaaaatgttttggtgattcttgattcatcgggttggaataagtataattttgattatgttttagatgattctatttatgatagtttgccgaaagggaaaaaagaatcatataaaagaataaaaagaaggacagaaaaacttttatatgtttgttgtacaagagcgaaggaaaatctcgttttgtattatccagagccttcaagcggagttattcaaggaatggagcgtttgattggaaaagacaattgtgtaaatttaggtttagtttaa

SEQ ID NO: 72026 - DNA, 2076 bp, Bacteroides uniformis ATCC 8492
atgtatatatcaaaagtttcactagtcaattatcgcaattttgaaaatgcttttttccttttcaataaagggataaatactataataggagaaaacgcatctggtaaaactaatttatttcgagctattcgtctaattttagatgacagcttgttatcttcagcatataaactaaatgaaaacgattttaatcgcaatttgaaaagttggaaaggaaaatggattattattagtttagagtttaatgaaatatctaatgatgaagcaatccaatctttatttatttacggaagtggagttgtagaaggagacattacaaagaaagcaacatataatttgttttttaggcccaaacctgaaataaggaaacagcttgcagaattggagactggcgataaagatggtttgaatggcatattagataaaataacgattgaggattatgaaacatttttcacagggaaaagtactgctgacttcaatgataaaaatgttcagcgtgaattaatgggggattttgataatgttatttttaattttgatatggatgaatcaaaatatggaggtcgtattccacatcaattatctataagtcgagaagtttcatttacttttattaaagcattaagagatgtcgtgtcagacttccaagacaatagaaaaaatccattattaacattgcttaaaaataaaagtgaagatataaaggaggaagattttaaacctatatcaataaaagttgatgatttaaataaatccatagaggaattggatgatatacagatgattacaaataatatatctgaaactataaaggaggctgtaggtactacatattctccatcttcactatctattaaatccaacttacctagtgaagctgaaaaattacttcagtcattaaaattatttataggagaaccagaagaagactatgaaggtggtattcatgaattgagtttagggggagcaaatcttatatttctaactttaaaactacttgaatataagtatagaaaagaaaaagataaaattgcaaattttcttttaatagaagaaccagaagctcatattcatacacatatacagaaagcattatttgataagctaaattatactgatacacaaattatttattcgacacattctacccatatttctgaagtatcaaatatttccagcatgaatatattaggaaaatatcgtaattattcagaagtatatcagccatttataggactaggcgaagaagaaataatgaaagtgcaaaggttcctagatgctataagaagtaatttattatttgcaaaaagcgttatattagtggaaggagatgctgaagaaatactcatacctattatggtgaagcaaaccttaggcgttagcttagatgaattgggaataagtctgataaatgtacgaagtactggatttgaaaatttagcacagctctttcataatcatagaataaagaaaagatgcgcaattattacagatttagatgtctcgattacaggagaaaagacggaagcttcgaaaagaggaaagactcgaaaagaaaacttggatgctttaaaaaagaaaaataagtggataggagcattttatgcacctcatacatttgaaatagattttttggaagctggtaataaaaaagctgttttgtcaacaataaaaaaggtgtatattgatgaacaagctattcaaaaatctaaagaagagatagaatcagaagacataaaaaaatacggaaaaagaattttaacaatggctaataaaatgggaaaaggatggtatgctatacttttgggtaagtatataacatcatccactcatattcctaattatatattggatgccattatctttgctaaacctgaattttccaaggagctattattacagattttcacatatgtattaagcacatacaaacaaagtgaagaaattgacaaactgaaaaacgatctgcttacatataaaaaagatgaaattaccttaggtgaattaaaagagtgtttaggaaaagggatacaaaagacagaacctattttatatatattaaatcgactttaa

SEQ ID NO: 72027 - DNA, 1770 bp, Bacteroides uniformis ATCC 8492
atgtttgtgtggaaaaatggagatctgaatccagagcaagagaatgctatattttatgaagatagtgttttattagtagcatgtccaggtagtggtaaaacaagaactctaacctataaaattgcttatgaattatctaaattgaattcaaataaacaatatataatagccattacatatacaaatcgtgcagcagatgagataaaagaacgaatcgaattgttaggaatagatactaaacaattatggattggtactattcattcattttgtgttgaatggatactcaaaccttatcatatgtatattgaagaacttaaatatggatatactattattaacgcacacgatacggaatcctatttaacttctttatgtgttccatatgcatctacaaagcctaaaattacatattgggattgccagtgtttttattttacatcacgtggattggttgtaaaatgtacaaattctcagaaaaaagaatcagtagtgtctataattaaaagctattttcaaaatctaaaagaaaataaagaaattgattttgaactgatcctatattattcatatctccttttaagagataataaaggcatttgtaaaacattgtcacatattttcccttttgtattagttgatgaatatcaggatacaaaagaattacaatatatgattctaggtgccattttaaagattggaaagaataataaggctttcattgtaggagatcccaatcaatctatatttagtaatttaggtggatttcctatgactaaagttgatttagagaaaacaactggattacattttaatgaattatcactaactaagaattataggtcatcatctcttcttgtatcgtactttgattatttcaagacctatgataacacgatagaagcggttggaaaatataaagattatcaaagcattattcgttataacaaaatagtttcaattaatgatttagaggatgaaataattcgcataattcaattcaatattgatgaatgtggtatttctccaaatgaaatatgcgttcttgcaccatggtggattcacttatctgggttgacaagaaatctaatggctcgtttacctcaatacagttttgatggtcctggtatggcgccttttgcacgagatatagataacttttggtataaattatcacgtattatattaacagatgcaacaccatctttatatataagaaggcttcgttgggctaatgaaataaaaacagatctaatatcaataggaattgatagaaatctatctgctaaaaagatattatatatttgcaacagtatatctgtaaatgaacaagaaggcttagagtatttaagaaagtttttctttcagtttctccgtgaattagatgtcgatttacatcaatataactatttagaattgcattataatgctttttttgatagctctgctaaaagaatagaaaagttaagaaaagatggttcagaatttatttcgcatgttgatacttttagaaaggtatttcgtcaaaaagaaggaattactatttcaactaatcatggagtaaaaggagctgagtttgatacagtaatagcatttggacttttagaagattatgttccccattttagtgatgttaataaaatagagaatgcaaaacgtattttatatgttatagcttcgagggctagaaaaaatttatatttaatatctgaacaagatagaggaaaaattcctacgatcatactaaatgaatacaaatacaaatattag

SEQ ID NO: 72028 - DNA, 2058 bp, Clostridium bolteae ATCC BAA-613
atgtatttatcgtgtgtaagaatatggaattttagaaaatatggttatgccaatttagatgcgactcctgcattagaggtttatttaaagggaggattaaatgttcttattggagaaaatgatacgggaaagacagcaattattgatgcaattaaatttgttcttggaactagaagccatgatactttacaaataaaagaatgtgatttttatgaggatttaaaaggtgaacgaagtgaattattgaagatagaatgtgtttttcaagaattaagtgatgatgaggcaggcaattttctggaatggcttacatttgatggggataaggcagagctcagtgttcggatgatagcaagacgtagagataacagaattatgaattcgattactgcaggcatgccagaattagatacccgctttgatgcaattgaattattgagagtgacgtatcttaagccgctaagagatgcagaaaatgaattgaaacatggttaccattcaaggttggcgcaaattttgctaaatcatccactttttactaaagaaaaagatcttcatgtattagaaagatactttggtatagctaatcaaaaaatcgaggaatattttaagaaagaaaaactggaaaaagatgaaatttttggaattgaggatggggagaaaggtgcgaaagaaatcacagggaaattagaagcaactttacgagaatttatgggtaataattatgattcgcatggttatgaaccgataatttcagcaagtagaaatgaattgactagtattctgcgcaggctaagcctaattattgctcaaaatcaagttggattaggttctttaaatcagttatttatagcattagaattattattatttgacatagaaaatcgctttaatattgctttaatcgaggaaatcgaagctcatttacatcctcaggcgcagttaagactaattgcttatttacaaaataaaaatgataatgataatagtaataaaaagttacagtgcattatcacgacacatagcataacattagcatcaaaaataaaaatatctaatctgatatattgtaaaaataataaagcttatatgctagattctgcccatactgctttagaaagtggagattataaatatttagaaagatttttggattctacaaaagctaacttgttttttgctaagggagtcatttttgttgaaggtgatgcagaaaatattctaatgcccgttatcgcaaaaataattggtatgccattagaaaaatatggggtctcaattgttaatgtaggaagtctggcatttcttagatatgcaaatattttcaaaagaaaaaatggagagtgtatagatataccaatagcaatagttacagatttggatgtacgaccggattactattatgaaataaaaaaagaggagaataaaaatattgtttattctatagaagatttgaagggtgcagaggagatatgtgaattaaaatgttcagatattgaaggaaagtattatataaagaaagaagacatttatgaaaaaataaaagaacaaaataaggtgaaaaaacttagcaaaaaagtaaaggatagtattgaaatttatattaagaaagaagtaagtacagaactatatagaagttttatcttggagaagaaaaaggataaatattgtacggataaagcgagattatttaccaacaattggacattggaatatgatattgcatttagcactttgcgagtttacttatatgcatcggtgatggctgcaaagaaagtaaaaaagcaggattccatagaaattaatatatcagaagaatttttagaggccaaaaggataatagatgagtggtccgctacgggagactctcaggaaataatagcgtataagatttatgaagatctgctgttgaaaaatgcgtcaaaggcagtaactgctcaatatttttcagagatacttgagcagaatgttatcaccgttaatgctataatagcgaaggatgaaagtctttcttatataaaacaagctataatgtatgcttgtggaaaggaatactaa

SEQ ID NO: 72029 - DNA, 1935 bp, Clostridium bolteae ATCC BAA-613
atgcttgtggaaaggaatactaattacatgagtattgtgaactttatagacgaggatatccattacgcagaaaagatattattgggaaataaaacttttgatataaatgaaaaacttcctattatcaaaagaatggataagtctatttctgttatggcttgtcctggaagtggaaagacaactgcgcttatgggaaagattatagcacttgtcaatcatttaccacttaatgatggaaagggaatttgtataattacacatacaaatgtagcaattaatgaaattaaaagtagactaggaagcagaggagatatattatttcaatatcctaattttattgggacaatacaggcatttacagataaatttttgtcgattccttttttaaaacaggcatacagacaaggaattactgctataaatgatgagtattattatcaaaaaatgtttcagagaaaaaaagagattactattctaaagaagtatgcatatggaaaatgcggtagagactactcaaaaatagataactatataaaaagtattgtattgcggagaaaagatggagaatttgatttctgtactggagacaaatctttaaatttaaaaaacaagtcatcagacacatataaggcattatattcgctattggtagacagtttatttagtcaaggaatattacgatatgatgatacatacttgttagcacagatgtatcttgaagaacatccagaattgtcatactatttttgctctagatttcaatatgtttttatggatgaggtacaggacaataggggagtacagaatgagatattagataaaatttttttgccggagcgagtggttattcaaaaatttggagatatggatcaggctatttatgatgataaagaagaggtggagcgtaatgttctggaggatagatatgagatctcaaaaagtatgagatttccacaaaatattgcagatattattgaaaatttacgagttgagccacataaaaaaactttaataggaaatggaaatgcagatgcattcatttacatattagtttttgagcatgataaaatctgtaatgtaaaagataaatttgtagatttgattctggaacataatcttaaaaaagaaaaatcagtatttaagtgttgtggatgggttggctataaagaaaaagaagaacagttatcagttaaaagttattatcctatgtatatatccaataaggatgttactattaaacaggtaggcatgagttttcaatccattttggaagaaaatgcaaagcataatgtaacagtaggattaatttataaatctgtgatagtatgtattgtaagatatttgaatatgaatgatattacatttgaggaaaagcagattacgtattccatattagaaaagtatataaaaaacaatatgacaatagaatggataaatttacgaagtcttattgtaagagaggcaacaaaaattaagaattacgatgaaacagcatttaaaataattggaacagaagccttgcatatagtatttcatttttttgaggagtgtaatgaaaaacagtttttaaaactgtttgaaagacaaactaattctaaaaaagatgtcttgtataattgttatacaagggacggtgtatctgtactatttgatacggttcatggagttaagggggagactcacacgggaactctatatgtggaaacgtattttaataaaaaaacggatatgcaacggattttgaagttcatgagtggcagcaatattaagaagatgggagcagatgagaaaaaggcattaaaagtagggtatgtaggtatgagtcgtgcaacagacatgctttgtattgcaataggagaagatacctttaaaatgtatgaaaaggaaatagaggaattggaacaatctagaaaacttcaaatatgtcatatttaa

SEQ ID NO: 72030 - DNA, 1746 bp, Intestinibacter bartlettii DSM 16795
atgatattaaaaaaattagatataaataattttagaaattttaatagtataagtatagagttagataataaaaatgttgtatttggaatgaatgatgtaggaaaaacaaatttcctatatgcattaagatttttactagataaagacattagaaaaaatggatttatgcctacagattatcatagacataatactaaagaaaagatacagattacattaactgttgacttatctgatttttatgaaagtgaagatacaaaaaaattcgtatcagaaactagagatggtggagttagaacttcagatagaggtgatatattttatataagagttgaaggagaatataatgaagaggaggtatttggagaacctataatgaagtggggggataatttagaagatcttaaagatatgcctttcagaggaacatcttactcaatagataatatttttaaattagtttatataaacccattagttgacttacaaaaagtatttgaaaaaaatagaagatatatttttgatgaaaattcaagtgataaagaggacaaaaagcttatagataaaataaataatttaacaaaagaagttaatgatcaaataggaaatatgtcaattataaataattttcaaaaagatataacagatgaatataaaaagcttaataatgaggaattaagtatagaaataaaatcagaaatggctataaatgggttcttctctgatttaatgccatatataaaaagagaaaatgatgacaattattatccaacttctggagatggaagaagaaaaattttatcatactcactgtttaattatataaataaaaagaagtatgacaacaaaatagtaatttatttacttgaagagcctgagaacaatcttcatagatcaatgcagatatcattatctaaacagttatttgatgatgatacatataaatatctttttgtatctactcattcttcacaaattttatatgaaatggataaagctatgttaataaggattcattctaaagaaaaaattgagtgcaattcctatctttataaaatagaaccaaattataaaacagataaaaagaagttaaatcgtgaattttcaaatgctctattttatgagaatgtattattgatagaaggaccttctgagagaattttatttgaaaaaatattagatgaggttaatcctgattatgaacaacaaggaggttatattttacaagtatctggaacatattttaaaacttatattagagcattaaagggtctagatattaaggtaatagttaaaacagataatgatttaagagggaaaaaaggaaatatacaagaatatgagttattaggtattaatcgatgttgtgatttgataaatatggataaaattgagaatataattatgccatttaattcagaaacaaaaagagaagagaaattaactcaattaaaatctaagaaaaaagaattatataaggaatatgaaagtttaataaaccaatttaaacaaaataatatttatctatcagaaatagatttagaaaatgacttattcagtattataggtccaaaaatgtctaaatatctgcaaaaagaagaacataaagtagtttcatatttacaagatagaaaattatttaatatggttgaacttattgaacatctaacttttgaagattgtgaagctgtatatgaagatgaaaagtttaagtgtttaagggagatggttagatttgatggatag

SEQ ID NO: 72031 - DNA, 1509 bp, Intestinibacter bartlettii DSM 16795
atggatagaggagatagagagtctattttagcagatgaaggtaatgttattgtagtagcgggggctggatcgggaaaaacaacaatattaactaaaaaaataggtatagatcttgaaaataataaaaaacattataagattgcagcaataacttttactaataaagcagcaaaagaaataagtgaaagattaactattagtacaagaggacattttttaggaactaatgatagttttgttgaaaatgaaattataagaccttttatacaagatgcattgggaaataattattcgaatgaatttgaagttgtatacaacaataagtttgatacatttagtaaaggactagagcttataagaagtcaaaataaattaggtgtatacaaagataataagaaaaattttaagtttgaattagccttaagtatattatctaaatctagagtagcacagcaatatattcaggcaagatattttaaattatatatagatgaatatcaggattgcgatcaggacatgcataaattatttatgtatattaatactaaactagatataaaattatttattgttggagatcctaagcaatctatatatcagtggagaggtgcagcaccggaacttttttatgaaatgtttgaaaataatgataataattttaataagtatcaattagtagagaattttaggtgttgtaaagatatacaaaattattcaaatcttttagagagagaaaagaatgacctatataaaaatgttgaagttgtaaataatgttataggaataaaaacaagcgattatgaatatgaaaaagttttggagtatttagatttaaataaagaaatcactattttaataaggtgtgctaaaagcaaaaaaagggaaatagcaagagagttagaattgtatttaaagtcaaaagggcatgattttatatacataccgaggacaccattagatgatttaggaactggaaataaaaatatattaattgaattagctaaatatattaaagatgaaaagtatacaatttatgatttgattaataatctaccaattaatctaagttcagatgaaattaaagatataaatagtttcattgaagaatttaagtgtaaaaatatttataagataaacatagactcaattttaaaacaattttttgcaaagttagaaatagaaattaaaggtgaagaaattattaaatttaaagaaactatattaaatgataaatatgataattcatataatggaattgaatataagcataaaataatgacaatacattcttcaaagggattagaatttgagcaggttctattacatgctaacgatttcaaattacacttaaagaaagataaaaatgaacattatgtagcaacaacaagagcaaaggatagattagtaatatatttaaataatgatgattatcttaatcatgtaaatgatgttgtgaaaagtagtgatttgtataatatttcaaacataatgaaagttattactttatag

SEQ ID NO: 72032 - DNA, 2034 bp, Clostridium scindens ATCC 35704
atggcacttacatcatatacctgtgctatcagaaaggaaattggcatgcgattatcaaagataaaaataaaaaactacagattgcttattgatgctgaattggaagttgattcgaaaacaaccttaattgtgggacgcaataatactgccaaaacctcgtgcttcgagtgcatcggtaaagtattggatggaactccgttttctttcaatgattacccgttgtcaaaaagagaaaatctatatgctaatattacttcgttcatggcaaaggaaattgcttttgaagaactctgtgaacggctggaaccaatatctatagagttccttgtagactattccctagatgacccggaggataacttaggtgcattgtctccgtttatcattgatgtagatatcgataccactacagcattgattcgtgccgaatacaaattgaaagcagacgagaaaggtatttggaaaattttagagccaaactattatgaaaatgggaacttttctcctgctgatgatgtccataatgctattataagcaatttccacaagctttttgaaatgacgatttatgcaataaatccccaaaaaccagatgaaaagcagagtaaaaagcaggcagagctggccgatttatttccgtttcacattatccaggcagagcgctgccttggtgaggacggaacccaagacaattctttgtcttcgcttatctctgatttctttgacatgagtgaagatgaattagatccaagtgttgctgaaaaagtcaaggaacttcgagctattgttgaaaacgctaacaaaaatgttcaacagcaaagcgatagcatcctaagtgctctggtcagcagcgcagttgggtttggttatcccaatggtgaagaactacagttaggagttacaacccaactaagcattgatgaccagataaagaatcaaacacaactttcttatactgctggaacaagcaaagagcgactccccagtacctataatggtttgggatataaaaacctaatcaaaatggaatttcttcttgcagcattcgccaaaaaggtagaaaaatgtggggacgcctgtataccgttgctttttatcgaagaaccagagtcccatatgcatccgcagatgcaacacgcctttgcagagtacttagaagcgtttcttgcgaaaattacttctgtaggaattcaaacttttttaacttcgcattctgctcatattgcgaacacaatggttttctctaaaattcgatatgcgcaaaaaacaaaggccggtgttatctataagaacctaaatacgtttgctcaggaaaatccttccaacaccgatttcatccgaaagtatcttactctaaccaaatgcgatttattttttgctgataaagcaatctttattgaaggggcgtcagaacgtttgttattgcccgacatgatcgataaatgcgctaaggcgggggactttgattctcgagaatataaactacctgctcagtattatgccttggttgaaattggtggtgcttatgcctataaatttattccgttcgctgagttcttgggaattccatgcctgattcttactgatttggattctgtatctggccaaaaaggcgcgaacgggagaatatattataattccgttccagtttcatgcggtgaaacaacatctaatgaaactctaaaatggtgggtccggaagaacaaaggactttcagaggatgataatactcaaatcgctctaactgatattacatcgatgtctcctgctgataaaactcgatgcaaatgtcacattgaattccaaacaacagagaacgggttgtgcggacattctttggaagaagcaattcggaatgtcaaccgtgcacattatgaattaggagatactcctactgaaaacgatcttgagttttcggggaagagtaaaacagattttgctcttaatctcatttgtgaatgtgaggattatgctattccagcctatattaaagatgggctggtgtggctcaatgaccaacgggtgcttgagtaa

SEQ ID NO: 72033 - DNA, 1746 bp, Clostridium scindens ATCC 35704
gtgagtgaagaacacaaaaggacaaactacgaccttgcaaaagctgaagccgataaagtagatgaacaaatcatttccgcacttcaggatgggattagcttccgtgtggaggctggtgcaggctcaggtaagacatattcgctaaacaaagccattgaatggattcaggcaaacaagtggacggagtatcgccgaaagaaacaaactgtagtttgcatcacatatactaatgctgcagtggatgtcattgctgaacgactatcaaaagattcatttattcttccatcgacaatccactcctttgcatggaacgctatcaaacagtatcaaagctttctcattgatattgtcacaagcgatcctgacttcttgccagatgaaggagattttttcaaggtcacagaagttacatataccttggggcaccgttacaaggaaaatggaattcaatatttataccacgatgacgttctaaagctcttttgtctgcttttagataatgcaaaattccggcatgtatttgcaggcaagtatcctttaattttaattgatgagtatcaagattcctataaaccaatcattgatcgctttattaacttctttatcgcagagaaaaaaggccctcaattcggtttttttggtgatgcctggcaaaccatttatcaatccaacaaggcttgtggtctaattgaaaacgagaacctcgcaattatcaagaaaggctcaaatttcagatctgcaccacggattgttcagcttctaaatgatttgcggcctgacttaccccaaacatctgcaatagataattttgacggagaagtgattgtaattacctgtgacgattacactggccctcgccggacagaacgtaatctaaaaggcgaattacctgcacaagaattaaagattcgtctaagtaatgtcacagagaagatcaagcgtgaatcatccgaagaggatgatctaaaagttctaatgataacgcataaagtcctcgctacgcagcaagggtacgaacaacttttagaaattttagctgacgggctgagagataaagaagatccgttcctgctgttttttatggatactgttgagccaatttataaagcacttaaagattcaaatatgcagttgctttttgatacactcggaattaaacgctttcccattaagaaaaaatccgaaaaagtcaagtggaaagagctacagcaacagctggaagatgctcgcaccaaaagagcaattgatgtatttgagttaatcaagcggaccaaattgattcctattcccccaaaactggacggatggtatcatctatatcagaaagcaccagacaccgtgtatgtttctaaagcttcaattcagtcatttttagaattggactaccttcaatttaccgcagcaatcgattttttgtttcctgatgctatgttttccactgaacatggcgttaaaggcgaagaatatgacaatgttgtctttgttatcagcaaagggtggaatctatatcagtttgaaacctatgcaccgatgataacaggacactctgatgttcccgaaggaaagcaagcttcttatgaaagaaacagaaatctattttatgtgtgttgctcaagacccaaaaagagattgtttttctttgtgtcggttccagtagatacagtgttcagagcttttcttactaaactggttggagctgataatatctatacctatagccaatatcttgaaacagatctgaaataa

SEQ ID NO: 72034 - DNA, 2241 bp, Roseobacter litoralis Och 149
atgttgagtatcaccgcaattggtgtaagcttaagattctattgttattttggatattcgcttatgaaaatttcgtcgttttacctcaaaaactaccgcagactgattgatgtagagttggtgctggacgaccaaaaagcgatactggttggggcaaataatagcggcaaaacctctggtattggcgcactatatacgtttttgatgcggcctgaaaatttgcgggtgcgggatgtatcgaagcagcattggcaatctatctcatcaatcggagtgcagcttggagcggacgagattagtactgagcaactggaaatgctaagaacccaactggcaagttttttacctcggctggatgtgacaatttttgcagaagcgagcgaagcctatcgggccagagatattctcccccatcttgactggcggggaggatcacttggcgtcaggatcgcttatgaaccagcggacatcgcaaagttggcgacagactacagtaaggctagagaagtggtggcaaagcatgacggcgttttgctttggccaaagagccttttcgactttctagagaagggtggcaatttcaacaaatatataaagcagaagcactatattcttggtctcgatacggcgaatgcaatagacgtagatgaagatggcgatcaagcgggaaaatcagaacccccccttcaaacactaacttccggtgcgttacgaaaactgatccgagtggatgtgatctccgaacagagagggcttggcaccgaggatagtgctaatgaccaagggccatattcagaaaagcaacggctgcataaactgcttcgcgaatactacgaccgttttttaaatcctgatgaatttccagaagcgggagatattgaggtgctccaaaaacaacaagagatggaagaaggctttacgaagcgccttgcgaaacagttcaaagcgccattagaagaactagtagacatgggataccccggtattggaggtaatcctaccgtggaaattgctgccaaagtcagtggcacagacgcactccaaaagtcttcatcggtccgatatcgctttgacaaaaaccaagacgaaaaccttccggaaagctatcttgggcttggataccagaacttgatctacctcacgtttcggttgctcgggtttcgtgacaggtggatgcgagaagggaagtctgtttcgtctgacgccgatttaacggaggaaatcgagcccattcatctggttctagttgaggaaccagaggtcaacttgcacgctcaggtgcagagagtgtttatcgcacaagcttacgaaacactaagaaaacaccctgcgctgggtcagaattcgacttttcagactcagttagttgtgagtacgcattcgagccacgtcgtaaacgacgtcgatttcaaagaccttcgatactttcgccgcagttcggcagatgatgcgataacaatggatcacacctccattgaaaatatgtcagagctattctcaacagctgaagatgagatgaaatttgtcagtaaacacctcaagctaacgcattgtgacattttctttgctgatggagtcatctttgtcgaaggtcaggccgaacggcttttggttcccgaatttattaccaataaattcaaagggctgtctaagaggtatttgtctattttggaagtaagtggcgctcatacgcacaagtacaaagctcttgtcgaaaagctgggtgtggtaacactcgttatcacggacttagattcacgggatgccgcaaagcaaaaatgtgcgcctaaaaaaggcgaaagccaaaccacaagtaactatacactcacgagctggtatcctcaaaagagcttgattgatgctctggttgcgcttcctgcggagccctcttacagcaaaaattcagccatgccactatttgtggcttaccaaaagcctatagtactcgatgaaaaagaagttctcagcagaacatttgaagatgcactgattcttgcgaatttcgtccacccacacttcgacgacatggctaagttgcaggcagtcaaaaagagcttcaaagacggttcaacgctactcgaagaggccctttttgagtatgttaaaacgcttacaaaaggtgacttcgctttcgattgccttttttacatcgcttcagaggctgaccattccttcgaaccgcctgcatacattcgcgagggtcttgagtggttgcaagcccagctgtcccctagttcgtga

SEQ ID NO: 72035 - DNA, 1941 bp, Roseobacter litoralis Och 149
atgcccaacgatcacactgtagcctctaccaaatcaatacagcacgacaacccagtcgatgcaggcattcgggactgcttgaagttaggatcaggtaagagctttatcatcttcgctggagccggatcggggaagacgttttcacttgagaacgcgctagaacatctaaagttagcgtatcaagaagtgttttcgcgtcttagtcaacaagtagctgtcgtaacttttacaaacaacgccgcagacgaaattcgagatcgagtcgagcgaaacccaattttttctatatcaacgatccacagtttttgttggcacgcaattgatggtttcaacgcggatattcggcagtggtttttgtcagaaataccaaatgaacttgagaaattgaaagaacaggaacgccgaggccgtgctggtaaagcttccgatgcaagaaaaaggagtatcgctcgtttaaccgaaaagatggagtggttagccaatccgcaggaattcaaatatgatcctaatggggtaaattcagctcaaaatgctcttgcgcatgccgatgtcctgaaaatttttgctcattttctaacggttaaaccgatgatggcagaagttcttgccaataagtacccgttcatctttgttgatgagagccaagacaccaacaaagatgtgatcaacgcattatttacgctacaaaaaacacaatttgaaaagaccgttgttggtttgtttggcgacaggatgcagcgcatttttggtggtggagagcctgagctcggcaaatctcttccaagcgaatggaaagaattcgacaagcagatgaatcatagatccgctaggcgcattgttgggctagggaatactatcagaaaagaggatgatgggcggcttcagtatgccagagatggtgctgccgagggtctcgttcggtttttcttgcttcctcatggaaccagcgacaaagatcaggtcgagcgacgtattcggaatatcatggcgaagactactggtgatctagcttggaatgtgcccaaaaccgaccaaaccgcagtcttgctacttgagcacagaatggtcagccgtagactgggctttacaacgttgtcagacgcactttctaaatcaaggacgattaaggagcgactttacgagggagacagcttagaattgaattttttttccaacactgtcttgccattggtggaagcaggccaagctgaagacatcttcgaaacgatgaaaatcctgcgagacaacaaatcgccattactgcatgaaaccgtattctctgagaatgaactcgaccctttgcttgccgcacgcacggccgaaggagcgctacggtccacgatatcgaacagcgacgtttcattaagggacgttttggccgtcattgctgaacacaatcttttgacgatcccatccaagctcaggtcattcgtgaccatccaaaacgaagtcttgccagtaattgacctcgagtttgacaatgataccgctgtccaagaaacttccgaaacgccgtcagatgatgacgagttcgacgcatgggcggccgcacttgaaacaccgtttcaacaagttcagggctaccgtgactacagtactgggaattcaatttaccgaacacaccaaggtgtgaaagggaacgagttcgagcgtgtaatggctatcatggatgatgatgaagccggtggcttcaatttctcctatgaacagtacttcggcgcgaaagtgccatctgcagaaatattggcgaaggacaaagctggtgaagaaacggggttgggtcgcaccaggcggctattctatgtgacctcgacacgagcgaaaagaagccttgctcatgtaatctacacagccgacgtcgaacaggtgcagcagaacttactggcgcgtaagctggcaacagaaggagagatcttgttgttcccattcttattggattga

SEQ ID NO: 72036 - DNA, 1950 bp, Providencia stuartii ATCC 25827
gtgcatattgagagaataaatctacagaactttagaagcttcggaccggggggacagagcatagctgttgacccaaatctaaccaccttggttggagcaaatggtgctgggaaaacggtcttgatgcaggccttacagcgaatgttcggtatatccaatgaacagcggacgattcgccgtcaggattttcatattccatctttggacgaagaaataccctgtaagcgaactctcatgcttgaagccattgtcgccttccccgaactggatgatgaagacggggatcactctgtgataccagatttctttcaccatatgagcgttacagatgagggtggaaaactgaagtgccgtttgcgcttggacgcggaatgggaagatgatggatcaatcgacggatacattacgagtcagttccgtgctgttacgacatggggtgagccagtagaggctgattttcacaatgtgcgcccagcagatcgttctcgaatccaattgatttacgtcccagccacacgatgcgcagtttctcaggtatctgcctttctgaaaagtcgtctttggaaggctattaactggtcggaacaagttcggtcatcttttactcaaaaggccacagagctgaacgaatcttttgaaggtgaaaatgcgatcagtaccgttactggaaagctcacagagcgttggcaggagctgcactctgctggaactgatagtacaccgaagtttcgtctggtcgaccaacgttttgaagaatttgtccgtaaggtagaggtactgctgcacccagatgaaagtcgtcgggatcggagtgttgatgagctaagtgatggccaaagttcgctgtttcacatcgccatgacttctgccactctcgatgttgaaaccgagatcttagcccagccagagagtgaagattttctcggtgcagacttgcccttgccctcattgactattttggcgcttgaggaaccggagaataacctagccccatactatctatctcgaatcataagtcaaatcagcagcctagtgcatggtttaagagctcaagccatactatccagccattcgcctagcattctcgccagaatccaaccaacgcaagtaaggcacttcaggttagcaacagaatcaaacaccactgttgttcgtcaactgactttacctgatgaagagaatgaagctgcaaagtacattcagcaagctgtgagagcctatccagagttgtatttcgctaaagtcgtggttctcggagagggggcttccgaagagataattcttcccgcaatatcagaagctatgggcataccaatagataaatcttttgtcgccatggttccattaggggggcgccatgtaaaccacatgtggcgtttgctaacagatttacagatcccctttctcacattactcgatctggattgggggcggcacggcggtggctggggaaggattaagaacgcagtcgccaagttgatagagtatggaatacctgctgaaagtatgggagtacatgctgacaggggggctgtaaatctggctgcatttgataccttgaggtgtgataattttgaattaatgagtcgttgggttagctatcttcgtcaacccccttttaacgtatacttctccagtccattagacattgattattcgatgctaaaagcattccctgaacaatactgtgttgctcccgacgaaagctctactgggccatctagtcgtggggagcctggttatgccgttatgggcgacgagggaaaccctgaattttacgctgacgatctgcttaatttgcgctggtacagatacctattcttgggaaggggtaagcctagcacgcacattcgagtacttggaactattccgcgagaacagttggctcagaacgcaccagaagaactacgagctttaattcgatctattcacactacccttcaaaactag

SEQ ID NO: 72037 - DNA, 1893 bp, Providencia stuartii ATCC 25827
gtgaagtttatccgacctgaccactggcagccccaagggatcgacgatcttgagccaaatgcttggcaagcactaaggcaacgagagtccacaagcattatcgctggccctggagccggaaagacagagtttttagcgcaaaaggctgcatatttgcttgagactggtctatgtccaccaaacaaaaaaattctggccatttcatttaagactgatgccgcaaaaaatctcgcagatagagtgaaagagcgttgtccagaagaactcagcaatcgatttatttcgatgacttttgacgcattcactaagaatttagtggatcgatttcgcatggccttgcctgagcatcatcgcccatcaaagcgatatgaaatctcttttccatcttctcaccaagagaagctgcttattagtagtttcagtaataatttttggaacgcagtgggtatctatagctttacgcaaagactccaaaacatgaatcagtttatcggaagtgtgcgtataggagccccaaatttgtcatggttagaggaggaatttttaactttttggttgagtcaacaaataaactaccctgactgtatttccagagtgtcatttctggtgctaaatcgacttgctgaatatatcgtgcgcactaacgagcatgttcgtagatctattagagcatcataccctattgtctttgtggatgaattccaagataccacgtttgctcaatatgattttctatcttctgtttttaagtcgagtgaagctgaggtaacagcagtaggggattacaagcaaagaataatgggttgggccggtgctaaaggtgatgtgtttcatcaatttgaggctgacttttcggcacatcggcattctctactcctaaatcaccgctcttcacctgaattagtcaggatacaacatgttattgcacaagctattgaccatgaagtgagagaggttcagacaagtaatatcaatttaatttctggtgatgccgcctggatttgttgtagttacaatataaatcaggaggctgctcatttggctcagtggatagcaaatgacttgctagataggtcactgaatccaagaaactactctattctggtacgtcaaaaaccagaagattatgaacaacagctatcttattatctcgctcaacatggactgagtttacgaaatgagagtgtgaaaataggtcaaactacattacaagatttgcttgctgaagaactgaccattttgttttctactctgctaaagctgggacttggccgtcgaaatgcacaagcgtggaatcaactatcatcagatatacagattcttcgtaatacgaaccaggaagatgaaaaagcactacgacaggttgagcgtgagctaacaaagtttatttctacacttcgggtgttaatgcaacagcctcttacacgggaaaatggtcgagatgtatttgagcgaaccataaaatttattaactcagacgatcttcgcagctccttttctcgttacgcaacaggagatttacttggaataaacttggcagcacttgaagagttttttacaaactgtgttgatactcagatctcttgggcgggtttgctagatgagtttgaaggtacgaaccatattcctcttatgactattcataaaagtaaggggcttgaattcgatacaactattttcatggggatagacgataacgcttggtgggcctataagcaaggtgatacggaaggactatcgacattttttgtagcactgtctcgcgctaaacaaagggctattttttcctattgtcagcaaagagggcaacgaaccaaagttgcagatttttatgcgttgttgacggccgctggtgttcaggagtatgtgatcccaccgagtgtagtggcatag

SEQ ID NO: 72038 - DNA, 723 bp, Coprococcus comes ATCC 27758
atgaaagtagcttttcaggactttggatataggctaaacgctctttctgcagaatgcttttttgtaaacggggtattcttagttgaaggtgtatctgaagttttattttatactgcattagcaaaagagataggcgtagatctggatagaacaaatatctccatattgtcagtagaaggtgttggatttaaaccttatattgcagtctgtaatgcattaaatatttcttgggtgatgcgaacggataatgatgtgtttgcaaaaccaaataaaaaaccaacaaagaattattatgcaggaatatctcgtgtaatggggattttgactcaatttaaagatgaagataacgaacttattaaatactggaatgaacatgataacgaaaacgagtgggaatataaaaagaaaccaccaaaagaagcgatagatcttaatacatatattagggaagagattacccaatatggtatatatctttcaatgtttgacttagaaacagatttggctaaaagttcgattaaaaatattttaaaagaatattatggaaagaagagagaaaattctctgataaaagctatgcaaactcacaaagcaaaaaatatgatggattttttgagtaaaaaacgttctgaactgggagtactgagagaagatgatatttcgaaaccattgattgcccttagaagtagcgtagaagaaaggattcatccaaaacatgattaa

SEQ ID NO: 72039 - DNA, 837 bp, Coprococcus comes ATCC 27758
atgaaccaacaaatgaacaaaaaagcaattctaaattataacggaaatactgtagttacggcaaatcctggctccggtaaaacttacacagtggtagaaaaaataggaaaagtactgcatgatcttccgagttataaaggaattattgcaatttcctttacaaataaagctagcgatgaattaaagaaaagatgtaaaagaaaggggataaatgcaaaatcatctttctttggaacaatcgataagttttacatttcggaaattattattccatttgcgagtcatttgacacatgtaatgcctgagtatcaggtggtagaatccacagagacagaaaaacattattcggaattaggaatgattaccgaaaatgttacaaaagaacagggggcattgctaaaagaagcattatgtaaagggaaaatctttttaaatatatctggtgaaatggcatggtatataatgtgtaatgtaccaggtgtaaggaaatatatgcagtcacgatattcccatgtgttcattgatgagtatcaagactgtggtaagatacagcacgatatttttcttgcattatgtgagatgggaattataggggttgctgttggagatgtaaatcaagcaatttatgggttcacgaatagatttccacgatatttactcgaattaataggaaaagatgattttgaacattttgaattaagcaaaaaccatagatgtcatccaagcatatcagaatattccttatgtctgtatggtatttcaaaagaaattattgaggataagagaatttttagagtgtctgtggatggaaatgaagtaaatatagcaaaaagatag

SEQ ID NO: 72040 - DNA, 2349 bp, Citrobacter youngae ATCC 29220
atggatgagggtaatcccatgcatttagaatttttaaccatcaagaattatagaaagtttcgctctacggataataaagtatgcttcgttaaaccagaagttatagatatgacaacagaaggtgagcaatcaaaatcagtgattgcgccatcgacaaccttaataattggtaagaataacgcaggtaaaacaactgtcatcaatgcacttaaaatgctatgcggaaacgaacaacccttagcatctgactttaacttatcatacttaaatgagttatttagtctttacaaacgatcttataacattgatcaagatacaaagttcgaacaattagaaacaccgacattagagtttactttagcaattaaagtagatttcaacgataatgatttaatgacgaacctatcaccttttatatcaattagtgagggtgagagtggaacttccgtgagtatacgcattgtagtcaaaattgtttattctgaagaaactgcttttaaagaagaagttaagaggatctttaatttaaaaaattcagaagggaatacactagatcataaacagcagtttgaaatgttttacttaatgctttcaaaagacactaactgttttaaaaatgaggggaatctttatcaaactaattttatcgatatattaggtgaacccgcagaaaaattctcacttaaaaaattaattaacatcaaagaaataaaagccaatcgtcatcttaaagaaggagttcttagcgatgttttcaataagatagtttcatttcaattcactaatgacactaaatctcgcacaggtttggaatccagcattcatctgattaaccagcaaatatctttaagtgtgggtgcaaaaagtactgatatatcacaggttctttgtgagatagagcactcaaataaagtagatttaaatctatcgggaaatgttagttatgatgcgataatgaaaggactgataaaatataattttatagatggcgaagattatatcccagaagatcagtttggcttaggatatataaatctattaaatataatcggtgaaataattcattttgtagatagctatgaaaacaaaagccattttagtaaagttaatctactatttattgaagagcctgaagcattcatgcaccctcacatgcaagagttctttattaaacgtattgataatgcagtaaaaaaagcattggagatagcaaacaactcttcggttataaaaaaaactcttcaatgccagatagctattacaacccactcttctcacatcgttaatagcaaaatccatagtagcaatacattcaacaatctaaattacttaacttcaataaaaaaatgcacaaaagccattaacctgactgatgaatgcgtagtctctagtgaagataatgatgctaatgaaaagctcaaatttataaaaaaacatataaaatacaaagtttcagagttgtttttttcagacgcaattatctttgttgaaggtattactgaggagactttgttacattattatttggaaaaacatccaattcttagtaactactatatatcagtattcaatatcaatggcgctcacggcaaattatactttccattagccaaacaactttgtgtccctagtctaattgtgaccgacatagatatcaagcgagaaaaatgtgaaaaatgcaaatcacataaagaaaatgaaacttgtctaagatgtggtcaacaggcaaaaaatggggatattcctttccgtccgggtactgcaccaactttttatcaaatcaccagtctcagtggtcgaactacgactaatgcgacacttaaagaattgaacataaaactcaaagataaatctgaagaagaagcaggccaattagataatatagaattctttagtgacgaaaacctttacgttgtatttcaaaaagatccaatcgaaggccaatacgcaactagtttcgaagaggctttaattttgacaaattataacaacgatgcacttaatgaagcactaaatgaatgtaaacctggtatttatcaagaaatattgaatagtagtggtacaaaacctaataaaaatttaatctctcactcttataaattacagaaaaaactttctgatagtaaaagtgatttttctaacaaattgttatttaattttctctcagcagaagatattgaagacttaccaaaactaccaaattatcttgaggatggattaaaatggcttgcatttaaaatacaaagagatagtgcacctccgacaaatgaatacggtatggtcgttaaccaagatgttgtaatcccgaaaattgaaattacggcggagatagctgatgttaacaaatga

SEQ ID NO: 72041 - DNA, 2118 bp, Citrobacter youngae ATCC 29220
atgttaacaaatgaaattaaagaactggaggtgcaaaaaagcgtcatcaatcatgttgataatttcaacagttttcgtttcaatgctggtgctggagctggtaaaacctatgcgctgatagaaactcttaaatatgtcactataaataaaatcatagctactaggagttcccaaaaaatagcctgcattacctataccaatgttgcggtaaatgaaataaaaaaacggttaggaaattcagaagtagttcacgtttcaactattcacgaaatgttgtgggatataatcaaaagagcccaaccacagcttttgatatgtcataaggagaagataatcaatgtgatagatgacaataaaaaagaacttaatcattctgaaaaagcgaaattttttatcaatcttgatgaacccaaaaagcaagaattcattcaatatatttttcagactaaagatattttttatcattataaagatcatagcgctgcatcttttagaaaagcttatggggattcaacaattgagaaaccttctcatctagatagttttttaaaaaatgtttctaactttaaattcgttgtcagtattttttataaaatacaaagacttgaagagtgtcttgcccggattgaatctaataaagaaaatcgtgtttattatgacagtaaggtcaatatcgatagacttcattatatgaagttcagtcatgatactctacttgagtatgggttaaaactagtcaaaacttatccaatgctatgtcgtattattattgacagttacccttattttttcattgatgaatatcaagatactaatagtcatgttgttggtttttttaaaactctttatgatttttcaaatcaaaataacaagaaatggatggtaggttactttggcgacacggcccagtgtatttatgatgatggagtaggagaaaatatcacaaaacttcatagcggactttatgaaatagataaaatattcaaccgccgctcacatcaacaaataattgatgttgcaaacaaaattcgcgcagataaaatagttcaaatacccatttcatcagagagtaataaaggttccgttattttttctcatcatcaatccaaggagaaactggaaatagcaaaagagtttctctcacattataaatcttatttagctcaaaccagtaaaggtagggataatgacgattgcaagatccactgcctagttttaactaataggctcatggcacagttcaatgatttcgaaaatgtttaccaagcatatcaaaactcaatgatctatcatgaaaacctaaatactcaagtgttatccaagcaattagaaaaactccacccaaccatattgattatctataacctaacaaaattatatcaagacattcttcaaaataatgtttcttatcactgtatttttggaacttatggtgagggactaagtttttcttctgcaaattcaattttacgtgaactgcaaaataaagaaattgtatcacttaatgactggattgaactaataacagaccgtcttgaatatagtgaagcaaaaagttctctagaaaaaatactaataaaccgcattaactctgacaaagaaaaaaccgtgtccccccatttatttaagtctgcaattataaacagcataaatgtactcatgaatagtatgtctgaagatgaaactgtagctgaaggtaaaatacagagtattttatccttaccaataaaatcgctaatgaattggattaattttatagatggcacagagattggtgatattatctaccacacctaccatggtaccaaaggtgaagaatacaataatgttgctattattttagaacatagctttggaaataaagacaagcttaaatttaaaaactatttcaaatttcttcaagaaaataaagaatctcgcgctcatttgctaactgatgatattttcaaagaaaaacataataatactaaaaatttgctctacgtggcttgttcacgagcaataaaaaatttaagaatattatatttagatgatatctcagaaataaaagaaggcatagaatcaatctttggtcagagcaatctctggttatcagattcggataacataactgtgtaa

SEQ ID NO: 72042 - DNA, 2235 bp, Rhodobacterales bacterium Y4I
atgaaacttagacgcattgaagtcttcaattttcgcaaattgcggcgcgcccgtctggatatgtcggacaagcagactctgctcgtcggggccaacaacagcggcaagacatcggccatgaaggcgctgcgcaaattccttaaggatcgcggcggtatcgacacgcgtgatgtaacagcctcaaactgggccgcaattgaacagatcgcgggagcctggacacaggaggtcgaggtggatctcagcccgctcctggcccagcttccgttcattgacgtctggctccatgctgacacgtcagaactgcaccatgtcgcgcacctaatcccaacactgacctggactggtggcttgctgggcgtgcgcctacgcttggagccaaagaagggggcggacatcaaggcgcagtacctggccgcacgagatgccgctcagacgctgcaacccggcggcgcaacggccaaagggttcgcgctttggccacgtgactttcgagaatttctagacaagcgcctgagggacctattcgagcttaacgcccatattctggatcccatgagcttcaccacgacagggccggttgagccgcaggccctgccggccttgtcggaggggatcggttcgaacccctttgctggactcatccacattcgtgagatcaacgcgcaacgcggtttcgcagacgcaggggacagtaatggcgacgacgatgaaccgacgaacgcaactagccgcaagattgccagccagattcagccctatttccgtaaacatatcgaccccgaaaaggaccccacgccgaacgacgtcaaagcgctcgaggcaatccatgatgccgaaaccacatttaatgcccggctcaaggatggtttcgctgatgctatcaaggaactggaaagtctcggctatcccggtgggctgaacaatccgaaactcttcatagccacgcagatcaaacccgttgacgggctcgatcacccggctgcggtgcaatacgatatctcgggcgacacatctggggtgaagttgcctgaaagctacaacggcctcggcttccagaacctcatctccatggtgtttcagctaatgcgtttccgggatgactggatgcaagtaggtaagttcaaatcgcagttagtgaccccagacgacaagggtatcgaacctctgcaactggtgctaatcgaggaaccggaggcgcatctgcatgttcaggtacagcaggtctttatggctagggcccacaaggtgctgcgcgaccataaagatctggagcaggagggctcggcctttaccactcagctggtcgtgagcacccattcgggccatattgcacacgccgccgcgtttgaggagctgcgttacttcaagcgcgagctgccaagtcaaggagttgtgcccacggccagtgttgcgaatatgactgggctctttggtgcggacaatgaaacccatcgcttcgtgacgcgctatctgctgagcacacattttgatctattcttcgccgacgccatcatcgtaatcgagggtgctgcggagcggattctgctgccgcatctgatccaacatcactaccctgatttggctgcagcctatctatcctttttagagctggggggcagtcacgcgcataggctgcggcctctgatcgaggcgctggaggtgccgacgctgatcatcaccgatctcgacgcggtggcagaggtcgacaaaggcgggaaggtcgttaaagaatcggtccagccttgctgcggggctgctcaaaccacagccaaccacgtgctaaagacctggctccccaagctggcagagattgatgagctggtaggctctccccccacggctctgtgtcacacggcccctgaccgctccatcgccgtcagctatcaaaccccgcaaaaagtgacacttggctcggtgtccacgagcgtcacgcccagcaccttcgaggatgctctggtcctgactaacccgaaagccgtgacggacgccgcagggacagagttctcctgcctcatgacccgtgcctttgccaaatccatcgctgaagctcaggcccctgaagacctcgccaaggcgctctttgaaaggttggcaaaaagaccggaaaaggccgccttcgcactggatcttctctacatcaaagatatcaaagtgttgcgcgcgccgccctatatcaacaccggccttacctggctcgcgggccaactgaagggcgtggagggcgcagcgtga

SEQ ID NO: 72043 - DNA, 1953 bp, Rhodobacterales bacterium Y4I
gtgacagacgtgaccgacgccacccgcgacgcgggcgctgacgcgacgattcgcgcgtgcctgtcccttgatcagccgcgcagcttctttctctttgccggggcgggatctggaaagacgcgatctctcaaggaggcacttgagggattggacacacagaccctgaccaccttgcgcaaacacagccgtaagatcgccgtcatcacctatactaacgccgccgcagatgagatcacacgccgcgtcaaggccgatccggtgtttcaggtacagaccatccacagcttcgcttggtcgctcatcgaggggcgcacggcggatattcggggctggctagagagcaacctgcggacagaaattgccgagatccaggcagcccatgcgaagggccgtgcgggcaccgacgcccatgacaaacgcgagaagaagatggcctccaagacgaagcgtctggagcgcctggctgaaatccgcgccttcacctatgcgcccgagggggacaatttcggccgcgatgcgctgcaacataccgaagtcattgcgctcgccgcgcatttcctgactgaaagcgagacgtttcagaacatcgttctggcgcgctacccgttcatcctaatcgatgagagtcaggacacgatgaaaccgctgatggaggcgctcttgaccttcgaggcgcgccatcgcggccgcatcgccctagggctgctcggggacacgatgcagcgcatttataccgatggtttgcgcgatcttgaccagcgagtgggggatttttcgcaaccggccaaacagatgaaccaccgcagccgcaagcggatcgtggaccttgcgaattcgatccggcgcgacgatgatggccgccagcagcgggcgcgcgaagacaaaccgggtggcaccgtgcgtgtctttcttgcgccaagcgagggcacagatcgcgcagccttcgaggcctccgcccgtgcagaaatggcccgcatcaccggagattccgcgtggcagaaagcggaggcgatcaagaccctcacgatcgagcgtcacatggccgccgcacggcttggtttcagtgagttgtttgagcccctgagcaaacccgacaagctcaaggacgggtttcgcgacggcaccttacccgcgatgcggcttttcacccaccgggtcttgcctctggtgacggcacaaaggaatggggacgcctttgccgcgatggcagtgctgcgcgacggctcaccgctggtcgataagagaggtatccgggaggggggcgggggtcaggccactggcctcgacgcggcgcgggcgggcgttgcggcgctgatgacgctatttaaggacgaaccggatccgagttgtgccgacgtgttggcagtcgtggccgagcaccggttgttcccgatccctgaccagcttcgggcctgtttgcctgacgacaatccggtggcccaggacatggccgatatccttgctgagcttgaccccttgtttgacgagttggacctcactacgcccgagggctcaccacccactgaaaccaccatcactgaggcctggacgcaggcgcttgaggccccgttttcccaggtggcgcgctacctcgcctatgtcgaagaccgcagcccctatggcacccaccagggggtcaaggggctcgaatttccccgggtcatggtgatcgccgacgatgcacacacgcgcttcaaaggccttgcatcttacgagacgctgtttggtgtgaaacccttaggcccagccgcccagaaaaaggcggacaacggcgaggaaaccacgatcgagcgcacgcgccgcttgctctacgtcacctgtacccgcgcagaagagagcctcgcgcttgtgctctactccgaaacccccgacaccatccgaaggtttctgatctccaacgggtggatggccgaggacgagatcgtgatagctgcgactgacgggacccattag

SEQ ID NO: 72044 - DNA, 1746 bp, Caldanaerobacter subterraneus subsp. pacificus DSM 12653
atgaaaattattggattacaaataaaaaattttagaaatttagacgatgtaaaaatgttactacatcctgatattaatttcttggttggagaaaatgatttaggaaagtctaactttttagatatgcttgatattatttttaatggaaggagattcaaggaagatgatttttttgataaagaaaagccaatagaaattcagattaccttgggactagatgatatagaaaagggtatttttggagatttgtttgacccacagaatagtgacgtaatcaatataatgattagacaagaaactcctgatgaggatattagatactttcaccgagaaagtgaagaagaaatacattatagtgattttcgttgtgtcaattttataaaatatgattcgttgaggagtcctaaggaagaattaactttttatcgtgggaaaggtgtaggaaaatttttaaactatttggtggaaaagttttttaaaaatatggagcaaaatattctagatattgaagattttattaagaaagaccaaattgatcaaattgtaagttatataaatcagaaacttgagaaattgaaaacttttaagaaatttgggatagttacttcaatagaaggagaagcaaagagtttaatttacagattactaacaatgaaggattctaaagggttagacattcaaaaaatgggatacggtgttcaatttttgactttggttattttgtctataatggagaaaataatgtatttacttgaagataaacgtcgccaaaaatgcatatattcccttagggaaaaagaaaatgttcaaaattatatttctttaattttaggattagatgagcccgaaatacatcttcatccatatatgcaaagaagcctaataaagtacatatatagcattcttttaaatgaaaatgctgagttttcttctttgttaaaagaactttttaatattgataaaatacttggacaagcaataattgttacacactctcctaatatactattgaatgattatagacaaatagttcgattttatccttttcagggatattcaatcaaaattaaaagtggagtcgagataaaattaaattcccaagaagagaaacatcttttaatgaattttccttatattaaagaggctttcttttctaaatgtgtaattgtagtggagggtgaaactgaatttggagctttgcctatatggggagaaaaaatcttgggcgatatggacgaatacggaattagcattattaaagcgggtgggaaaaaaagcgctatcccagtttcaaaactattagagcaatttgacatttatagcattccaataatagataaggatacagaaccgcctgaagactatgataatttaataacaactaaccagaaagattttgaggaagaggtagtagagaagcttttgaataaaaataaagaattattatttcaattgatagaagcatttgatgacaaaggtttagaaagaaaaattcagaaaggtaaacttaaacaaatcgctgaaagatataaaattaatatagattgggatgaaaaagattataagttttccgaaatacatggatttaataatttaaatcttacaaaagctatgtttttagcttggcttgatattaataaatctgttattttaggacggtttataggagagaaattagaaagatcgtacattccagagccttatctaaatgctattaaaaaagccaaaggagttgctggggaatga

SEQ ID NO: 72045 - DNA, 1791 bp, Caldanaerobacter subterraneus subsp. pacificus DSM 12653
atgaaagaacttattgaaaaaattaagcaaaaccattctaatgacgaggaacaactggaggtaatttttactgataaaaaaagaattatagtagaagcaccagcaggttacggtaaaacaaaaacaatgataagtagaatagcatatcttattgctacaaaccggattcctaatcctaaaaaaattttagcgttaactttcagtgtcaatgctgcttataagataaagaaagatgttgcggaaaatcttccattcattctttcgaactctcctatttcccctgtctcagtcaaagataaagtttttgccacaaattatcacggtttttgtagaagagttctaagattgtatggatatttgttgcatgagtctcttagaaatatagagtaccttagaggtgttgatgacagtaaaattgaagagcttatcaatttagaagtgggattagattttagcaatgcaaaaaggctttctgactataatgatgcaattaaggaaataaagattcaatatttagaagataattattctgattatatagaaaaaattaaattttattttttgcctaatggatatataacttttaatgctattttacttttaacaatagaattgttcaaaaaatatcccgctattttgaaattttacagaacactttttcctatcgtaattgtagatgaattccaagataccaatattttaagttggacgcttttacagcttttaattggagaagatgctgaagtgatattcataggagatccattacaaagaatatatgatttcataggggctattcctgatttgatgactgaagcaaccacaaaatatgatttacataaaatagagctaaaaacaaattatagattcaaaaataatcaacaattattattactagacaaaaatataagagaaaacgccaaaaatccatcttcgccttctattcaggagattgcaaatattaaaacgtttcaattttctgatcaaactgaagaggctaaaggggttctatccttatgccaagaaatactggggaatgatccagcatctaaaatagccattttagttaaacagaggggtagaaacattgatgaaattttgaaagcttttaaagatacaaaattcccgtttttctacgctttatatggtgatgaagagaaagaatatattgagtttcaccaaaaatcgttaaaagagtttttggatgtagtttctaattcgggcaataaaatcaataaaagaatcatccaaagattttttaaaaaggttaaaaatattttcaaaaacagcgatgatgaaatttataactcacttttaatattattagaaactttcttaaatagaatctttatagaatttagttttctttcgatggaggaaaaaatagaacttattaaagatgttttagaaagtagaagtttgaagcaatatctaggatatgttgagtcaaaaataattatatctactgttcatgggggaaagggtttagaatgggattatataattttaccagatatggaacaatattcattccctaattatccaggcttatgtggaatctgtcaatttaaaaatgattgtaaaattaattggaatttagcaagtagaattcctgattttgaaagaagattttatagcgaattaagtgttttctatgtagctgttacaagagccaaaaaagaagtattttttacctatagtaataaacgcatacatcataccggggacgaaagagatacaaatgtaagctgccttttaaagttacctggaataaaactaaattatcagtaa

SEQ ID NO: 72046 - DNA, 2079 bp, Roseobacter sp. GAI101
atgcatctaaagaagatcacagtaagaaattttcgacgtttaaaagacgtgtccattgatttcgaagaaagtgaaaccgtttttgtgggcccaaacaacagcggtaagacatccgcaactgcggcgatcaggagctttctaagtagccgggatttcaaaattcacgatttctcactttgctccctgacggcgatcaatgcatacgatcccgctgctcagaccgcccacccatgtatccagcttgatctttggtttcatattgaccctgatgccatcgagtttggaacagtttttgcgctggcaactgatctttcgggcgactttacggaaattggtattcgatgttccttggaggtcgaggatgcagtcgagctctggaccaagtatgatcaagcattccccgtccaaggcgacgggcaacgcaagaagacactggtggatttcctggctcttgacggaaatcttaaggcgcacttcaagccccgatactactcccttgagaaaagtgctgcgggggttgtccagacgccccttgagccaagcgaggggaaaaagacgcttcgatcattgcttcgtgtcgatttcgtcgatgcacagcggaacatcgacgacgaaaatgccacccgcagtaacaggctctcggaggcatttgctgcctactaccagcggaatctggagcaagccgaggccgccgaagaagcagtcgcggtgatcgaagagaacaaccagaatctgacggcgcactatgatcagcattttcagcccctgatgggcatcatcgctgacttgggactgccctctcacaacgatcgagcgatgaagatcgtttcgacgcttagctccgaagttgctctgcggggcagcgccgagctcttctatgtagacgccacatccagccatgagttgcccgaggcctataacggtcttggcttcaagaacctcgtcttcatggccattcaaatcgacaacttctacaagcagtggctggcaaccgacgaaaatcgcccgctctgccagatgatctttgtcgaagagcccgaggttcatctgcatgcgcaagtgcagcaaaccttcatcaagcaaatgtggaaggtacttacacaaggtgcaggcgaggcggagccgcgtccgcagctcactgtcacaacccactcgtcccatgtgttggatgcggtggacttctcaaaaatccgctacttccgccgcgtcgatttggatgatgaaggcactgggaacacctacccagggtcgatcgtcaaaagtctgaaggaatttcaacccgacgcaatcaatgttggtgatcttgaggtcagtgtggaggaagcgctggcatttctgaaaaagtatcttcggctgatacattgtgacctgttcttcgccgacgctgcgattttggtcgagggggctgttgaaaaactactgttgccaaagatgatcgatctggcggcaggaggattgaacgcgaagtacatcaccattcttgaagttggcggcgcatacagtatgcgattcgcaaagctgttggaatttcttggaattccttatttggtcatcaccgatatcgactccgtcgatccagccaacaaccgaaaaggatgtaaggcaacggatgcaggagctgttacatcgaacgcgtccataaaatacttcttcgatggcagcgatcttgtctccgatctaacggccaagcctgatgctgatcatatccaagccgacaatatgcgcttcgtctctttccagaaagcggttgcgatcgagtacggaggagcttctcacaatttccacggcaggacgcttgaagaagcttttgtatatgaaaatcatggacttttctccagtggcgcgttgtcgatcggaaaggacatccctgctgacgccgcagagtttcatcagctggtatgggaacggataaagagctctacatttaagaagactgagtttgccatggatgttttggcgcgtgatccggacgttgaaggcactgcaccttgggcggttccggactacatagcagtcggcttgcgctggctcgaagctcgtgtaggcgatcagccggttgcaggagagttgaatgcctga

SEQ ID NO: 72047 - DNA, 1842 bp, Roseobacter sp. GAI101
atgcctgacctccagccaaccgaagcagatatccaaattgccaagtgcatcggtgaggagacatcgttcgcggtcatagctggtgcaggctctggcaagaccacgtcattgattgaagccctcaagaaaattcgcgaaacacaaggacgtcagctgcgagagcgtggccagagtgtggtttgtatcacctataccaatcgggctgtggatgtgatttcctcacgtttggaatttgatgagctctatacggttacgaccctgcatgggttcctctggggtgaggtatctaggtttcaagctcctctaagagaggcattggccgaacatgttattcctgcccatatcgagaaggctcaactagacgacaatgggggaaattcgaaaaaggcgatttctgcacggaagaaaattgaacgtttgcacgctgagctagcggagcttgtcgagaataatccgccagtaaagtacgaagagacgacggtaagcgattactcgaaatgcgtactcaaccatgatgacatcatagatgtcgcctcgcacttaatcgcaacgaagccgatccttcaaaaaggtcttggctttaaatacccttatatcttcgtagacgaagcgcaagacacttttccgcaggtgatggctgcgctgaactctatttgcgctagggaaggtctcccaatgatagggtatttcggtgatcccatgcagcaaatctatgacaagcgtgcgggagactttgccggaccagaaggctcagtgacaatcgcaaagcaagaaaatttccgctgttcggtctcggttatcaatcttctcaataagttcagagatgatgtcgagcaattcccggcaggtaagaacgcggatgtcgagggtagtgttgaaatcactattgctcaggcccccaatcctgaggggcccagaaaaacatacacgccagagcagcttgatcatgtgtccggcatgtttcaccaggcgctggaaaattgggaatggcaagacatcccgtctgtgaagaagctgttcttggcacggcaaatgattgcaaggcggctgaacttctcgacgctacataggctttttactggtgtatactcgtcgtctcgatcgcaatccgactacgaagacggaacgcattatcttctaaagccttttgtcgaaggagtttatcctctcgtgtcggcttcgaccaagggtgacccaaaacgcgttcttgaggtcttgcgccaaacaagtcccgcgttctttccagatggcgtcaacaagcgaaaatctctgaagcaaatgctcgatcgcgccgacgaggcttccgagaagttggctgagttgtgggtcggggcgacaaccaaggaaattttcaaatactgtgaggacagcggcttattgccgatttcggatcgcctttcttcgcagctgggacgtgatgcgcgcgaaggtttcgatgccgagaatgaggaccatcagcgcgacaagggagactggctggctgatgaattcttcaaaatggattgcagagaaattggcccgtatgccgaattcctcgatgaaaattcccccttcagtacccagcatggctctaagggcgaagagtatccgaatgtattagtgatgatcgacgacatcgaagcgtcgtggaatacctacagctttgggaagacacttactcctggcaccgctggcgagccgactgagcgtcaagctgagctaacccgaaaattgacctacgtttgtttttctcgcgctgaagtgaacctgcgtatccttttcttctctctgaacccggaggccgcggggcgggaactcatcgaaaagggtttattcattgaggatcaagtaacttatatttag

SEQ ID NO: 72048 - DNA, 529 bp, Parabacteroides johnsonii DSM 18315
acggttggaaaaaggagaattaaaatggaaatctgcaatacctcaaaaaaataaaaagcaaataactaataatgatacaataaaacactggcttaaaatagaatccattgatatgttgttagaattacctttcccaaataagcagagaggcaatatttgcatatcataccagacaccaatatcagtaaattggacagatcaaaagaaggaagatgaattatatgaagtacacccgtatacttttgaagattcattggtttttactaatataaagctattccagagtgatgaaaaaatggcaaaaatgggagtaataacgaccttttataattatctcaaaaaagctatttctttagaagattttcatgaaaagatgttttcttgtttggaaaaacgaaaaaatgtaaaggcttcttttgctacggatatactctgtacggaacaattcgataagatacaggcgccttcttatattaaagagggattaatatggttacagaaatgcttaaacaataaaattcgtaaatag

SEQ ID NO: 72049 - DNA, 1833 bp, Parabacteroides johnsonii DSM 18315
atgaataaatctgttgataatatattggaagagtgtatcacaaaaggaagtcgtaaaagtttctttctttttgcaggtgcaggctctggaaagactcattcgcttgttgtacttttaaataagatacgagataagtgggggcaaaagttcaaaatagaaaatagacatgtggccgttattacatacacaaatgctgccacagatgaaataatttcacgcttaaattacagtccactttttcatgtctctacaattcatagctttgtttggaatgtaattcaatcgtatcaatccgatattaaaaagtattatttaagatttaaagaagaagaaaaggctgaattagaagagaaaataaataaggctaggaaaaaagatggtaagacctatttaaataatgtgggcaaatttgataaggttatcaaaagcattgctaaaattgaaacagtacataaatttatatataatcccaatggaaataattttgaatataatgctcttagtcatgcagaagtgattaaaataggagctaaaatgattgtagagaataaattgcttcaaaaaattatagcccagcaatatccatttctcctgatagatgaaagtcaagatactaaaaaagaactagtacaagccttttttgaattagaaagaaattttggaggtgagaatttcacgttgggatttattggagaccaaaaacaacgtatatatactgatggagaagaaagaataacaacaatcattcccaaagagtgggaaacacctgttaagcctatgaattacagatgtgataaaaggataattaagttatcaaataagatcagtgaatctattgagcaaaatgctacgcagaatcctagagaaaatgctgaagaaggatttgttcatctttatttgatcaggaacaacgatgagatgaataaatttgaaaaggaagctaatgtagtcctatcaatgaaggaattaactggtgacgataaatggtcaatggaaggcaataacgtaaaaatacttacccttgagcatatgatggccgcaagaaggttgggctttgaagatttttttggtattatgcgacatgtagataagtatagtcaaactttgcttcagggtaaggttgatgatatggacatattttccaaactatcatttccattaatagattcattaaaaaaaggtgataatttaaatgctcttaatttgttaaaatcatattctccattattaatgaatttgccatcagacaaagcgtatgaaacattgtctaaatgtcaagaaatattagatggtttacaaaagatggatttaggaagagtcactataaaagaattcttaaaaaatattgtagtgactaatttatttaatgttccccaattattgatagatgcattgtctgtatcattagaatcattagaagagcaaaatgatgaagtgctttatgcatggtgctcagttatgaatttacctgtaattcaaatagtcaaatttaataattacattaatggaaattctatgtttggtactcatcaaggtgtgaagggtttagaatttgatcgtgttttagttattatagacgaaaaagaatcaaatatgcctctctttaattataataaactttttggagtggaaccactgtcaacgactgatatcaataatagaaaagagggaaaagaaacaacgatagaacgtacaatgcgcttgttttatgttgcatgcacgcgagcacgtcattcattagctattgcagtttataccgataatccagaaatcattaaacaaactgttactagaaatgattggtttgactctgacgaaatatcaattatgtaa

SEQ ID NO: 72050 - DNA, 1052 bp, Acinetobacter sp. ATCC 27244
gtgtatattaagaagttatcaattacgggatatcgttgtttttcagagctttttgagatcaactttaggaaaggtttaaatgtaattgttggggaaaatggagctggtaaaacagctattatcaactcgtttcgacaactatttattgatactgaatctggctcttataatgtttcttctgatgattttaataaaccatttaaagaagcttctatagcagctgactctttcaaaataaaagttgaatttgataatttagaaaatgctgaaccaatagcatttctacagtggagtgatgctgtaaataatgtaattttaaacttagaagtcttaaataaagagttacgtgggcgttttaaaaaaagtttctggggtggaaactctaaagcatcacaatttgatgttgaactatttgacaaaatccattgtatttatctacctccattacgtgatgcggaatcaaagctagtaaatggaagacaatctcgtttatcaaaactattaaagtttattgaagcagaccagcttaaagcgtgtaaaaaagctgagacaaaacatcctttagaagaaaaatttaaagattttaatcaatcacttatcgatgataaagattcaagtattaaaaaggcaaataaactgattgcagatcatttgctagaagctattggtcagaattttagtcaatcaacacatatacaatttgttgaaaatgaattttcaaaaattgttgaaaatttaagattaattttctttcctaaaattacaactgctgaagcagatcaattcagagatttatgtcagaatagccttggctacaataatttattatatattgcttctatacttgcagaattaaccttaacaaaggaagagtcactatatagacttttactcattgaagagccagaagcccatttacatcctcaattgcaggttcgtttattagatcatcttgagactgtagcaaatgaacataacgtacaagttattgttactactcactcaacagtattagcttcaagtgttaaattagataaaattatacatttaac

SEQ ID NO: 72051 - DNA, 1764 bp, Acinetobacter sp. ATCC 27244
atgaaatttacagatgaacaactccattatattgaacgtacacaaattacagagaatatttttttaaatgcatgtcctggcagtggaaaaactgaaaccattgctcaacgagtagcaaatgaagttgaaagttgggcgaattttccaagtggcatagctgttctatcttttactaaaagtgctgctaaagaaattgaacatcgaattaaagaaaaaattgacaataacacgacctacccacatttcattggaacattcgatagctttattttaaaaaatattgtgaatcctctttcgaaagatatttccaaatatgaaggacataatggagattattcatttaaagtagtgaactatgattcacagttattttttttaacaaagtatccacatggttatcaaaaaatttcaggacatcatgtagaaattgataacagaacaggacgttttaaatttcatacgccaaataaagatacaaacagagctcttaatgctatggttttagagcaatggcaaaaagatgatatttatcgtgcgaagaaaaaatgccgtgatgcaggttttctaactcataaggatatcgaataccttgcggaatcagctcttaccactcgtactgcaacacaggattatgcaaaaaaattagcaaaaagatttcaacttatcattgttgatgaatgccaagatctatcctttgaacaattaaatatcttaaaagccatgatgttgaatggaacaaaattacattttgttggagatttaaatcaatctatatatgagtttagggacgttgatcctaatgacattattaactttataactgacaatggctttagagaaattcaattaactaaaaactttcgaagctgtcaaaaaattgtaaatattgctacaaatattatgaaatcaggttcaatcgaagctgatttcacatcacccgaacaatcatgttttgtacttcagtataaagattcacctagtgaagtgatttctcaatttaatgaactaaccaaacagtatagcaatcgagttttagtagctagaggtcatcaaactttaaaccagttatctattgtggatagcacaccagcgaaaccagttgagttcttactaagctcaatcttgaattttgatgagacaagttatacttcaatcaatcagtcacttattgatttttcaaaatatattaaagataaggtaaagttagaaacaaaatctagtgattataattgccctcaaattattgcatcagaattagattggagattgttcctccacaactctatccaatatttattaaatcatgatttacaattagatagttgtacatggacaaattggtgcaaaaaagtaaatgctgttgttattaatttgtttaagcaagaatttgtactctcagagatttatgaagcattaaaaaattctgactttaaaattaggtctccaagtggtaaagcaacacactgcatctctaactatcaccgtaaaaatgattcattagatatcaaattcagaaaatcaactattcatggtgttaaaggtgaaacacatgaagctaccatgctgatttcaaatcctacacggaatggaactggtacacattggtctcattggattggagataaaacatctgaagcggcaagatttgcttatgttgcatcatcaagaccaaagtatattttagtctggtgtgtcaaaaagctaaaatcttctgagcagaaggatttagaaagtttggggtttgaaatattggatataaaataa

SEQ ID NO: 72052 - DNA, 770 bp, Acinetobacter sp. ATCC 27244
ttgggagaggtatttaaaggttgtgaatcaaaagaagataaagagtttctgcaaaagtatctcactcttacaaaatgtgatctatattttgctgatatagccattcttatagaaggagcaactgagcgaatattactacctgaaataattaaaaaggtggatatagaccacaaaactgatttagcacaaaagtacttatcaattgttgaagttggtggagcatatgctcatcatttctataaatttcttgattttcttgaattaaaaacgttaatcattacagatttagatgcatgtaataaagtatctaaatctgataagaatggaaaagataggatttcatataaatcatgtatggtctcagatgggactcatagtacaaattcaggtttaaataaatggtttaaaatctacgctcagcatgagaatactgaagctactgaagctactgaagctactgaagctactgaagctactgaagctactgaagctactgaagctactgaagcattaaatatcattcaatttgttgatgttagtaatattgaagatgaagatgaagatgaagatgaagatgaagatgaagatgaagatgaagatggatatattttattagaaaaacttattcaagtgagtgatattgtcaaaaaaaatggagttaaatgtataacttatcaagtgcctgaagatggtagcaagatatgtggaagaagctttgaagaagcatttatactggcaaatttaaataagttcaatcttcatggtgttgc

SEQ ID NO: 72053 - DNA, 1752 bp, Acinetobacter sp. ATCC 27244
atgaatgctgagctaaatcctgctgaacaagcgtcactgatttcattaagtcaaattcagcaatgtattgataacaggcattgttttagattagaagcgggtgctggggctgggaaaacctattctttaattgagtctttaaaatatatcatcaaaaataaatctgctgaattcgctgacaagagagttgcttgtataacctatactaatgtcgcgaaggatgaaattctaaaccgcacagataatcatcctctaatttatgcggatactattcatgcattctgttgggagctaattcaaccttttcaagtaaatctaagaaatattcttgctgatcttgatgataagtggagatcaaaagttcaaattacatctataactaatcagatagttaaatatgacttagggattatgaggttaacagagactgaggcctatttacatcatgatgatgtaattaaatgcatgtctaaattactccaacttggtaaatttcaaaaacatctaaaaaataaatttccaattatttttattgatgaatatcaagatacaaatcaagatttggcaactagtattgttaactatttaattgagaacgattcgggtgtcttagtcggcttttttggagatcattggcaaaaaatttatggtaaagatgcatgcggcttggtaaatagcccaagtggcaagattgttggcattgataaaaatgcaaattttagatctgacaaaaatattgttgcttgtttaaatagaatacgtagtgaattacctcaaaatgagtataacccatgttcacaaggtactattaaagtatttcattctaatagctgggatggaaaaagactgactgcaaatcattggcagggagatttaccaaaagaagaaactaaagcatatatagatcaagtaaaaaataaaatgttagcagatggttgggatttaagtaatcctgtaaaaacgaaaattttatttttaacgaataatttaattgcaactgaacaaggttttaaaaatttagctgattgttttaaatattcagatgactatctaaaaaaaaatgatccttacataaagttttttttagatattttagaaccaagtattttggcatttaatgacaaaaactttgggaaagtctttcaaattttagggcaaaagaaccctaatttaaaatgccaaagtgataaaggaaaatgggctaaacattttgaagagctatcaaatattagaagagcatcaagtgttcaaaactgtttaaataaaatcaaagaagcagatattctatctatacctttttcagttcaaaaaaatgaaataaagtttacagagatactgactaaaactcaaaaagagaaaacaaataaagatatagaatttcaatcaaaatacacaaaatttaaagcaataagctatgatgaagtcatacaattgggagagtatatagaagaaaagacaccattctcaacaaaacacggtgttaaaggtgcacagtttgataatgtgttggtaatttttggtcgaggttggaatcagtatgattgggaaaaactactgctatggatgaaaaatggtgtgcctaatggagaagaagaaaaatttgaaaaatatcgtaatcttttctacgtttgttgttctagggcaaaacacaatttaactttagtctttacacagttattgtctgaagattcaataaataagttaaaagaaatttttggttctgaaaatatattaggtgatccttttaattag

SEQ ID NO: 72054 - DNA, 1725 bp, Pseudomonas coronafaciens pv. oryzae str. 1_6
atgctgatcaccaaagtggttttaaaaggttttcgaaatttcgcggatgccacaatcaaccttgagcgtaacacgctgattattggtgcgaacaatgttggcaaaacgaatctggtttatgctttgcggctgctattagacaagagtctttcagacgccgagattgagcccatggagtctgatttccatatctcaggcgctggaaaaatttcggacacgctgtcaataacggtgtatttctctgaggtaacagaagacgctgtgctcgcgagcctgaagggaaacattacagatgattcgtgctttgcccttcaatatactgctgacaggcggagcctcacctatgatattaaaattggtgccacaaggtcttcgcttgtagaaatcccctcaagatattatctaaagcatataaatctgagatacgtgaaatcccgaagggatcttgaaaaatatattaatacggaaaagagacagcttttaaagttatctttggagaatcgtagcgtaaccgaatcgaagtccgatcatcgcgagatggccagaattggaaaagcattagaagcgattaacgataaaatccgaaacctgcattacgtaaaaggagcgacagattctgtaaatgaggagctacaaaagcttgctcacgactttagtgagtacgaagtaaagctcgattcaggtgcaattcaggtgcagcaatttattgatagccttcgcttgggcgcatctacatctggagcatcagtaatgcttggcggcgacggacgtaataaccagattcttatggccttgtggaaagctaaaagccaacgcgagcatgatccggatagcgaggtagtgttttactgcgttgaagaacctgaagcacacctccatccgcatcagcaaagaaaactggctgattatttaattaatgacctgcctggccaaacgcttattactagtcactcaccccagattacggctcgctacataccctcctcaatagtccacctcaaggtaaccagcggaaagaccagagcagcgagcaatggttgcagtaactgcatcagcaaagcatgggatcacttagggtatagaatgagcattctacccgctgaagccttttttgctaaatgtgttttgcttgtagagggcccctcagagattttattttttagtgaactttcaaagcaactatccatcgacttagatttctataatatttccattttgtctgtcgacggaattcaatttagcgtttatgtaaagattttagacgccatggagataccatgggtaatgagaacagacaatgatgtctcggatataaaagtaaaaaaggtgccgctgcgtcatttggctgggattaaccgctgtcgcgcagcgattggtttaagtcctatgtcacattctccactcggcacgaccactcaatcgttgctggccgatggcacttggaaaaatacctcaaacgagacgaacccaaaaggcgcctatctgtctcgcgtcgatcttgagcatgacttgacggaagagatggagtctgaagtggttgcttatgcgtgtaaaaagttgaagaaacgaactttagacgctacaggtgcgatcaagtatttacagggtaagaaagctatccgcatgagggagttgctcgctcagatttcggttagccttcctctaatcaaaaatggttttttggcgaaacctctattccatgcgaaagctctggctgaggcctag

SEQ ID NO: 72055 - DNA, 1536 bp, Pseudomonas coronafaciens pv. oryzae str. 1_6
atggtggagaagatccgccaggaatttgataatctcaagccacaccaagggatcataggaatatccttcaccataaaatccagcaaagaacttggtgacaaatgcaaaaagaacggagccaataccagagcgagcttctttggaaccatcgacaacttttgccttgctgagattatattcccattccttgctcgggtttacggagtcagcaaacaagaaatctcatgcgtgcaattcagccaattaaaagacgaatacaaagctcatctccccgacctttcaaaatcagatatcaatttaagcacggacgactacgacttctacgaatcggaatttatggagcactaccggcaaggcttcgttcttctagaggccgtcacaataattgcttgtaaggttttggaaaagtccgaagcttgcaggcgttatatcaaatccaagtatcgctcagtttacatagatgaatatcaggacacatctgagcctcaacacgcccttttttgcaccttacattcactgggcctgaaagctgtagcggttggtgatacccaacaatctatatttgccttccgaggaagtgatcctcgccaccttctggcactcgtagctgacgcggtcaatttcgaacatcacataattgacatcaatcaccgctgtcacccctcaataattaattactccaaacgcatctactcctctcagtgccaactaattccggttgctgctaatgacatacgtgtttatcaccgtagcttcgacgggacgcaggaggcggttgctagcggccttaataattggatagagaaatcagttcgcgcattgaaaatggaggatctgagtgaggttgccgtattagtgagatggaacggctcaattgatcgcctacaaagacatctcactctacctgcaagattttatagagacgattcgttatcaaaaatcgccagcccactgagccgcttcttctctgttctgcttaccttttatttcgacgagcgtaagctggcacagcagatccttaatgactttttgctaaccaaaaggacgcctgccgggctcagagatcttagaaaatcgatacatgacctgcgaaattttgaattgaataggcttccagatgaattcataaaaattgcgaagttgttcaatttttctgcggccaacaaaactgaggccgatgcacttctacagaccatttcatcttcagaggacatattacactacaaagcggtgcaaccaggcgaaattcaagtgatgacactccacaaatcgaaaggactggagtttgacctagttatacatctagacctctatgactgggtattccccactagaacgtacactggaaattttaatgaggaagtttttacggactgggaccaagacctgaaccttcactttgtaggtatcactagagctaagaagtggtgtgttttgatgacgagcactcagagaataaactccgaagataacgttaaaaaaggcagtccctctcagtttcttagcttgccagggataaaggggctatatcgatag

SEQ ID NO: 72056 - DNA, 2103 bp, Enterococcus faecalis Merz96; identical to SEQ ID NO: 71990

SEQ ID NO: 72057 - DNA, 1722 bp, Enterococcus faecalis Merz96; identical to SEQ ID NO: 71991

SEQ ID NO: 72058 - DNA, 1863 bp, Enterococcus faecalis Fly1
atgatttcaatcttgaattccaaaaagaatttttttttcaaggttcaaaattatactgaagataaagatttagatttattcgaaattgacggtataaaaatgcaaatttttattgagtattctgataaagataattatgcgaatgtccaaaacttcatgatgaatcttgagccagaaaataatattgtagtattagagtttttctattcttgtaaagaggataaattcaaacaattaaaagttgatctaaaagaggaagaagctgttatagatacatttgaagaattttcaaagtatatgaataagcattctttaaaatactttgagctccatagatattctagagagtttgatattaaactcaacaaagtcacttctaatacatcggaagaaattaaattctccacgataaaaaaattgataaacataaaaacaattaaagctaaccgtgaagcctctaacaaaatcaatgatagctctttgtctgggctttctcaaaaatattataatacccaaatttccgaagaagagtttgattttagtgaacttcaaaaagctattaatgaagctgataattctctaagtaaagcttataatggtacaggtgataattcgggaatttttacggaaatattcaaaagtgtggagagatttggttctggaactactgaaactaccttaacaattcaatcttcaatttcagaagtagacttactcaaaaataatactactctgtattataaaagtgatgattgtcaactaccagaaagttataatggattgggttatctaaatctaattggcatgatttttgaaatagaaaccagtattgctgaattttgtggaaaacaaaatgaaagcccggcagatattaatatactgtttattgaagagccagaagctcacactcatcctcagttacaatatatattcataaaaaatattaaagagctactgggtgaaagaaaaataaaaaataaaatagatttacaaacagtgattacaacacactcatctcatattgtttctgaatgtgattttgacgatgttcgctacctaaaaagaactgaaaatagcttaatatcgaaaaactttcaagaactgaaggagagatatgcttctgattcgcacgccttcaactttgtcaaacagtatcttagtcttaatcgctcagaattattttttactgataaagctatttttattgaaggagatacagaaagaattctcctgccgacaatgatgaaaaaaattgattcaactcatattactgataaaaaatacattcctttactatctcaaaatatttcaattattgaagcaggagcgtacgctcatatctttaaaccactaatcgactttttaggaattaaggttttaattatcacggatatagatggagtagagaaaaatggagggaaatcttgtgcttcaacagaagctaaatatacctcgaaccaatcattgagaaaactttttgaactgcccaatgacgacactcaatttgaagtactaataaataaatcatatgaaaataagacgatcagtgaccagatgtatattgcatatcaaacagagatcacaacgggcgataaagcatatcatcctagaagttttgaagactcttttatctgtctaaactttgactatataaaatccaataaggataattttactcagggtctcaaaaaaataaatattctcatggaaaagcctagcaatttctataatattgctcaagaatgtatagcaaaaaaatctgcatttgcaacagaaattttatattatgatggagtcaatgggaagacttgggagacgcctagctacataaaggaggggttggaatggcttcaagaacaatag

SEQ ID NO: 72059 - DNA, 1896 bp, Enterococcus faecalis Fly1
atggcttcaagaacaatagagctagaagtccagcaagctattgaatgcatagagcaaggcaagaattttattttgactggcggagctggaagtgggaaaacatattcccttatatctttgattgaggaagttggagaaaaatatccatcaaaatcaatagtttgtattacctatacgaataatgcggtagcggaaattcgtaatcgcatcacgaatgacaagctctatgtctcaactattcatgaatttgtttggtctataattgcaaaatatcaaaaagagattaagaatacacttgttgagctaatcaatgatgaaagccaaatgaaatttaaagctccgagggactttgaagagaaccaaatgattacaattgattatttttctgagaataaaattgtgtacgacgaatattatagcttaaggagtgatgcagatagtaaagtaagccatgaccatatattaattcttgcagagaaaatctttgaaaagtttcccaaaatctgtggcatactaaaagatgttgccaattttatttttgtagatgaatatcaagatacagatccgttaataaaaaatatcttacttacccatattaatcaaagtactaaaaagaatattgttggtttttttggagattctatgcaagcaatttatgacaatggactcggagaaataattgacgacaaactcacttatataaataaattccaaaacagacggaatcctgaatcagtcatttgtctagctaataaaattaggaatgatgacattgaacaaactccatcaaacgatccaaaagccccaaatattgagaataacaatgttattaagggaagtataaagtttctgtatactgaaaatatcaacataactgacaattatcgtgatttagagtattttaatgattgggactttacaaacagcgaaaaaactaaagaactttggttagttcataagtctaatgcaaaaatggcaggatttacaaaactatttgaattgtataactctgatttaatcattgaattaataaatagaattcgaaaaaagattagtactggtgcgcttgaaattaataataaaactttcgaaaatattgcagaagaagctaatattgaagttcgtggtagaggatatttgcttgagaatataaaaaaagattctgattatttagaggctttctctttgataaagaatgaaaattgggaagaagttaataactttaaaataaataaagactctcttctatcttataaattcaatggattaattggaagtcatgaagcaaagtctcagagagatagaatattacgccatttagattctatctatgaactcattgagctctacgaaaatggaaaatataatgattttctcagaagaatcaaaagaagtgtcttatcgttccatgataaggtaacaataaaagaagaaatgaatgaactactcgattctactctcactatcaatcaggtagtagaaaaagcaaaaaagacttttaatctcaaaaatgaatcttttgacgatttcatagagaaccaaggaagctatttgtggatgcgtatcaagatgctgcctttctctgagtatgtttattcaattaaatatcaaaaagaatatctaccttttgcgacccaacacagtattaaaggaagtgagttcgataatgtattggtcattttagataatggcaaatggaataaatacaattttgaaaaaatgtttaaaaattttaactctgacgatagtgtagttaaaagaacgaagaaacttttttatgtatgttgtactcgtcctaaaaagaatttagtagtacttatgcctagcgtagatgtgaatgtagtagaaaaagctaaagacttattcggcgattctaatgtgcaccatatcttgtga

SEQ ID NO: 72060 - DNA, 2025 bp, Enterococcus faecalis Fly1
atgaaattaacgaggttagaaatttgtaattttcgttcttttggttcagaagctgaaactatttattttgatgaatttacaggaattattggtcacaacagtgcagggaagacaacgattttaaatgcaataaatgcaatgtttgggaatttaaaactaagaaaaagcgatttttatgcagataataatgaatctgagaatgagccgctctcattgtggataaaagcaaagtttgaattttttaatgttgataatgatccgcaaagttacagtgttccttctttttttcaaagttttactatcagtgaaacaggagaagcaccgtacacagaaattttgtttgaagcggagtggcaacaaggaaatacgccaaatggcgtgatagaaacttcgcttaattacttacttgtaggagaagaagaaaagaaatttcctatgccactacttgatcgctccaaaatagatgtcatttatattccagctattcgaaacccatatgatcaattgagcaacgcttcaggaactattttatggagactgttgaaacaattaaactggaaagaaggcgataaagaacaaatttcagaaaaaatagcagcattggatgaagcgattagtgcacaagaagggataagtttactagaaaaaactatttcaagtcaatggaaaacatatcacacggatagtcgatttgcggaagcaagcttaaaatttggaagcaccgatttagaaaagattctgaaaaaactagaagttgaattttctccctctccttttgagcaaacgtatagagtaggagatttaggcgatgggttgcaatcattattctatttttcacttattgatgctttcttaaagttggaagaaaagggattaaaagaagttagtacaggtgtgatggaagagagccggacattaaatgttaaccctccagcgataactttgttattagtagaagaaccagaaaaccacataaatcctcagttgctaggtaatgcactttcaaatcttaaaagcatttcaaacaatgcaaattctcaagttatttttacctcacatagtccatctgtgattaaacgaatggaccctgaaaatattcgccatatccgtatggataaattgaagaaaagtacggtggttaacgagattactttaccagatgataacggagaagcctataaatttgttaaaggagccattcaagtatacccagaactttacttttcttcattggtaatttttggcgaaggggatagtgaagaactacttattccttattttttgaaaaaaaaatttcctaatctagatactgaaggtatctcaattgtgccattaggaggccgccatgtgaatcatttttggagactattgagtatgttgaaaattccatacattacacttttggattttgatcaagagcgatatgggggtggctggtgtagaattcagtatgcacttagagaaatgattaagctggaaccaggttttggtgaaactaccaaatcagagaatggaataaagttgaatgatttcatagatgatatttcttcatggcaactttcatccccttacctacaaacgtggattgactttttagagaagagaaatatctatttttctagaccgatagatatagattttttgatgctggaaaattttaagccacaatatctttctattctagatggcaatgaagggccaaatgtcaaaataagcgaaaagaacattaaattctcacaggtaaaaaaagagcaaaagcaagagaaagggtatcaggaaaaattagctatagcgatgaaacatacgttaaaagaaaacagtggagatggttcttcttttacttgcgaacaaaaagaattgatggtttggtatgattatttctttttaggtagaggaaaacccgtaactcaccgactggcgattgataaaatcgaaaatctagcgactattccacctgtttttgaacgtttaggggtaaaagtagaagcgatagtaaagggagagaagcatggttcagaaaactga

SEQ ID NO: 72061 - DNA, 1833 bp, Enterococcus faecalis Fly1
atggttcagaaaactgattggttaccaactgatgggttaacttttgaggaaggcgcattgaatgcaattaaagatacgactaatacattagttaaagccggtccgggatcaggtaaaactgagttgctggcgcaaaaagctaattaccttctccaaacaaatctctgtcctgcgccacaaaaaattctagcgataagctttaagaaggatgcagctgttaatttagctgaacgagtttctaagagaattcctgaaaataaagtttcgcaattctattcggttacgtttgattcttttgctaagggtttgttagatagattcttacatggtattcctgaagaatggagacccagtgacgattacgaagtagatctctctctcaatgaatttgcacgtgcttgcaaagagaatggtgtgtatttaagatataaactagaaaaaaatataagagaagcagagttagttaaatatccgctaacggagttgagagatattgatttcgatatttggaaaacaatgcttcatgggaactcttcaggaaagtcctatttaacttttaaaatgattacacgattagttatttttttgttaaaaaataatccagctatcgtagaatctatccgtaagacctacaaatttgtttttttagatgaatttcaagataccacagtattacagtacgaactattttcgttatgctttaaaacatcagaaaactttattactgctgtaggagatgataggcagaaaataatgagatgggctggagcacttccagatgcatttttaagttttaaacatgactttctagcaaatcagcatgcactgtacattaatagaagaagtgatgtaaaaatacaaaaattactccaagaattaaatgaatatgctaaaggggattttttaggcaaaacagagttagtaacgactggaatagatagcgaagctatcatacaagtaaaaactttttcttcgtcagaagaggaaacccaagatattgttgacatgattgagaagctctgtgcggaaggaaaaaatattgaggagttctgtattttagtaaaacagttcccagatatttatgtagctcagttatctcctttatttaatgagaaaggaatagacatccgaaatgaagcggagtttcaagatttactaaaagaaaatattacgatattgattttggattcactaagagcagccttagtcccaaatgactctgatgcttggattagtgtattaaactttctacatgatttttcagactcaaaaaattactttgatttaaaaagagaggaagatatagtactaaaaactaaaaaacttttgaaacatattgcaaaaaagctatctaatgtagtaagttttgaagagctatttgatgtattccaatatataatcaatttttatgggatcgacaacataagatcacagtttccagaatatactaatttaggatttctagaaacgaaagttagagaattatgtgacagtttgtactcatactatgaaaagacaagtgattgggtagaatcaattttgtgttttaaaggaaaaaattgtattccagttatgacgattcataaaagtaaaggactagagtttgatacagtatttttattgggaatggatgatcaatctttttggtcttttagagataatcctgaagagacaacagcaacattatttgtagctatttcaagagcaaagaaaaattttattactacttttacttctaaaagatcaggaaggaactgtgaaagaatacttatttctgattattacgatgtttttaggaaaagtggtgtggtagagttttttgaatcacgctaa

SEQ ID NO: 72062 - DNA, 2190 bp, Enterococcus faecium 1,230,933; identical to SEQ ID NO: 71696

SEQ ID NO: 72063 - DNA, 1794 bp, Enterococcus faecium 1,230,933; identical to SEQ ID NO: 71697

SEQ ID NO: 72064 - DNA, 1758 bp, Prevotella copri DSM 18205
atgtacatttcagaattaaagctttggaattttcgcaagtatggtgctgatgattttgatttaacgaatcctcatcttacggtaccttttaaaagcggaatgaacgtattgattggtgaaaatgattctggcaagactgccatcattgatgcaatcaagtatgtattgaagactaatgcatatgagtctatacgtattcttcaagatgacttttataacgataaggatcatttgagaatcgaactactgatagatgatgttacagatgatgaggcgaaaaacttcactgaaatatctgcccctaaggaaaatggaggaatggcaagtataaaacttgtgcttgatgtggttcgtaaggatggacatatacaagcttatgaagtgagaggtggtttcgatgcagatggtcatagtctgactcctttgatgaaagataacttgcgtatcacttatctcaaaccactccgtgatgccgagaatgaattgacagcaaagaaaaattcaagattgtctcaaatcttacaatctcatgaattattgaagcaaaattccaatggagaaaagcatgatttaattaaaataatagaagaggcaaatgctaaaatagagaattggtttgatgatgatacaggtggtgaaacttctcataaaaggcaaataaagggtgtgattgatcaatttgtgaaactctttatatctgatgatgcagaatcccaatttcttttggcggatcctacgatgaaaaatattttggaacgcttggcgataagtgtagttaatagcaagaatttgggattgggtacacttaatcgcttatttatggcaaccgaactattacatcttaaaaaaaagggtgacaatcttaaggtttgtttgatagaagaacttgaagctcatattcatccccaagctcagatgaaggttatttctgcgttacagcaagaagaaagtgtgcagtttattttgacgacccatagtcccaatatcacttctaaagtaaaactaggtaaggacactgatgttaatagcattcttatgtgtaatagcgacaatgtgtttcctatgggggctggttatactaagttagagaagaaggactataagttccttgataccttcttagatgtaactaaatcaaacttgttttttgctaaaggtgtaattttggttgaaggatgggctgaagaaattctcattcctgttattgcttctaaaatgggatttgatttaacacaacatgaaatatctgttgttaatgttggttcgactgcatatttacatttcgcacgtgtatttatgagaagatcagaaccggaaatgaaagtaaaatgtgctattgttacagatcttgatgttagaccagatacagaagataaagcacaaaaagaaagagaaaaaaaggaatctgttgaacataatttgggaatgccattgccaaccaatgtgaaactcaatcttgctaaagaatggacgttggaatggtgcttgttcaaatcgcccattctttctgatttgtttaaggattcggttgctgaagttcattctagaactgaagaattcaaaaaagatgcagttacgcatcaatacacagaatcgtttgaggcgaagttgaaggcgaagttgatagatcgttctttagaaaaaacagatatagcattagttctgtccgagaaaatcataactaacgatttgaattttgctcagcaagatgagtatataaaatatttgctggatgctattagatttgttgttttatag

SEQ ID NO: 72065 - DNA, 2013 bp, Prevotella copri DSM 18205
atgaatattacggatatagatataaatgaggcagagaagaccttgcttcctaaggatatgcactttgatgatgaacgaagagattttatcaaaggtttagaaagttgtgatcttttggctgtgccaggtagtggaaagaccacagcattgcaggctaaattgttttgtatggcacgccatttacctttagagaaagatcaaggtattctcatactttcacataccaacaatgcggtcaatgaagtaaaaaagaaactccatgctgagtgtaatcagcttttcgaagcacctcatttcattggtacagtacaggattttgttgataaattcttagcgataccatattatgagcaattctataagcaaaaagtacatgtaatcgatggaatggcttatgagcaagaggtagaaaggtatttaaaaacttcgatttggaaacttaagaaagcaacgttgcatctatataaaaaagggtttaattttacagatattcgtatacaacgtacgaaggatggttcattgaaatatacaaggggcatgaacgatgaactaagttttaaacctgtaaagaaatggattcaagaaggtacagaacaacagaagcatgaggagataaaaggagatcttaaaataatgaagcaagcgataatgaaaaaaggtattcttcattatgatgattgttatatcttagctgatgcatatattcgcaaatatccctttgttaaaaagactcttcgtaaacgctttaaatatgtctttatagacgaaacacaagacttaaaaaagtaccagttggatctgatagatagcatatttgatagtgatgaatgttgtattcaaagaattggagacaaaaatcaaaccatattcaataagccagatagggatattcccgatcaatggaacatccgtaaagtcaaatacttgcaaaattcgttgcggctaacagaaagtatagcaaaagttgtcaacccttttgctgttgataatgtagctggcaataaaagtgaatcgatgttcacagttaaaggaaagagacaattggagaatggtgatattcctccttatttaattttgtttgatgaatatggcaagaataaactcttgactacattcaatgatttgatagagaaatatgcgttacgaagtactgtggatggtaaaaaatacggtttccatattgtcggttggagcattagaagaaaaggagagactgcaaatggaaagttgcgtttagaagacatatttcccaattgtgaaaaagcgtctgtaagaggattgaattcatatgatacgttgagtaagttccttgtttttggatgccgtgattatagtatgtacgaatgtaaaacggttatacaaaaagcattagtctgcttgttacgtaagttgaatgtttatgatagtgatagaaggttattttctaagacacgtttagaaaataagataatgttaatgggggaagatgattttaatgattataaactgttaatttatcaaacttctgttttgctctttctaaagcgtttttctgaatgttacactttattggttagttatttaactggcagtttctctcgaatttttgagattagcactaacaatcaggtattggcggatttttgcgaaaaggattttgatacagaactaataaatgcggaaacaccatcagaatttcctgatatagaaatagaatctgtgcattccacaaagggacaaacacattgtgcgaccatgtatgttgagacttcttttaaggattatgaatcatcacatctttttaaaataaagaaaaaagcgacaaggaaaagacctgaagtgttgtatccaaatcctttgtttcaggaaaaagcggaatatgcgcaagtgacatgcaaagctgttatgcatatgatgtatgttggtttttcacgtcctacccatcttctatgttatgcctcttataagcacaactggaataataaaagaatagaaaaaatggagcaacttgggtggaaaattatcaatttgtag

SEQ ID NO: 72066 - DNA, 2076 bp, Fusobacterium nucleatum subsp. animalis 7_1
atggttttaaaggaaatagtagtagaaaattttcgtttattaaaaaattttaagttagagcttaaagaggacttatctttaattatagggaaaaataattgtggaaagacatcagttcttgttattttagacaaaatgttgaattcatctgaaattgcatgggaagatgtaaatttagtgaaacaaaaagaactatacaatgaaataaaaggatttaatgggagtgttcaagacggtaataagtttcttgaagcaataaaacttcaattgtatattgaatatagtgatattgattcttatgaaaatattcaaaattttataatggatttagatccagaaaataatattattcttttagagttcatttcattaataaatataaaaaatattttagagttaaaagatataataaaaggaagaaagataaaagatttttcaactttttcaagatatatgagtaaaaattttacaaaatattttaaaataaaaaaatattctaggtgttatgataaaaaaactaaaaaaataatttcagatatgatagaagaaatagataataaaaatatacaaaaagtgctcaaaattgtagggataagagctgatagggcagtttctaataatgagaaaaaccatgccctatcaagtttaacaagtagatattatgaaacttatagaaaaaatatagaagatgaaagtaattctatatttcaagagcttgaagtagagctagaaaaggcagatagaagactatataaaatttataatggagaaagagcagatgatggaaaagattcagaaggtatatttagaggtattatagatgttgtaaaaaactatggtggttatgataatgggattaatatttcaatagaatcttcaatctctgaaaagaatttattaacagacaatactagcttgtattataaacatggtgatggagatagttcttcacttccagaaacttataatggattaggatatttgaatttaatagggatattatttgaaattgagactaaactacaagaattgtatgagcaacctgctgatataaatattttatatatagaagaaccagaagctcatacacatccacaacttcaatatatatttataagaaatattaaaaatcatattaatagtcatagaaataagttgaataaagaaaaaaataaatatcttcaaataataattacatcacattcatctcatattgtttctgaatgcaattttgatgatattatttatttaaaaagaataaataataatattttagctaaaaattttaattctttaaaagatgaatacgaaggagataaaaaaagagaatttaaatttgtaaagcaatatttgacattaaatagaagtgagttattttttgcagataaagttatttgtattgaaggagatacagaacgcatattaatgccagcaatgatgtataaagttgataaaatgcaaagttcaaaaaatgaatcaactattccattgttgtcacaaaatatttctataattgaggtgggagcatattctcatgtttttataccattatttaaatttctagggataaaggtcttaattattacagatatagattctgctataaaaaataataatggtaaatatgaaaaatctcatccagataatgcaactcatacaagtaatgcctctataagagaattttttaaagaagatggtttagatgatggaaataatcaatttaaagaacttatagaaaagaaaggcaaagataaaataaaagccagaataagaattgcttatcaaattcctgaaattgataaaggttatcaagctagtagttttgaagatgcttttatatcactaaataaagattttattttaaaaaataaagataatctttatgactatggagcattaaaaaattttagtaaaaaggaaataaataaggatttttatgaattttctttaaaaaatattgaaaagaaatcagcgtttgcatctgctttattatattttgatgaagaagaagatgataaggaatggaaagttcctcgttatataaaggagggcttactatggatacaagaattttag

SEQ ID NO: 72067 - DNA, 1902 bp, Fusobacterium nucleatum subsp. animalis 7_1
atggatacaagaattttagaggatgaggtaaacactgctttacaatgtatagaaaaaggagaaaattttatattagagggtggagcaggaagtgggaaaacatattctctgatttcattaatagaaactttaattataaaattacctgaaattaagattgtatgtatcacatatacaaataatgcagttgcagaaattaaatcaagaattgataatgaaaatctttgggtttcaacaattcatgagttcatttggtatataattaaaaaatatcaaaaagagataaaaaatgagttagtacttcttattaatgatgaaacaattaaaaattttaaaaagccaaaagatttagaaaatactttaattacaatagattattttaataatatagatgttgaatacgatgaatattattctatgaatcctaatgaaaataaagttaaaattagtcatgatcatattttaattctggctgaaaaaatgtttgataggtataaaaagctatcagatattttaaaagatgtagctaattgtatttttgttgatgagtatcaagataccagcccatatatagttaaaattttattagaacatcttaaaaaaagtaaaaagaaaaatgttatagggttttttggggattcaatgcaatcaatatatgatgaaggagtaggagatttaaataaatatggattaaaaaaaatagtaaagaaacaaaatcggagaaatccaaggatagttatagagattgctaataaatttagagatgataaaataacacaagttccttctaaggataagaatgctcctaatatggacgaaaatggagttattattgagggtaatattaaatttatatatggaaaagagcaagaggatataaattttcttaaaaataaagctctttttaagtcatggaattttttaaatggtgaacaaactagggaattaaggctaacacataaatataatgctgaaatggctggatttaaaaaattatatgatttatacaatgatgatttaataattaaattaattgataatattcaaaaaaatattgataataatgaaaataaagaaagtatattagatgaattagtactaaaattaagaccaacttataatagaaaagatttatttgaagaaattattggtaatgaaatatataaatcaatttaccaaaatataaaaaatttactatggaaagatgcattagaaaaatgtaaaattagtaaggaatcattgatgtcttataaatttaatggaataaatggaagatatgagactaattcacacagagataaaattttaaaaaaattagatgttttaaatgaattaatagaattgtatgaatctaagaaattcaatgaatttttaaagaaaacaaatttttctattcaaaataaaaatgataaaagtaaacttaaagaattaatgaattttttaatatttgaagatgaaaagacaatagaagaagttttagacttttcaaaaaaacaaggtttgataaaagaagatatggactttgataactatattagtgttaaaggtttttatttatgggaaagaattaaaaaaatatcttttaaggaatatagaaatagtattctttatttgaaagagttttcaccaatttcaactcagcatagtattaaaggaagtgaatttgataatgtacttgtcatattagaatcaaattggaataaatatgattttaaaacactatttggaaaaggttcagaaaatgaaaatgttataaaaagaacaaaaaaattattttatgtttgtatgacaagaacaaaaaagaatatagtgatatatatgcctactgaagatttagaaataataaattcagctaaagaatattttggagaagaaaatgttctttcaatagattcaatttaa

SEQ ID NO: 72068 - DNA, 1779 bp, Fusobacterium nucleatum subsp. animalis D11
atgtctgatttttatataaaaaaaatagagattaaaaattttagaaattttgaaaatatttcatttcaaacaagagaaaagaatgtaattattgggatgaatgatgtaggaaaaactaatttattatatgcaataaaattggtattcagttataaatttagaaatattgatttactagacagtgattttcataaacaaaatatttctaaaccttttgaaatttttatatctatgcaaatttttgataaagaaaaagaagaaaaaagtgattttacagaaataattctttcagaaataggtaatttaagaaataaggaaaatggtgagcaaaaccttttgaatataaagttagttggagaatatcaaaatggaatatcaatgttttggaatgttagtgaaaaaatgacaaaagatgatatggatgaaattccagcagtaggagcaagtaaaaatagaatagattctatttttgaaatttttgatatcccaccttataatgatatagaaaaaaaattcctagaaattagccgaaaaattgttaataatatggaaataagtgaaacagaaaaagaaaaatatacagaaatagaaaatttacaaaatactttaaaagaaaatatagaagaacttgactcagtaaaaaaaatagatgaagaaataacaaactcattaaaaaaatttaatgtttcctatgaaattaaggtagctacaacattagggttaaaaagaatttatgatgatttaaaaatatttacaaaacaagataatgaagatagaatatatccaacagctggggatggaagaaaaaagacaattcagtatgcaatgtatttatatgaaatagaacaacaacataaaaaaatccctattatattattagaagagcctgaaaatcatttatttttaaggaatcaaattagtttatcaaatactttttttaatagtgattttttttgcaatatatttttatctactcattctccacaattgctttataaaatttcaaatggggttaatataattagaatagataaaaaaaataatcaagctacttctaatagttcagtttatactttaccagaagaatataatagcttaaaaaatattcttcaaaaggatttatcagaagcacttttttgtaaaaaagttctattagttgagggatattcagaaaaaatattatttgaatatatattagataaaaagataaaagatatagaaagaagagctgaaatttatattttaaatattataggagttggttttaaaagctattatgattttttaaagaaattaaatattgatgtgagattaaaaacagataatgatttaaaaaatacaaagataaacatagaaatatcaggtataaaaagaatagcagaaatattaggagttaaagttgaaaataaatttatagaatttttaaaagataaaaaaattaataataagaaagataaaagtattagtgagaaaaaaaatagaatagatataactagagaagtttataattttgctaaaaagataggaattatttcagaatttgaagaacaaaaatgttatttgtctgaagtagattttgaaaatgacttagcaaaagtagttttaactaatactgaagaacaaaataaaatgattacttttttacaaagaagtaaatgggctcatctttttaaagaaaaatattacaaacaaattttttcagaagaaagcattgaaaaaatagtagaatctgaatattttaaatgtataaaagacttaatcaatgatgaaagagagtaa

SEQ ID NO: 72069 - DNA, 1050 bp, Fusobacterium nucleatum subsp. animalis D11
atgtttaaaaattttgatttaaagtatcgttatgaacgtaaaatagaaaattttgaagaatggaaagcaacatttgaagagaataaaatagttacttcttcaaaagaccctaaaaaagattttttattagaatatatattaaaaatattgaaaaataataaaagttgtcaagaatatataaaatcaaaatttgagtgtatgtatattgatgaagcacaagataataatgaaattcaatataaatttatagaaatttttttaacattaggaattaatatttttatggtaggggatccaagtcaatctctttattcttttagaggtgctaattcaaaagtattcttagattatgaaaatagagaagattttatttctaagaaacttaaccaaaattttaggagtcatccatttataaatgaatttgcaaataattatagttttaattttttaagagaacaagatacaataaattttatagaagatgtgtcagaagcagaaaaagaagtcactgaattaaccgtattaagaagtaagggtgaagattgtaaaaaatatgagcaaaaaggttatagttatataaaaacaccaagtatgccatcagaaatagataatgtacaattagttaccttacttctagaagaatatttcactacaaaaaatgctataaaatttttaaaaaaaataacaaatatggaagattcattttttaagtacaaaaataaactaactaacttttttaaaaatcctacaaatgaaaatttaaaaattttaaacaccaatgtattttcaaaaataaattggttattatcagaaacagaaatagattatattgtagaagaaataaaaaatgaaaattttaaggattattataatttatatgaaaaagaaaaaatagttatgactatacatatttccaaaggtcttcaatttgacaatattttaatacataaaaaagatttttataatagaagaggagaactagaaaaagaaaagttttatgtagcttgtacaagagctaaaaagaagctttttattataggagatgattaa

SEQ ID NO: 72070 - DNA, 855 bp, Enterococcus faecalis TX1322
atgcaagtagctctatcaaagcaattgtttgattattctgtgtatggctattttatcttatccactcattcgtcagaattattatatgaaatggatgaggcttctcttgttagaatatactcacaaaacaaaactgactgtaaatcctatatgtataatgtgcccgaacaatttaaatcaataaagaaagaactgaatgaatcattaacaacagcgctgttttcagatcgtgtgttgctcatagagggcccttcagagaaggcgttatttgaaaaaatattgtcaattgttagtccaatttatgaattagagggcggatatctgttattagtagatggtattaaattcaaaccatactttgatatattaaaagagttggaaatactacctattatcaaaactgacaatgatttgaaagctaaaagaggagatataaagtcattcgatactatcgggttcaatcgttgcttaaatattattggtaaaaaaaatttagaagctattacaattgattactcatcgaaggatgagaatggaaaattaatttggttaataagcgataagaagaggatggtttttgataaaaaaagagagttatatgagtttaacggagcttgtatcagagaatttgaaaagaataatatattcatttcaaaagttgatttagagaacgatttattcgaggttattccagaaaagctgacaaatgtttttggtgataatcctgtagatactctccaagataagaagttattaaatatgttaaaacttattgataatttgaatgatgaagagtgctataaaatttttaatcatgatagatttaaagctttaaaaagattggtggagagttaa

SEQ ID NO: 72071 - DNA, 1548 bp, Enterococcus faecalis TX1322
atggaaatcgtcgatgagcaagtaagaaaagatatcttagctgctagcggtaatattatagtttctgctagtgctgggtcgggtaaaaccacaataatggttaataaaatcctaaaaaaaatgagtgaaatttcagatcataaaacagttgctgcaataacttttacggttaaggctacagaggaaataaaaagaaagtcaaaacaaattggagggaacaataaatttgttgtaatgactaacgactcttttgttgaatatgaaatcataagaccatttttgatagatgctttcggcgaaatgtataataatgattttgtgattagttatgaggattctgtaaaatctggttcttttgatgaaggtctaaatatattagaaaagagtaataaactaggaacttatcataacattaaaagaaattttaagtttgaattagcaaaaaaagtattagaacaaagtacagcggctcaagaatattttaaatcaaaatacacaatgatctttttggatgaatatcaagactctgatacagatatgcataatctatttatgtatataaaaaacgtgttattgattgatctttttattgtaggagatggtaaacaagccatatatctatggagaggtgcacagagaaatatttttaatcaactagaaaatgaagggatgcaaagatttgaattagtaactaattttagaagtcattttgaaattgttaattatgctaatcttatgcataatgcttctcagttcagagacgattattctaaagaagtaactcatgttgttcattgcaggaccaatgactatgttagctctattaatgagctttgtgagtccaatatagtggataaaaataaaaatataacaattattgcaaatataaacaatgatgcaaaagatatttctgataatttaaatgcacaaggatttaattttgtttttattcctaaaacaccattagatgacgggtctgaaaatgctaatgtattaaaagtaattgcctgttacttattggatgataactattctgtctttgacatcgctgaagtattgagagtagagcaaaatagaacgttactgaataaaattgatagtttattaaagcctctaaagaaactagtgccattgtcatctaatcaaactaaagacgatattagtatctccttttttgaatctattactaaatttaataactacttagggatgaatataacaaatgatgaaaaagtattattgttagatagtgttacaaacaagtatttctatccagcgtttataaaatctaatgatttgcataaggttatgactgttttcggttcaaaaggcctggaatttaatcaagtgattagttttgctaattactatagcttcaatgatgaaagtaaaaaaaataatcactatgtttgtgtaactagggctgaagaaaaatttgtgatgatggagggagaatttgggaaatatagtgaacaaattggcagaaaattaatagaaagggggatagatagtgaaagtacaaccttcaagttgatagatcatatctaa

SEQ ID NO: 72072 - DNA, 1971 bp, Sphingobacterium spiritivorum ATCC 33300
atgaatactaagctcaaattaattttaaaccaaaatatcgaaatgtatttagcatatataaaagttgagaattataaaggaatcgaagcaatagaaacagaatttgatcccaaattaaatataattattggtgaaaatggatgtggaaaatcagcaataatagacgctatacgactgttatataatattggagagccaatcagagagatttctgtttcgtcggatgattttcatcaaaagacagtagagaacgatggaattaagactattcagaagtcttcactaattactataacgtatattttcaaaggactatctacagcacaaaaaggagctttttatgaatatatggtgatcgatcctaataaaatcgaagaagattatgctaaagtctcgatttcttacgaggagaaagatggaaaatatccgaacttctcatacaatacaggaaatattgacggacaaaaagccgattataaaacatttgagcttttccaacattactatctaggagcattgagagatagtactaaagatctactgagcactcggaataatattcttggaaaagttataaggcgatttgtaaagagagaaaagtctgagtctgaaattgaacaaattattaaagatgctaattctcaactgttgagtcgtgatgaggtgaaaaatacgagagatggggtgaatacaaatctcgaaagtatttttaagaaagtcattgataataaaattggggttagaattgaagaagcaaaaactgaatatattgttaatgctattaaaccctatcttccacatgatagatcaacactaaaggatgaaggatttcatttatggcaaaatagtttaggtttaaacaatctgatatacatagcagtagttcttggtgatataaaagagcaaattgaagataatggtcttccccatttcgccttattaattgaagagcctgaatctcatctgcatccccaattgcaattaagcctttataactttctcaacaatgcaaatgctaccgaaaatagtcagctatttataactactcattcgccgactttaacttcaaaagtcccactaaagaatcttattctcttggattgtggcaaagcaacaaaacttgataaacaatttcaaaatagagagtctgaaaaattaatcgaggataccaccaaaaataaggaattgttagatcctgatttggaaaataggatgaagaagcttcagagatatatagatgtgacgaaatctcaacttttatttgcaaaatcaattttgttcattgaaggaatttcagaagaactattgatctcagcgtttactcttttggaagactataaattggaagattatagaaccgaaattgttaacgtaaaaggaacatctttctatccattcctgtatctttttaataattcaaatctattagagagaattaacaaacctatttctatcatcaccgatgatgatagatttacagattcgaaaaaatctgaatacagttttgatagtttaataaatgattacactgttcttgatctgttagatgattctattcaaaaaggcaacgcagtatcgagaataaaaaacttgaattctgtaaaaaataatgcagataacattaaaatctttgagtcattcaaaacattagaatacgaaattgcattgcataacataaatgatgataggaggaattttaaaaataactttttagtacaatatttagacgttgtagagggtgctaaaatcagtgaaattgttacttatatggcgacatttgcaacagacttaatgacagatgagcaaagaaggaaagttgccattctcctatggaaaactttccccactaaagctgaatttgcacaggacttttcaattcatttgctggataatttggagaatgcaaaagcatcatttatggttccaaagtatatattaaatgcattaactcatttaaaaaacggattataa

SEQ ID NO: 72073 - DNA, 1188 bp, Sphingobacterium spiritivorum ATCC 33300
atgtattttgaaaatgaggaaagattagcttatctacaagctaggggaaaagttattctgaatgcctgtccaggtagtggaaaaacaacaactattgcgaagaagattttaaatttagaaacttcaaaagaaatcggaggtcattctggtgtagcttgtttatcgttcactaattctgctaaagacgaaattaatgaagcatatagaaagctaagcggtaaatcacttcagtttcctaaccatgtatcaaccattgatagttttataaataaatttattacgcttcctttttataatttgcttaatcgtgatttcaatagaccaaagatacttgatcatacaaatatcttagatgatatgtggaaaacgacctacgtaaaaaacggaaagacactagatggtttattacgaccattgaataacgcagaatataaagcaaaaaataatcgcagtatttttcatttatatcctccaagcgaaataagaattgagcctgatggtactttttcaataaatggtaatcaaccatctactgataaagtagatagagagaattttaataagtattgccagctaattaaaaatagacaatttacaaaagggcttatatcaactggagactccgcatatattgcacttcatttattaagaaataacccgaaaatttgccagtggcttagtttaagattcccttttattataattgatgaggcgcaggacaattctttaatacagcacgccatatttgaggaattggtaaagcaggggctaaaaaatattgaattaattggagacccttatcaaagtctgtatgaatggagagatgcaaaacctgatgaattcttaagaaaatatgaaagcgatcaaacgtggcaatcgtatgacttgacagacaatagacgttcacctcaaagtatcattgatgttttttctaaagttagacgttcagaggactcagcaattaatagtgtcgattgtgaagagcaaaataactctgttttggtgtacaaatattcaagcactaatcaccaattaataattaaacattatgacgattattgcgcaacaaagaaacaccttaatagttgtattgtagttagggggaattcattaaaagattcgttgttggaaaaaactagagcagagaccgtggggaatagagctacccaaagatattatttatgctaa

SEQ ID NO: 72074 - DNA, 1953 bp, Pseudomonas amygdali pv. tabaci str. ATCC 11528; identical to SEQ ID NO: 71966

SEQ ID NO: 72075 - DNA, 1668 bp, Pseudomonas amygdali pv. tabaci str. ATCC 11528; identical to SEQ ID NO: 71967

SEQ ID NO: 72076 - DNA, 1782 bp, Bacteroides sp. 1_1_6
atgtatttaagccggttgcatattagtaagtttagagtattcgatgatatcaccttgtatttcaagaatggtataaatatactgattggagaaaataattcgggaaaaaccgcaattatagatgccttacgtatatgtctcggatgcggtaaaccagataactttatttatgtgcaagacggagatttacatgttaatccggaaaatccttcagaaatcaacacagtcatacaatttgacttgatatttgaatttggagatgcgtcaattgaaagggaatgtttctatgatttcatatcacaagataaagacaatcctgacaagcaaacgatacagttgcatttgaaattcatccaagaaaataatgggaagaaaaaatatttcaaacgaataatatggggtggagacaacgaagggcagcaagtaccttatgaatctttacaagaaatcttttatacctatttaagtccactaagagatgccgtaagttgtctgcgaccttattcatatgacaataaaacatcgcagttattcaaccaacttacaaaatatgacaaaggcaacgaaagcatacctctgaatgaagaaaagaaaaaatcacttgcaaaaaatctataccaaatcttcgagaatgatgcttatgattggaaacatattttaactacaggaaagagcaaagttaatgagcatcttgaaggtacaggaataactctaaaacatcctgatatagaaatgcgctatgtaggccgagagttctcggatgttgtacgtggtatcgaattaaaatgtccggtttataaaacagtcgaagccggacaagaacagaaatactttaccctatctcaaaatggtttaggtgaaaacaatcttattttcacatccgttgtcttaggagatcttatcaacagatgcgaagaccatgctttggaaatctacaacgctttacttgtggaagagcccgaagcacacttgcatccacagtatcagaatactttcttcgagtatctaaatgaattacaaagcaaaggacttcaagtatttgtaacatcgcactcaccgacaattacggctaaatcggatgtcaataatatttccattttgcaacgtaaacaaagtattatacagtcattttcatttgatgaattatcggaagatgattatccgaaagaaagtaaacgacatttgcgaaaattcttggacacgacaaaagctcaattattttttgctaacggagtgttgttggtagaaggtgtcgcagaagcgattattatacccattctcgcaaagaaattcttgaccgaaaaaatcgacttgtgtaaaagtggcattgaattagtcaatatcggaggtgtcgcattcaatcattttgggttattatttaacaatgatgatgagagaaagcgactattgtcgaaatgtgcgatcattacagacagcgatcccaaagacaatggagatatatctgacagagcgcaaaaagcaaaggatttagagaaacataacctgaaagtatgtttggctacacacactcttgagcatgatttattcgaacaatctgagcgtaacaaagctataatgcgagatgtatatcgaaaaatacatgctcaaacagatgatttaagtggtgattttaatgtctctactttaatgaaaaaactcaaatctaataaagataaagcggaatttgcattacaactttgtgatagattagaaaccgaagtagcgttcgatgtacctgattatataaaggatgctattttgttcatagccccttcagaataa

SEQ ID NO: 72077 - DNA, 1782 bp, Bacteroides sp. 1_1_6
atggatattcaattatcagcacaacaacaagctgttgtaggttgcaacgagccgagaattgtcgtgaaagcctgtccgggaagtggaaagactttctctgtggctgcgcgtatggcaaaacttttacgagagaataatttatcgagacaccgaggaattgcagccatatcttttaccaacactgcatgtgaggttatacaaaaagaacttaaagagacattcggttgtcgaaatataggttatccttcatttatagggacgattgatagttttataaatacttacatatttctgccttatgcccatttagttatgggatgtgattgtcgtcctgaaatagtaggaaccgcatttaataaatggtttgattatgatccgacccaaacaagatatattaggggtaagcacggtgaacgaataattacatctcgtgataccaactactatttcgatctcatatcatttgggcttaatgaccaattattgcgattagccccatatcagtcatatcatttcggaaaagcggattgggataatcccaataagaaagatggttcacctaaaaagattatatctgaattgaaagagatgaaatggaaacatttcaatgcaggcaagttcaatcaggcagatgcgatatattttacattcagaatattagataaatatccttcaataacacaaaatcttgtccgtagatttcctatattgataattgatgaagctcaagacacaacagagttgcaaatggctataattgataaattatctcaatatggagcggaatctattatgttgattggggatcctgaccaagcaatttttgaatggaatactgccagtccacatttatttatggaaaaatacaataatccagattggcattcattggatttgtcggaaaatagacgtagctccgaaaaaatatgtcaattagctaatcgtttctcaggaaatgaaatgtgttcaatagcaagtgacaaggattacacagacgagccatgtattaaagggcatctcgacacgccggaatctgtcaatcaaattacgaatcatttcatcgaaaaatgcaatgagatgggattggatgaatctgaatatgcagttgtatttcgaggacaaaagtttggcgaaacaaactttggattagtaaacaatgatagctcatcaagacagaatagtccgtggataaacggacactacggcgttagagatattgtatatggaaaatatttgattgatcatggaaaatatactgacggactatctcttatagaaaaaggttgctataaaataacaaagcgagtacggtatgttcccgcaagtacaatacgaaaagaaataggggaagtagggtttagaagacatagagcagaaatggttgagtttattcaaaaattaccttcaacgaataatacactgtctaattggattacggaacttcaacaaacgggcataaatctaactgttgatttgggcaaggcgaatgtccgtattgaatcgctttttagaacagtaaatcatctctttcggcaagagcgaccttacctgaaaacaattcattcggtaaaaggcatgacattggaggctattttagtatttctatctaaaaaagctgtcagcacgaactatgcaacgattttgaataatcctgcaaagtattctgttgacaataatgaagaactccgcattgtgtatgttgcatgtacacgacctaaaaaaatgttatggatagccgttccatcagacgatatcgattgttggagaaataaattgttctaa

SEQ ID NO: 72078 - DNA, 2100 bp, Paenibacillus sp. oral taxon 786 str. D14
atgcatatatctagtctgaaaataagaaacttcaggaatttccaaaaagctaattttgtttttaaagaaggtgttaatacaataataggtgcaaatggttcaggtaagacaaatgcattgtttgcaataaggcttattatagatgatagtttacctagatcgtcaactaacctactcgatactgattttaatcgatcacttacaaactggcggggacattggattgtcattagtcttcatttcgacaatctctctaatgatgattcatcacaagcattggtttttcagggaactcatactactgataataggggctcattaaatctttattttagacctaaatatgaagtgcgtaaaagattatttgaattgagtcaagaattagcagaagaagagcagttcgtagattatctttcttctctaaaaattaatcaatatgagtcggttttgtacggaagaggtttagcagatttcagtaaagatgaagtgtataaaactctagtaggggatttcaataattatacttttcccaatccggatgaagaagatagtagtcttttgggtacaccggcaaatcagtatgtatttaaaaacgatttcgcatgcacatatgctaaagcacttagagatgttataggcgatttgaaaaatcctcgaacatcaccattgcttagactgctaagtaaccttaacataaatgaatcaagtacagaaacaattagtagtacgataaaagatttaaattggcatataacaaacctaccagagattagagaattagccgctggcgtttctcagtcattacataatacagtcggtcatacttatgcacctcgaattgaaattaattcaaacttatctgatgatttcagacatacattaaaggccctaaatataaaagcaggagagttatcaggtgaagactacattggggatctttatgaaatgagtcttggtggggccaatttgctatatttagccttaaaactcgaggaatataatcgacttgatcatgaacaaaataaagcggctcattttttattaatagaagagcccgaagcacacttacacaaccatattcaaaaaactttatttcaaaaataccacaatcacgaaaatactcaaattttgttaactacccattccagtcatatatcttcatcctgttcacttgattccgtgaatattgtttatcttgaaaataattgttgtgaagtatctcaacctaatagcgggttggatgaaaatgatgtgaggagaattgaacgttatttagatgccacaaggtcaacactgttattcgctaagtcggtgattttagttgagggcgatgctgaattaatccttatccctgaaatggtaaagatggcatttggaattaccctagatgaaataggagttagtctaattaatgtaggaagcactcaatttgaaaatattgcagtccttttctccgaagaacgaattagaagaagatgtgctattgtcacagataatgatatttcaatcataccattaggtgatgagatgtatccagataaagagtttcaaaagaaatgcaaacaatcagaagagtctggaaaaagtcgtagacaaaagttggatgattttagtagagataacagttacatctcagtttattatggaactaacacatttgaagtagaattaattaagcagggcaataaaaatatactagaaaatgtaataagaaaagatatttacaaaagacagtctgatcaaaatagttctgttgagaaaataaacaactcagatattagtatatacggaaaggaaattcttcgtttggcagataaggaggggaaaggttggctagccctaagtattgctgcacgattagataaggatgtagtaattccagattatattctagaggcattagcatttgttgcctccctacatacagaacatatcatttctatcattaaataccgcttaggtcaggagtataagaacttttttgaaacagtaaaattactttacggcgagaaacctaatgatattgaaactatagatacattttgttcaatttataaagatagtattataaccaagtttatcgcaatgaggagggagtag

SEQ ID NO: 72079 - DNA, 1755 bp, Paenibacillus sp. oral taxon 786 str. D14
ttgctcctactgaatactttaagtttagagcaaatggacattgttgaatataatgataacttattggtaattgcttgtcctggaagtggaaaaacgaggacacttgttgcaaaattgatatatgaggggacaaaactaaagaaaaatgagaaaatagcagcgattacttatactaatttagctgctgaagagatagctcttagactagatacaaattgcattgatgaccaattttattgggggggtacgattcattctttctgtacaaactggataattaaaccttattcacatatcctcaaagaacttaaatatggatatacctttttggatgaagacgatgttgaagaaatcttaaatagtattatggatactttagatttaagaaatgtagaatttaacacccgtcggaaccaaaatggtgattttattagcataaacgatgaaaattctttattactaaaagaatatgatcataggttgaaaaacgaacgactagtagattacgatttgattttgtattattcctataaaatactaaaaaataacccttcaattgcaaaaaacttatcaacaatatttagatggattcttattgatgagtatcaagacacacaagaattgcagtatttaattataggcgaaataataaaagttggtagaaatgaaacaaaattattaattgttggagaccctaatcaaggtatttatcaaaccttaggaggggttgcaaaaacaaaaacagaaattgaagactgtattggtggttaccgtattagtgaaaaaaacctaactggtaattataggtcaactcagcagattattgatgtttataagaattttcaaatttttggagatcccattgaggcaaagggtgacaataaagataatacctcacttatatcttttgaaagtgagatattagttgggaatctagcccattttattaaagatactattgttgatttgcataataaaagaggtattccgtataaagaaattgctgtaattgctcctcagtggatgccgttaatacatatggctagaactataaaacaattagagcctaatatacccttggatgctgctggactttcgcccctttgcaaagatgataataatttgttttatcatttagctaaattattcttatcttcacctgcgccagataaggtgttacttcgtatgagatgggcaaataatttgctcgagtcattattagaaaaaattccacaaatttctgagtcaaatctcagtttacaaaagatcttaaaaattactaattctttttcctcatcatctgtcttagggattgagtatttgaaagaaagctttgcctttttctttaatgtattaaatattgatattaacttatattcaaatgttaagttagaattacaggaatttgaggaaaaatgtataaggagacagaatagaaatggtattggtgattctatttctgtatataaaaatggatttgctaaatccgggggagtaaattttattactgctcataaatgtaaaggccttgaatatgatacagtaataggattttgtttattatggggatacttacctcattggaataacatatactcaagagaaatagatgagaatgaaatttcaaaaaaattactttatgttctttcatcacgagctagaaataatctgattttaattgcggaaactggtagaagaacaaatagaggaacaccatataatgctaaccgacatttatttgaggtgtttcgttaa

SEQ ID NO: 72080 - DNA, 1731 bp, Veillonella dispar ATCC 17748
gtgaagggtaaaatgtatattaaagagattaagacgatatcaaattatagaaatttaagtggtcaatctatggtttttgataaagatttaaactacattattggtgagaataatataggaaaaactaatattttagaattgttaaatataatactatcagaaggcaagtttaaagaagctgattttgctgatttatcgagcccaattgaagtaaaatatactatttcatatgatgattcaagcataggtttctttgaagataattttgatataaatgaagataactgtataactataattgcagaacaagatcttattgatggtaggatttcttattaccatgatacacctaataaaacgagtataagcttttctattataaaaaaaataaattctctttattattttgctcagagattaccatctaaagaacttgactttaaaggaagtaatgggagtagtaaaactcttaattacttgataaaaaaaagtcttgagatagtaaagttagaagagtcagatcttattaatagcccaaagattaatgatgtcattggggaagtaaataaatcgattaattacataaatgatataacaggtgattctgtcaatgcctctttagattcaagtcatgaaaaactattagctcgattacttatattgggagatcaaaatggaagggagctgacatctttaggggagggcattcaatatgcttttaatataattctacaaattattgatgcaatttataggtctatgttaggaaaaacaccagaggagtttagagaacgattaatatgtagtagtgagaaatactatttcccattaatattgcttttggatgagccagagattcatcagcacccatataggcaacgaagtttaatgaaaaagattaacgatctattaaataataaaaatgaaagttttatcaaactaataaagggattatttaacattgatggtttgaaaggacaaatctttatagcaactcattctcctaatattttgctaaatgactataagcaatttttaagaatttataaagataatgcgacacaaacaattaaagtagcttcgggaaattcatttgatttagatgtaaaattgtataaacatttattgcataattttttatatcttaaagaagctacatttagtaagaaaattatatttgttgaaggagatactgaaaatggagcaattccgatttttgctgaaaaaaagaaatttgatcttgatgaaaatggggttggtgtaattaagttagatggtgcggatagtgttaaatattgtatggaattatacaaattatttggtatcgagacctatgcaattatagacgctgataagaaagagagatatcacaataatgcgaatatattttttactactgaaaaagattacgaagaagatgtattcgcatcatttgaattaaaagattatttaacgtgttgtaaagaactagatatactacagtctatgattggtattataaaaaaatataaacgtgatttagatgtatctaagtttaaagaagatcctagtataattgagttagatgagactactgcaaaatctattgtgggtgaatgtaaagaggcgcagttgaagaagttaaaagactcaaaaaatgcatgtaaaggtgcgatactagcaaagtatgtaactaaaataccttctgcttttgatgaattgatagaaaaagttaaaggggaagtagtatga

SEQ ID NO: 72081 - DNA, 1758 bp, Veillonella dispar ATCC 17748
atgacattagaagatcgattaaaagaattccattctggtgatgaggaacagttaagttttattttctcggataaacctaggttgatagttaacgcaccagcgggttgtggtaaaacaacagctatggttagtaaaattgctagagagttaagtcttggtaatattgaaagtaataaaaaagtcttagcaatgtcatttagtgtaaatgcttcgattcgtataaagtcagatgtcaaagagcttttgccttcattggtagataactcgaaattacttttaaagaagttagatatcgctaattatcataattttgcaatgagattactttataaatatggatttttattgaatgaggaatttataaatctttcagagtttagaatcattagtgatagtattgttataaaggaaaacttaatttcctcatccgataactatataatcgaagagttaataaaaatagttacgtcttttgatttttctcaaattgaatctgttatggatcaatattgggaaacaattaataatactcttattaataaaaaaataattacatataatggtattttaatagcggctaaaaaacttttatctaatgataatattaagaaattttatactaattattactcaatgattattatagatgaatttcaagatactaatattcttagttactattttataaaatcattaattgataataataaagtagtttttctaggtgatggtattcaaagaatttatggttttttaggcgcattagatgatgtgtttcaacgtgtagaaactgactatagtccacagattatatcattcaagaataactatagatataataacacctctataaaagaactagatcatctaataagagcttatgtagatcaatatatagatccaaagttagagtcttctatattaataaaaaaactacaatcagatactgaagaggttaattttattagtgaaggaataaagaatataatagaaagtaattgtaatgttgctatactacttcgagcaggatggcaaggtggcattatagctgaaaaattaaaagatgaatcaattcatttttttaatgggctttattcggaagatgattgtgaatttattgatttttataatgttgcaatagaggagttttataataacgtttcaggtaatgcagttcaaagttcattaaaaaaatgcctgcaagctattaagaatcgtgaacatgaaatttatactaatgaccaaaaaaaatatatatttgattcgttatataagttgttagaaaagttatttgaagtatctaaaaattgggagggtaccacaaaagaaagatataaaaatattgagtttagtcttaataataatggcttaaaacatatgatagaatatcttgatgaaaaagttgtattaactactattcactcagctaaaggattagaatgggactatgtaattttgccacaaatgaataaaagtgtttttccttcatggaaacatatgtgtaagaagtgtcataatttaaatagttttaaattagataatgattcctgcacaagtttgttattaccagagatgaaaactttgtttagggaagagttaagtgtactctatgttgctttaacacgtgcaaagaaaaatgttttttttactgttaatactggtataaatacacatgggtatcctaagaaggaaaattgttttattaatttacctggtattaatcaattagattttgcgtggaatgattatgttagttag

SEQ ID NO: 72082 - DNA, 1583 bp, Oribacterium sinus F0268
ctaaaagatattcaatgggatttgatgttgcattaaatcaaataacacaagatagatcagaagaaattgataataaggatattcaaaaagttattaaagtggcaggaataagagctgatcgagcagtttctaatgatgatcgtaatcatgttttatcaggtttaaccggtaaatattatagttcttataaagcggcaaaaaatgaaagcgaatcggtatttacaagacttgaagaaaaattggaggaggctgataaagaactatataggatttacaatggagaaaaaagcgaaagtggagaaactatagatggcatttttagtaatgttatagatgttattaaaacttacggtggtgcagaaaatggaattgatatagcaatagaatcatctatttcagagaaaaatttattgtcagataatacaaacttaagttatagacaaggggaagattgttcacttccggaaacatataatggattgggatatttgaatttaattggtattttatttgagattgaaactaagatacaggaattttttgaacaacctgcagatataaatctcttatacattgaagagcctgaagcacatacacatcctcaattacagtatatatttataagaaatattaaacaacatataacaacacatagaaataagctattgaaagacaggaataaacagttgcagattataatcacttcacattcatcacatatagtgtctgaatgtaactttgatgacattatatacttaaagaaaaacgggaataaggttagtgcaaagagttttaattctttaaaagaagagtatggtggagataaacagaaaggatttaagtttgtaaaacaatatctgacaataaatagaagtgaacttttctttgctgacaaagctatttgtatagaaggagatacagaacgaatcttaatgccaatgatgatgcataaggttgataataaagaaaatccagaaggggatattatcccacttttatcacaaaatatttctgtaatagaagttggagcgcattcacatatttttattccattatttgagtttttaggaattaaggttttattaatcacagatatagatgccgcaaataaaaatgacaatgggagatatgcaaaatcacacccaaagacagcaaagtatacaagcaatgcttctataaaagattttttcaaagatacttgtcttgatgaagcaaataatgaatttgaggagcttgtagaaaaaagatctgaggataaaataaaaaataatattcgaatagcatatcaaattccggaaactgaaggtgggtatcaagcaagtagttttgaagatgcatttatagcattaaataaagactttatattaaagaataaagaagggctttgtgaatatggagctttaaaagatttttcgaatgatgaaatagaaaatggtgattattatatttttgctttgaataatgtgaaaaagaaatcggcatttgcatcaagcttattgtattttgatgatgagaatggcgaagaagatgaaaaatgggcagttccacattatattgaggagggcttattatggatacgctaa

SEQ ID NO: 72083 - DNA, 1908 bp, Oribacterium sinus F0268
atggatacgctaacattggaaaaagaagtattagaagctcttcaatgtataaaaaatggtgaaaattttattttagaaggtggagcaggaagtggaaaaacatactccttaatttccttaataaatgcacttacagaggaattaccagatattaagatagtatgtattacatatacaaataatgcagttgcagaaattttatcaagaatagaaaatgagaacctttgggtttcaacaatacatgagtttatatgggctcttatcagaaaatatcagtatgaaataaaagatattttagttgagcttattaacgatgataatgaaaagaactttaaaaagccaaaagatttttctgaggatttaatttctaaagaatattttgaaaatctttatgtggattatgatgagtattattctgtaacgccaaatgatgaaaagagagtgaaaatcagccatgatcacattttgattgttgcagagaaaatgtttgagaaatataaaaaaatagcggacattttaaaggatattgcagattgtatttttgttgatgaatatcaggatacaagtcctttagttgctgatattttactaaagcatcttgagcaaagcgataagaaaaatgtaattggtttttttggggattcaatgcagtctatatatgacgatggagttggtaatttagatcattatagtttaattaaaatagtaaagacacaaaaccgaagaaatccaagagtcgtaatagaagtagctaataaatttagagatgacgatattgagcaagtgccttcagaagatgtaaatgcacctaatatggagaatggcactattagagaaggtagtatcaaatttttatatggaagtgtaacaaatgattttataagtataaagggaaaaaatatttttgaatcatggaatttttctgatggaacacaaacaaaagaattaaggctaacacataaatataatgctgaaatggctggatttaaagatctatatgagctatataattctgatttaataattacgcttataggaaagataaaggataaaattgataatgataatttagagtgcaataaaactttgggagaattggcgttagaggtaaaacctacatttaagaaattagatttgctggagcaaattaacggaaataaaatttatcagtcaatatacagtgttttagaagatatgttatgggctgatgcttacaaaaaatgtagagttgataaggaatcacttatgtcatataaattcaatgggatgagtggtagatatgaagctaattcttatagagataggattttacgcagattagatatattagaggagattattgaattatatgaagctaataaatttaatgattttctacacatgacaaaattttctattcataatagaaatgataagcttattcttaagcaagtgattgatgattttgtaaatgaagataataaaacaatagaagatgttttagagtttgcggaagtaaaaggactactaaaagaagatgaactattcagtgattatattttaaataaagggctttatttatgggagagaataaaaaatataacatttaagcaatatagaaaaagtattttatacttaaaagaattttcaccgatttgtactcaacatagtgttaaaggaagtgaatatgacaatgtacttcttgtattagagtctgattggaataaatatgattttaatacattatttggaaaaggttctacaagttccaatgttcaggcaagaacgaaaaaattattttatgtatgtataacaagagcaaaaaagaatttaataatatatatgccgactaatgatgctgacatattatgtaaagcaaagttgttctttggtgaaaaaaatgttatagatatatcttcgattaagtaa

SEQ ID NO: 72084 - DNA, 2070 bp, Lactobacillus helveticus DSM 20075 = CGMCC 1.1877
ttggagaatattaaattgttcatatcaagtgttgaaataacaaacttcagaacttttaaggaaaaacaaataattcgttttacagagggaattaacattttagtcgggcccaacaatattggaaaaaccacgataatatcagcgataagattaatcttcgacaaaaataaatttggattagatataaatgattttagtaagactgaaacaaaagaagaattgaaaaactgctctcctaaaatcactgtgtcagttaacttgcaaaaatcaaacaaagaaggtagtgatagcgacgatcttctagcaatacgcaattggctgactgatatagataatccatataaggcaaagattactatgcagtttcaacttccaactaaatatgaaaaagcatatctggacgccgtaaaagacttagacgatataggcagtgtctggttagagttggaagatgagtttcttccaaaataccaaagaaaatattttgtaggagagtccgcacaaccattaatggataattcgttaagtcgttttaattgccaatatttgccagctattcgagatgctgaaaaaagaatgaattcgggaaacaaatatctactcaataaacttttaaattttttcattgattacgatttaaaaagcaatgaagagttgaaaaaatctgacatcgaaaagaagatgcaaaagcgacataaagattttcatgatctggctgtgaaactattgaataatcttagccctagatttaaagagggtaaaaaggaaatgctgaagtattcaagccaaaccggggctacttttgatggtgaagaaccagaattcaatagtgcgttaaatgatcacgatatcctaaaagaatttagtttagttgttaaaaatggtgaatcaaatgtgccaataaatttaaatgggctaggatataacaatttaatttatatttctttagtattagctgaacttcagcaaagtcgtgacaattcttattttggtgataattcaagtgtttttccatttctattaatagaagaacctgaggcacatcttcatcctgatatgcaatatgattttttaaaatttttacaaaataatatcaaggatggtacaactagtgaaacagcaaagcaggtgattataaccacgcattctcctaatattacagctgctgctagtttagatgatcttattgttctcagtaaatataaaagtggtgttaaaattggatatcctggggaaacgtttatcgataatccaaaagacaagaaatttgtagaacgatttttagatgtcacacgatccaatttgttttttactaatcaacttatttttattgaggggttagcggaacaaatgctaataccgcaatttatgaaagccgatacatctaacatacaaaacagacatatttctattattaatttgtctgggcgctatttcattccctttttaagaatgtttgatacaaataagaatcctaataccgcaatatataagcagattgcctgtctaacggacttagatcctgttcaaggaaagcaaaacaaatcctgtccgccaatatttcaagcggaacctgacaacaaaaatccgaatatagaaagtatcaaggctttgaaatcggctaatattaaagtgttctcacaagatgaagattctgactataagtctaatgaaggttggacgtttgaatatcagttgtatatggataatcctgatctaatgccattgatctttcacgattctatgagatattgtgatgcatgggaaaatttgaaacaaatgagcattgaaaatctgagtattgaaaaaatatcgaatactttccagaacgaaagatctaaacaaatcgacggaatactcaaggaaaatcacaatactaatgatttatcagaaattactgattccaagttaattaagctatatctaggaacaatgtttctatattcaattaaagataagggcctttatgcgcaagaactttccgaagaaataagtagtggtaaatctattacagtgccaaaatacatcaaaaaatgtttcaaatggatcgcagataaaaatggattataa

SEQ ID NO: 72085 - DNA, 1227 bp, Lactobacillus helveticus DSM 20075 = CGMCC 1.1877
atggaatataaacaatcatgttggaaaaacggcatcatcaattacgatgatgttttgttgttatcattaatcattttagaaaacaatccatttgttgctaaactgatttctaatagtttcccatttatctttattgacgaatttcaagacacttcaataatccaagctgaaatcattagtattttagctgataatggaagcaaagtaggagttattggcgatgagaatcaatcaatttatggatttgcgcattcaagtctggaaacctttagaaaattcagtctaccgaaactaaacaaatattgcattaatataaatcaccggagcagcgacccgataattaaacttttaaatggaattacagaaaattctgggaaggatcctcaaattttacagaacataccaggtcctaagccaactatagtggttggagaccctagattagttgttaattggtttttaaaaaatcacccccaaaactcagcatgttccaagatgatcattagttacagtaacgactatattgaacaaataaaaccgaattacagtgccccttctaaaaaaattaaggataatatcaataagatgcgcactgatgatagaggaagattcatctatagtattataaaatcacttaagttagcttctgagggtcaaataaacgccagtatttcatctttcttccgttcttacgaaaaaacaaatgctgacgaaaaatatgtcatatcaaagttttattatgcttacaataaaattaataattacttgaatcgtgatattagtacatggttcaacgagattcttcttgataagaatattcatgaagcaaattctgataacatttcgaaaataatgaagaagattacaggaagaaataaatgctttttagggttgaaagtcaaatatttattgtctgatgttcccttagaaggtactaactccgaatttaggactattcatcaatccaagggtgatgaagcagatgcagtgctcattatgatagatgacagtggcaaaaaaagagaaagtaatttttcgtttttactaaaaccaagccttagtggaagtaatgaggatgacagggtttattatgttgcaatgagtcgcgcaagacatgaactgtttttttctattccgtcgttaaacaaaaatataagaaagcagattgaagccactggtttagttaaaattcaggatattcttgatatattaaattccgaagtctaa

SEQ ID NO: 72086 - DNA, 2070 bp, Lactobacillus helveticus DSM 20075 = CGMCC 1.1877; identical to SEQ ID NO: 72084

SEQ ID NO: 72087 - DNA, 432 bp, Lactobacillus helveticus DSM 20075 = CGMCC 1.1877
atggattataaaagagtatcatctcatgagaacataaatattaatcaaaatttcttggtatcagctggccccggctcagggaaaacagaattcttagtaaaccatattcatcacataattaaagagtctggaaaaataaacacattaagaaaggtattggcgattacttatacgaatgttgcagccgataatctttcaaggcgtattggatatacatctggtcttacgcaagtttcaacaatacacagctttctatcagaatttatacttttaccatactcatggttattagaaggcaaatattctttaccaaagaagctcacaattacccctcatcaattagcgagtttttctgattttaaagagctttgccaaaaatataaatgccagtatatgacatattatgacaatattcgggatcgtatttcttaa

SEQ ID NO: 72088 - DNA, 1995 bp, Bacillus cereus BGSC 6E1
atgttaatttctgaactccatgtaagtaattttagatcgtttggatatgaatcacaaatgatagaaactgaaaatttaacagcacttattggtgccaatagttctggtaaaacaagtctaatcatggccttattaagattatttggacaaaaaaacacagatagaactttaataaaaacagattttcatattccagagggcgctgacgtatctaaaatcaaggaaatcgatcttatgatagaagcgaagataatatttcctgaattaaaattacagtcacctgttgatgtaaaaactattccagaatacattaagcatttaattattgaaaaggcaggtgaggagccttatttgcgaattaggttaaaagggaagtggatacaaggttcaacccctgagggtaatatcgaacaagagcttgtttatgtaaaaatcccttatggtcatgaagaaaaagaagaagatttaactaaagtgccaatacatcatcaaaaattaattcaaatgatgtacattcctgcaatgagagatccagccaaacaattaaaaaatgcttccggaactttattatggcgcatatttgatggtattgactggccagagaatttaaatgaagatataaaatcgttaacatctcctattgaaacattatttaaagaaattccaagtataaaaggtattcaggggattttaaatactcaatggagtaaatatcataatgatggaagatactccaacagccaattcaaatttaatggaaatagtttagatgaatttttgaaaaatgtggaaatattgtttaaccctactatcgatgggaactctgttaaggttgatagtttaggtgatggtttaaaatcattattttatataactctagtatctactttacttgaaatagaaaataaacaagaaaaagatgataaacctttactaaatatctttgcgattgaagaacccgaaaaccatatttcacagcatttactaggaagaattgttaggaatttaaaagaaatagctgctaaagataatgcacaagttgtcttatcatcacataattcatctatagttgggaaaatagaaccagaatatattagacatttacaaatacaggacataggatcgattgtgaataatattagtcttcctgaaaaaattgatgacgcacatacttatattaaagaggctgtaaaagcatatccggatttgtatttttcgaagttagtaatcttaggcgaaggtgatagtgaggaaatagtattacccaaattattacttgcagacgatatatatttagatgatttcaatatttcaatagttcctctaggtggcaggcatgtaaatcatatgtggaagcttttaaatgatttgtccataccacacattacactattagacttagatagagaaagagggggaggggattggaccagaattaaatacgtgttaaaacagcttaataagaataatagatgttcagaacaacttcgtacagttaaacggggtcctaaaagaataacttatacttatagcatgaaagagatagaagattttcatactagaaaaagtgaaatgtcaattgaaccttggaaaacaaaattagagaaagaagatgttttcttttcatatcctctcgatcttgatttttctatgttaataagttttgaaacagaatataaaaatactatggtaaatggacctcaaattccaaaaaaaatagactcgccggaatatgaaaaaaaattaaagaaatccatacaagcaactttaaaaaacgaaaaagctacagcagcaacttattctgatgaacaaaaaaaattaatgatttggtataattctttatttttaggtagaggaaaaccaagtacacatatagcggctttaaaggatattggagatactgaaataataaaaaatgccccacctgaactcttaaggcttgttcaacgtgtgaaagaaaaagttggattggtaggagatggtataaatgaatga

SEQ ID NO: 72089 - DNA, 1914 bp, Bacillus cereus BGSC 6E1
gtgttggagcaagattggaaaacttcaaataatgtgaaactggaagattcagccttacttgctataagagcttcaaatcatgtagcgattgccgctggaccaggtgctggaaaaacagaattgttagcacataaaacaggttaccttattcaaactgggatttgtccaaatcccaaaaaaatattagctattagctttaaaacagatgctgcaagaaatctgcaagaacgtgtcaaattaagatacggtaaaaatgtagaaaatagatttgaatcaaaaacctttgatgcctttgctaagggaatattagatcaatttatatatgcattacctaaagactatcaacccaaaagagattacgagattattctaaacgaaaaatcactaaacgatataataaaaggatatattacaaaatttaatccttatcatcctaattggcaacatgaatatcatcttaataaagtgttgggaaccatgaaagaaacggaattaccaatagtggtttttgaaagtgatttatattcttggataaacgaaagactgtgggtggttttattaaatggtaagggggatttaacaagttcacttactttttcaatgatatcaattttagttgagtatttattaaaagaaaacccattaatagttaaggcattacaagcgacatatagccatgtttttttggatgaatttcaagatacaacatataatcaatatagtcttctgaaaacaatttttttgaactcagatactgttattactgctgtcggagataataaacaacgtattatgggctgggctggagctttacacaatgcatttggaatatttgaatctgattttaatgcaacgcagcacacactttttaataattttagatctgctcctaatttagtctctatacaaaatatctttgctaaatctcttaatgacacccctatagaagttctcccagttggagagtggaacgaaaatgatggtgtttgtgaagtgtggaattttaaaaatcataatactgaagcaatcctattagcatcttatataagtgaatggatgaaaacagaaaatttaaagcctagagatttttgtatcctcgttaaacaacaagaacatatctatgcagctgaaataatgaaggaactttccaaaattaatataaaaagtagaatagaaaaagattatcaagaccttttatctgaggaaatagttctgcttattattaggattttacagttaagttatgaagaaaaatctcctgaattatggatgagtgtcattgatgaaatcatagatataaaatacagggatgttgatccagaaaagataaaatacctgagtatagaaaacgaattggtaaaaatgctagatgaggttagaaatcgttattcagatattgatgttacaaactttaattcacaattcacagaaatattacaagaaattgtagtttttttaggcgaagaccgtatcaaggcaacttatccgaaatacaatcaagccagttattttaatgaagtaatacaaaagatgttagataaactaaaatatcaaaatcgtatttcaatgaaggaattattacaagagttttgcggtgaatttagtataccaattatgacaattcataaaagtaaaggactagaatatcacactgtgatttttattggagttgaagatgctgcattttggagtttttctactcaaaaagaagcagataaaaatgcatttttcgtagcattatctagggcgaaacaaaaaatgatatttactgtaagtaaaaaaagaaacattttgaagtttggtaaggaaaaaaatgtaacgcaagaaactgaaaatgtctctgagcttatacaaacattaatggatgcaggtgttcctttaattgaagaaagtgatttggaaaaggtgttataa

SEQ ID NO: 72090 - DNA, 1779 bp, Bacillus cereus MM3
atgaaaatagagtggataaagataaaaggatttagaaatttcgataatgaaacaattaattttgcggagcaaactttaattatcggtgcaaatgatatagggaaaactaacttaatttatgctttgcgtcttctttttgatcgtagtttaagtgatagggatttagacttacttagtagtgattataatgtatatacaaaggcagattctattgaaattacagtaaaacttgtggacgtaaaggaagattgtttaataactgtatttaaaggtgatttgaatgaggggacagtatatatccaatataaaaattcgaaaaatggagagtatagtattctttcaggtccttcagaggaagcggtagaaataaaaaattctcgattttatattaagcgattaaatatggaatatgtgaatacaaatcgtaatttggaatcttttatgaagcgagaaaaaaatcaaatccttgaggatgcaaaattaaaattgacggaacaacagacacaaatggatgaacagtctatctttaaaattaaacgaggattagaagttgtaaataaaagggttgatcgtttaaattatattcaacaatccttgagtaaagtaaatgaggagttgggctcacttgctatacataacgaaagccaagagttgagttttaaaaatgctaattcagatgctgcaagaatgctagataatcttgaactgacatatagtacacaagagggtgcattaactttgggcggtgatggaaggaataatcaaatattcttggctacatggatttctaaacaaaaaaatataaaatccttagaaaaagtaacattttatgcgatagaagaaccagaggcacatttacatcctcagcagcaacgaaagctttctagctatttattagagaaatttgatgaacaagtttttattactacacattctccacatattgcatcggagtttaaaccagataggattgtcaaattatattctaaaaagaaatgtaccaaagttgcaaaaggtggatgtagcgaggaaataaagttggactttgatgactttggatacagattagatgccattacatcagacgtattttttgttaatgcagtatttttgatagaaggtccttcggaaaaattgttttatactgcattagctaaacaattggatattgatttagatagattaaacgtatcgattatatctgtaaatggtataggctttaagccatatataaagatttgtttagcgttagatattccttttgtattaagaacagataatgatattttcagtaaaacaaaaaaaattgaagaaaaggatgttgagttttctttccagggtggtatatctcgtgttatgggaatatatactgaacttttacaaacggaagctaatcaaagtctaataacatattggggagaacatgaagtagaaaatgagtggttaaaaaatgaaacacgtccacaagctgcaagtaatcttgcagagtatattattcgagagactgaaaaaaataatatatttttgtcgaaagtggatcttgagaatgacttagttaatagccagttatttagttcgctaaagaaattttataatactagagcaacggcgagtacagtaaagaaaatgcaaaaagcaaaagctgaaaatatgcttaattttttgaaagcacattttgatgatttaaaatgtttagcggatgataaaatttcagaaccacttaaacgaataaaaacattagctgaaaaggttgttagtgataatgaagaaagtaactaa

SEQ ID NO: 72091 - DNA, 1560 bp, Bacillus cereus MM3
ttggtaataacagctaagccaggtagtggtaaaacatatactattgtggaaaaaatagttgatatatctaaaaatttattgaattatcaaggggttatagctatttctttcaccagaaaagctagtcaagaattagagctacgttataaaaggaaaaatattgaaaataccaatcattttttcggcactatagataaattttacatttccgaaattattatacctttttcaaagcttttatttaataaagggaagccgttagaagttaaagattcgatagatgaatatcctaaatatgaagatttaaaaaagctgaaagaaaatagaattgataaagagctattcagacttttaaaggagtcactacaagaaggcttgatattcctagaaattagcggtgaaacagcattatttatattaaatgaagtaccacaatgcttaatatatcttacggctagatatactcatatttttattgatgaatatcaagattgtggtgaaatccaacatgaaatattcttgagattagttaataaagagattataggaattgctgttggggatttggatcaagccatttatgcattcagtgatagatattctaaatatttattatcgttgataggtgatgatggttttactcatctagaaatcactcgtaatcatagatgtcataaatcaatatcggattattctttagaattaatgggcattactagggatcacatagaagaagataagagggtctttaaagttaatgtaagaggaacagatgaacagattatttatgctatagaaaataatctaaatgaaataaaaaagaagtttaatttaagtaaaaatagcgactttgcgattttatgccgtggaaatggtacagctagaagagcttctgaatttctaacaatcgataataagctatttgtagatacacctttagataaaattaatggtaattgggcaagtttattcaacgatatcttaaattcttattatttatataagactaatgaaattactgttcttgactttgtaagtaagtatataaatgaagaattatattataaaaactttaggaaaggtttagaattagtaaacaagatatttaatctagaggataatcaattggaaataaatttaaaagaatttattagtgtagctcagctaatctatcctgagcaagaagacgtaagaattactcggatgcttaaaaaaattttaaaaaatgaagaagaattatatagttttaaacctgctacagagaatgaaataaatattatgacactacacaagtcaaaaggtttagagtttaagtgtgtatttttgatggatttgtataaatggattttacctcctgaaggcaattgggtatctgaagaagattatatacaagcattaaatttacattatgttggggttacaagggcaattgaagcttgttatataatgataggaaataaaaggtatagagagcgatatcaagatagtataatcgctcatgaatctgattttttatatttaaataatacagccaatttaagatcagatataaaattgtaa

SEQ ID NO: 72092 - DNA, 2094 bp, Bacillus cereus Rock1-3
atgtttttaaaagaaattaaaatttggaatttcaggaaatttggagaaggtgaagcaaatagcccaggtcttcaattggaatttcataagaattttaacctactgattggagaaaatgattcaggaaaaagtgcaattattgatgctattcactttactttagggacagtaagctctgaaaatttgaagataacagaaggagatttctatgttgatgaacaaggaaactctagtagtgagatgaaaatagaatgcattttcactgatctcactgaaacagaagcgggaatatttttagaatggctatcatttaacgaagtaaatgagtatgaattaattattcgacttacagcgaaaaagattaaaaatgaaatagttggagaaaaaatcgaaaaatttgtaaaggcaggccctgcaaatgcggatgttagattagaaggttctgctaaagaattaataaaagcaacctatttaaagcctttaagagacgctaaaaatgaattaagacctggctttaaatctagacttgctcaaattttaaagagttattctgcttttaaaactccttcagaaggtagccatgaattagaaaacattgttggagaaaccaatcaacaaattgaggggtattttacaaagcctatagaagataaaacgattattggagagatttccaattatttagatgaatttttcaatctaccgacaacaggaaaagaaacatataaaccaaagtttgaagtagctcctgctaaattaagtgatattctaaaaaaattaagtttagacttagatgatcaagtatctggattgggtagcctaaacttgctatttattgcggcagagttacttttattaaatgatggaatagagatgggatcaaatttaactttaatagaagaaatagaggcacatttacatcctcaagcgcagcttaggttaataaaatacttacaaaaaagtttagaaggtagctctgaatataaaggacaatttattttatcaactcatagtacaactctaactgcttctacatccttggaacatataatactaattcatgataataaagcatatccaatgggacctagtaacactagtctagaagaggaagattacgaatttttacagcgctttctagatgcaacaaaggctaacttgttttttgcaaaaggagtcatttttgtagaaggagatgcagagaacttattgcttcctgcattggcggaattaatagatagaccattacatagatatggagtttctattgtaaatatcgggaatactgcttttaaacgatatgcaaaaatattttcaagatctaagaaatggattaatgatggttactcaacattgaaaatgccggtctctattattacagatgttgatgtaaggcctgtagaattttacaaagataaggaaaagagcaaaaacgtaaaaagtgataaaaaggttctgattattgtagatgagtttgatttaaggaaaatagtcggggagaaaattgagagtaatgattttaatgaattaataggtcaaacattcacgtcaatgactaaattaaaaggtgaaatggagaggtattctataacgttgggcaaggaacaagaatccatgttaaaagaatctctttcaaaagatattaatcaagatatagtaatgaaactaagagaaaataaaaaatcgcatattgagtcggactttgaagaattagaagctaatgtaagtgtttttgttgcccctcattggacgctggaatatgagttggctctaagttctttaggtgtaacacttgcggaagtaattcattcaattcgctataaacaaccaaatagtgaagcaaatcaacaaaaattaaatgaaattattactgaattaaaaaatgaggatacgagaatagaagctgcttataaggtatataaacctttgaatgataaatatatttctaaagctatagtagctcaacaattagcaaaaagaatagaagaaaataaaaaagtacttaaagggaaagtgttagaagacccatatttaaattacttaataaaagcaatttatcatgttacagaaccaccaaaagggggagaagtatga

SEQ ID NO: 72093 - DNA, 1941 bp, Bacillus cereus Rock1-3
atgacgctattagatgtggaacacttggagacagaattgatagaagatgatttaataaaagagttaagaaatattgaaaaaatcatactccctgttaattgtgaattttcaagcgaacagaaatctgtaattttggcagagaagaatgcaaatattattgcgggaccaggtagtggcaaaacaacagttttaatagctaaaatcgcattagttattaaacgaataaaagatagtaagaaagaaaaaggaatatgtattattacacatacaaatgtagctgtagatgaaattaaaaaccagttaagaaaaattggaatatcagatcttgaatatccgaattttataggtactatacatgatttttttaatcacttttttgctcataaagcttatcaagagctttatccaaataaaaagggaatagtgtacgatgaagatatgtataaaaagttatttatagagatttttgaagaatataaaccttttacttatacatatgctccgccaacaagtaggataaaagaaacttatttagaattttatgataaaggtaaagttaatatattaggttattgtggcgatggttataaggatgcattaattgatacatttaaaaacatgttagaaaaggggatttttaggcataatgatatattatctttttcaaggtggtatataaaaaagtatgaaaaacaagtgaaaaatgcatttgcaaaccgattttcatgggcatttattgatgaagcacaggatacgagtaatattcaatatgaattgttaaaaagaatatttaacaacgaatcaacaatattgcagaagtttggagatccttatcaatcactttatacaatgtttagtaataaaaaagatgcttggataccatcacaagaaaaagaagtggatccaattgagttatcctatagtacaagatttggggatagtatttcaaatgtgctgaaaacagcatgtatagaagaatatactgctttaaaaggtaatcccaatataaaatctttcaaaccgcatttattgttgtataaatcgaaggaaaatgtaatagaggaatttctaaatatagtaaatagtttgtcagaaaagcaagtagaatttagagatagtaataaaaaaataggagtagtcggtttataccacgatgaagttaaaagttatcataaaaaatataaaaaaaatagcgatgtgaagcctaaaactgaaacaataatcaaaagcttttatgaattaatgataaaagggatgttaatgtatataaaggaacaggcacctaaggaaaaagcagcgtattcgagtaaatatttttatgatgtattaagaaaaccagagtacttaaatataaaagctcatatggcagtatatataaaagaggtttatttaaataatggaatagtaagtgagtgtataaaagagaaaattattgaaatgtacaaagaaattattcaattggaaggaataatatttaagagagatgatttgttaaacagagctattaactatgtctgtgatcatactgaaagaatttatattagctatcaaaggaacaaagagcaatctatatctgagcagattgaacaaatagagcaagaaatctattttggaacagtccatgcagtgaaaggggaaacacataaagcgactcttcttttagagtccgaagtaccaaaaggggattattataatcctgaattattctatgattgtactgaaattttcgagtttttaattggtgagtattgggattatacaaagtctgatcgaaaactatatgaagtaatcagagatggattaaaaacggcttatgttgccttaagtagaccgacacatttggcggcagtagctattaacaagcagaactttggaaagaatttagatgaaaaaaaacaattagctatgcaagctggatgggaagttatagagttgaactaa

SEQ ID NO: 72094 - DNA, 2046 bp, Bacillus cereus AH676
atgatattaatagaatttattggaggtaatattatgcaaacatctcgttcaccttatatatccaagataaaaatcaaaaatttccgcaactataaagatgtagatgttactttaagtcataagcaaataataattggagaaaataatgtaggaaaaacaaattttttacgagcaatacaactcattttagacccgaaattatcagatgaagaccgctacttgcaagagtctgactttttcgatggtttagaagaccctatgaaccagaaggaaaaaatagaaatttctattgaaattaaaggctatgagcataacaaaacaatattatccacattacaagaggctacagtatcaaccgaaccacccactttacgtttaacatatgagtattatccagccgaagatgggacgggtggatatcaatatcgtatctatcagggcactgatgccaataatttgtttacacattatcatcgacgttttctaaatataaaagttattcccgctattcgtgatgtagaaagtgaaatgaaaaacctacggaaatcaccaatcaatcagttaatcaatcaatacgatattagaaaagaagaacttgaaaaaatcgcaaccgctcttaaagaaaaaagcgatgaagttctatctattgatgaattagtagacttaacccaaaatataaattctcgattttcagatattatcggaacacaagtagactctactgtttcactagaaacaatagatatagaccctaatcgagttctgaatactttaaaattgatgataggacaggaaaaaaaacgttccactagtaatactagcttgggtttgaataacatcctttacatttccttaattttattatctttagaagataaaactattccttctattttaaaagaagatacgtacgatacattgacattagaaaaggaatcctctattttggctgattgttatgaaaaaaaggatagcaataactatatactaaaaaaagatatccagaagaaagattatgatgaattatatagctttatggatagcaatttttcttctaacaatggatttacccttcttgcaattgaagaaccggaatcgcatttacatcctgcacttcaacggattatttataaagatgtaatgaaggaaaacacatctattttaatgactacacattctccatatattacatctgtggcaccaatcaattcgattgtacatttacattctacaaagaatggcactgtcgttaatactacagcttcccttactctagatgacagagataaaaaagatttagaacgatatatagatgtaaaacgaggagaaatttactttgggcgtggagtaatcttaatagaaggcatagccgaagaatatcttatcccaagctttgctgagaaattaggaatgtctttagataaaaaaggaattatttgttgcaatattaattccaccaactttaaaccttatgttcaatttttagatactttagggattccttatgtcgtaattacagacggggactattacatatgggaagaaaagaaaaataagaaaggtactcttgaacccaaaaaaacatttggcattctcgctcaagatagccatgaagacttcggttatgatggaaacgacagaatcaaaaaactactaattgacttaaagaaaatcaaaagcaatgaaattcctgaaggttataccaaacaagacactctatttaaagtccacaacttttttataggtattcacactatggaaattgatattatgagtcgtattagcaacatgcaaacggaaaaagaactactatgtaagatatttaatgaactcacactaggtggggcaatacaaaagagtaactttaaaacatcgttagaaaaaggagaatatgtttcttgtcttaataaaattgaaagtagcaactcagggattggaaaaggacgatttgcccaacatttatccgtagaatgtactaaaaactttatacctagctatatacaagctgctattaaaacaattttcaaaagagtggacgaagtttga

SEQ ID NO: 72095 - DNA, 1827 bp, Bacillus cereus AH676
atggaattatacaataaaaaattaaaacagatacaacaagaccctgagcaatttactgcctttcaatccaatacaagtatcgttgtcaaagctggacccggtagtggaaaaacaaccattctaacactaaaaatcatgcagttattaaatgaaaaaattgcatttcctagaggattggcttgtattacctatagtaaggaagcagcgaaggaattcactgaacgtttacaaaaaatggggtgtccaaaaagaaaaaatgtttctctaggtacagttcattcattttgtatatcccaaattatcatcccatttgctaaactttttaatgacgatttccctcttcctttagacattattacagatgccgagaaacaaaaaatatttaattcaacacttacaaaccttggtatagataagtacacgctaagtgtggaggaaatggataaagaacgtagctttactttaacaggactaagtacagtaccagtaactttaaatccaactgcagcaaaagttgcatacgaatatgagcaacaactaaaaaagttaaaaaaaactgatttcattgaaatcgtaaaatactcacgagagctcattaacagagaagaatatattcgccgttgcttagaatctagatttccttggatactcgttgatgaatatcaagattttggaaaaccattacacgagatgattctttctctcttaagtttaaccaatataaaggtctttgcagtaggggacccggaccaatctatttatggttttaatggtgcaatacctgaatatttattagagctatacgataaacctgacatttcctccgtacatttaaagacaaattacaggagccatcaagatatcattgatgtctcatctattgcattaaatgtcgatgatagagagtataaagcaggtatagaatacgatggtaacgcagaatttcatttcattacgtgtgaagaagagcttgatacacaatacaattatgtagtgaataccattattccaaactgtcaaaatcaaggtattcctttacaagaaatttgtgtattagtgaaagatggtaatagcattaaaaatttaagcacagtgatgaaagaaaaacagattccacattatttttcaaaatttgaatttgcaaaaagtgatgttgtcctttggcttagaagttgtgctttatggctagtaaatccaacttcccaatctttcacagaaatagttaacttttggattcaattattgaaaaatgagacgaagcatttctctgatgaagaaacattaatgctacaaaaaaaactttataccattcttgaagatagtaaaaaatatgccgaaaacttaaatgattggttaacctatcttgaacaagaattaaatcttgcacaaattctaaatgaatctgtaacctatttagacgaaaacaaatatctcgaaacgctaaaaaattatgcacagagtggttctttccaaggttataacctatcacagttttcacaaataggtaaacccaaagaccaagtgacactgtctactagacatagttcaaaaggtctagaatttgaagtggtcattatgttaggaatggaaaaaggagtattcccctattataaaaatgaacgcaactctgcaaaattaaacgaagaacgtagagttttctttgtttgtttaacacgagctaagagaatttgttatttactaaggtcaaaaaaatatacaagaaaaactcgcaacggaataatcacttttgaccataaaccttctatgttctggaacgaattatatgaagtatgtgagaataaaaaattagtttcttctacaaattag

SEQ ID NO: 72096 - DNA, 2187 bp, Bacillus cereus AH1271
atgaagattaaaaaaattaaagtatctaattatagattgttgaaaaatatgaattttgatatggaagaaaatttatctttgattattgggaaaaataattgtgggaaaacatcattgctttctgcatttgaaaagtttattggagtgaaagtaggaggtaatgagttttgttatgatgactttaacatggattttcaagagggattatacagtatagtgaaattaaattctattccaacagatttgagatttcccatgggaattaaattacagttatttataacttataatgaatttgataatttaataaatctgagtcaattaatgatggatttagatccagagaataacacgattgtcttatcatttgaatatactttgtcaaaaactagcttagagaacttaataagtgaatttaaagagtataaagataagaaattagaaaaggtaggggaagacaacgaatctttagaacaaaatatttttaatgattttatgaagaaaaaccataaaaaatattttaaaatttggagaaaatcagttgcgtatgatttggaaaaacaaaagggaaatgaagtagaatttgttgatttaacaaaaagaaatattgctttaaataaaatcataaattttaagactataggtgctagaagaaatatatcgaatagtaataatgatcgtacattatcaactctgtcctcaaagtattatgaaagcaaaacagatagtgaaaaaggtatggaggaagtagaggtatttaaagagacgcttagtaaaactgataatgagttagatagtgtgtataaggaactttttaaaactgttattggaaaagtgaagcaatttggtgggattaaagaaggtgattcaaacataaggatagtttcgacattgcaacacaaagagttactaaaagggaataccacggtaatgtacgaacattttgagaagcaaactttacctgagagttacaatggccttggatatttaaatctattaagtatgatttttgaaattgaattaattattagtaatttccgtaaagaacataaaaaaaatgaaatgccagctgatataaatatattgtttattgaagaaccagaggctcatactcatccacaaatgcagtatatatttattaataacataaaaaggatattggaagaagcgagtatcggtggagatgggaaaaccaagtttaatttacaaactttgattactacacattctgctcatataacaaatgcaagtaattataatgatataaagtatttttataaagaaaataaaaatgaagtaatttccaaaaacctaaaagatttggaggaggagtatgagaaagacggtgaagaacaaaattttaaatttttaaaacaatatttaacaatacatagatctgaattattttttgcagacaaggctatattcatagaaggggatactgaaagaattttattgccagctatgatgaaaaaaatagataataatttagagtataaaagcagtccgccactgcattctcaaaatatatcgatattagaagttggggcgtattctcaaatttttgaaaaatttatcgattttataggcattaagtcattgattattacagatattgattcaggaaaaaatgtgatagtgaaagaaaaagaaaaaattgaaaagtgtagggtgttagaatcggatgctgaactaacaacaaattcttcattgaaattcttttataaaaatgggttggaagaaaacaagcggtctgtaatatatacaaatgatttagattattttaaaaagctttcatttaatcaaaaaatattacaaaaagttaaagaaactaagaactgggagcaaagtgataaaggtaatatagcaataatttatcaaacgtcggaagaaaactcgaaaggtgaaaaatatcacgcaaggagttttgaagatgcgttttttcatttgaatagacaatttattattgataacaaagaaaattttggtagtttaaagaatataaagcgtttcgagaatgaagaaaaagatgtttatgatttatcagaggaatgtatagataagaagccttcatttgcaatggaaatactattaaatagcaaaatagataatgacggtaatgagtacagtaattgggaaataccaaattatattaaggagggattgatatggttaaagttcaattag

SEQ ID NO: 72097 - DNA, 1635 bp, Bacillus cereus AH1271
atgaagcaaggactaatatacttaataaatagtgaagattctagaattaagatacctaattatgatgaattaattcaggattcgtattttagtgaactggagaatggtatccaatataaagaatataatcaaattaagaatgggattatttcgcatgatgaagttcttgagttggcgaattatatgtttaaaacacatccattactatgcgatttgttaaaagataaatatcaatttatttttattgatgagtatcaagatactagttcgctagtaatagagatttttttaaagcatatacgccaggggaaaaagaaaaatgttattggtttttttggtgattcaatgcagtctatttatgacgaagggattggtagtttagaggaatacattcttagtggggatgttcaagaaattcgaaagaaacaaaatagaaggaatccgaaagtagtaattgaattagccaatagattaagagtagataaattaattcaagagccttcaagtgataaacaggctcccaatatgtataatggtttggttaaagaaggaagtattaaatttttgtattcagcaataaatgatttagagcttgtaaaatcctcagaatttttcagagactgggattttaataatccaaaacaaactaaagaattaaatctgactcacaatttaattgcggctaaggccggttttactgaattgatggaaatctatgataaggaccctattatttcatttaagaatgatcttttaaataaaataaaacaagacacgaatgagaagaaagagaatatattaaatgatacaaatataacttttgaagaagttacgaaattatatccaattcaaaataagaaaaaagaattaaaaaaagaattaatacaagaaaaccctaatactaacgtactttatgaacagttgaaagattgtcccttttcaactgttaaaaagatttatttaaataaagacgctcttatagatgataaaaagcaagatagaaatgatgatggtaagaaaggttcaaaaagagataatttaattaagcatttatttaaaattcaaactttaattcagttatacaaagagaaaaagtataatgactttattagaaaaactgagttttctataacttctatttcaaaaaaaagagaaataaaaactattatcgatacaattgaaaaaatgtcaaatcagactatagaaaaggtaattaactttgcacatgagagtgggttgtgtagaaaggatgatgattttactaggttcgtcgaaaaaaataaatacttattcaatagagttagtaaggtaaaatatcaagagtttcaaaacttattcaaatatttagagggtttcacgccgttttctacacaacacaaaattaaaggagaagaatttgataatgttcttgttattcttgataatggaaaatggaataaatataattttgaatacctattttgcaataggatagataaaagaagagtattagagcgaagccaaaagattttttatgtgtgctgtactagggcaaaagaaaatttaattgttttttataataatcctaatgatggtgttatagaaaaagcaaaagaatggtttggggaaaataatgtacatagaatagaaatgtga

SEQ ID NO: 72098 - DNA, 1791 bp, Bacillus thuringiensis serovar huazhongensis BGSC 4BD1
ttgaatgaggggctatctattattattggagaaaataatggtgggaagtctaactttttagaagcattaaatttgatttttaataataactattccatacgaaaaagaacattagaacaagaagacttttggaatggtttagtaattaaagatacttggccagagattgttattgaggtaattattaaaggtataaataacgaagatgaacttgctattacaagtagatggttgactagaacccctagtgaagcaaaacttacatataaatttagaccgaagatgggtattaagacagttgcaccttctaaacctacttcaattagcaaaatctgtcttcctattgaggagtatgaatgggtaatttatgggggagagcaagaaacattagatgcctttgacttcaatatgttaaataaatttggagttgaatatgtaggtgctcttcgtgatgctactactgatttgaaaaagtcttcaggccaattacatcgaattttgaaacattatgatatagcagaaaaagatttagaagcgattgcagataaacttgataaattgaatgaacagattgaaaaagggaaagaaattaacactgttcagactagtattaatacctatctagaaaagattactggggttactaagcaacaagtgaaaataaaaatgggagagagtaactatgatactctcttaaaagatttaaaactctctattggatcaaacgaagatgaattgcattctgttgaaaagaatggtttggggtacaataatttactctatattagcctattactttcgcaatatacaactgttaaagagaaaaaagcatcaaaacatgattatctgtttcctcttcttattgtagaagaaccggaagcacacttacacagtcatttgcaaaaattcttagcagactatttctttaagcaaaaggtaataggacaagttattatgactacacattcttctcatgtaagctcacatggagaactagataatttaatattgttttataaaaataaaggaaacactctttctaaacgcattggaaccatatttgatgaaaggaagaaagaacaacgtgaacataaaagatacttagagcgttggcttgatgctactaaatcaaatatattctttgggagaaaagtgttgttagtagagggaatagctgaaagattacttattccaaagttttttcaaatgttatatgaaggaaaaactttggagggagaaaacatttctattatctcagttgatggtgtagcgtttcgaccgttccttcatttatttaatcctttagctttagatatgaagtgttcagtcttaacagatagtgatcccgctaaagtacctgtattaaattcttctaatcaagaggttaaggataaaaatggtgatgttataaaagaagctgtttatcctgttaaaaaagaagattgtgctgtttgtgacagaacgcaaggcttaatagatgactttaactcattgtcaaatatacaaatttttaataatcttaaaacctttgagtacgatttgatgttagaaaacaatacaggtttttttgaagaattaattattaaacataatgtcggtactaaggctgatagagaaagtattgctgagctggagggagcggtgtttgcaaaaaaggcatacgaagttatttctaatgaaaaaggtgatttttcacagcttatccttgatgaattaaacgaagggggaattttaaacattccttcatatattaaatgtgcctttgaatttctaatgaaagaagaggaatag

SEQ ID NO: 72099 - DNA, 1791 bp, Bacillus thuringiensis serovar huazhongensis BGSC 4BD1
atgttggtagataatgaagcatatagacagaaaatcattaactcacctgtaacagattctattattgtccaagcaggtccaggaagtggtaaaacaacattactaattgaacggctaaaatatttcattcaaaaccgttctagtgtgttatcaggtattgcttgtattacttataccaattcagcaaaagatgaaattttaaatcgtttggaaaaaaaggggatatcattaccgcctgaattatttgtaggcactatccattcattcttactggaatatgttattaaaccatactcatacgtagcaagcaaaacagcagaatcctttatactcttacctcctggcttttctaggggatactataatgaaataaggcggttacttaacattgaaagcaattatatacctaatagagtatatgaaaattttgagtcacttgggtatgatgaagatggtaatgaatgttgttttcggagtgcaatttcacatgatgtagcgaaagagtggaagaagcttttgcataaaaaacattatattgaccaacaagatattatttatctttcttatcttatactaaacaaattcaaacatatctcaaaggctttgagtatacgttttcctcaatttcttgtagatgaatatcaagatgtcacatggcatcaagatcaaattttttctatattagagagttcttcgttcttttgtgttggagattttaaccaatctatttttggatttactggagcaaattcagaagtatttcaaaaaaagaaagacaagcaacagttttatgagctaaataataatttccgaagtaccaatcacatcattggattttccaactataaaacagatatctcacaaatcggagctggtacaaatgctagttctatacaaaaggtatttatgtttacaggcttagaaaaggaagtaggtgctattgagctctttcatcgtgtgagagaatctgtagggtgtgaaaatgcctataaacagtttatgattttaggacgaaaaactaaatatcttcgaaatctacatgatattgtaaaagcagaaaaaattcagcctaatacctttttaggaagtctaaaagaaaaagattatcggagatttgaaattttaaataatattttattggcgattttatacaaacgagaaggtgaactcgataaagggttagaaatgatggatatggcttttagtcgtcttttttttaataagctacctaactatattcaattagaaagtattaaatacgagcgtttaatgtggaaaaagcttcagatagctctgttatactatattgacacacttaatttgaaggaaattcttattaaggattttttccctagtattaaagagtttttagcaaatacttctgagtctacctataaaataaaaataaaaaagtatatacaaatgcttaattataactggaaaggccaaaccggtgcagtgaaaaagataagtatatatgacttattagaactaatgatatatcaagtgaaatcagtggagaaagagaaacctttttacactattcatgacgctaaaggtcaagaagcggaatgtgtattggtgctagctgaaaatgagacacaactaaaagagtggttagatagtaacgaggattcggaagaagctcgagttggatatgttgcattttctagagctagaaaacttttatgtatttgggcaccaaatattaaagaagaaacgtataattatatgcaggaacatgtggagtttatagatgcaaagtatttgagtaaagttgaaagtgtctag

SEQ ID NO: 72100 - DNA, 1350 bp, Bacillus thuringiensis serovar huazhongensis BGSC 4BD1
atgaaacctatcgataatttatttaatgatattccaggtgttaatacaatcaaacaaatagttggtcaagagtggaaaaaatatcataaagatttcagatatcaaaatgcttcaatagaatttagtagcactaatttagctacaatcctaaaaaaaatagagatacagttttctcctatagaacatggtggaaaatataccatcgataaactaggagatggtctacgttcactgttctatttatcactagtatcttctttattagaaattgagcatcaagtcttagatgatcaaccagcagtattacgaattttagctgttgaagaacctgaaaatcatattgccccgcatttactaggacgtgtaatggagaacttaaaagatatttcaaaaagagacaatgcacaagttatagtttcttctcacagcacatcaatagtaaaaagggttgaaccacaatatattaaacaccttagggttaataaccaaggacataccattgtacatgatattaaattaccaactaaaaaaactgaagaacataaatacataaaggaagctattaaagcatatccagagctctacttctcgaaactcgtaatattaggagaaggagatagtgaagaaattgtactacctgggattttagaagcaaataatatttttccagatgactttgggatttccattgtgcccctaggtggacgatacgtaaatcacatgtggcgattactcaatcaactagatattccacatatcacacttttagatttagatcgcgagcgtggaggcggcgcttggggaagaataaaatatgtactaaaccaattgattgaaaatggatatgattcgacagaagtactaaaaattaaatacggtggaagaagtcatattctatcacaaaacgaactaaaaaacttacacaaaaaaagaatgaatattagttatttaaataaatggataaataaattggatgaatacaatatattcttttctcaaccaatggatttggatttttctatgttaaaatcgtttcctactgcctataaagagacagctccaagaggaccaagtattccaaataaagaaacaaaccctaaggaatataataaaaaaataaaagctgctattcatggtgcgttaaaaagtgaaaaagccaaagggaatacttactctgaacaagataaggaacttatgatttggtataataacttatttcttggtcgtggaaaaccaagtacacacatccatgcaataaacaatataccgaaagaagagttacttgaaaatagtcctactgaactaaaaaatttaactaatcgtgtaaaacaaatattagaaatacagtga

SEQ ID NO: 72101 - DNA, 1926 bp, Bacillus thuringiensis serovar huazhongensis BGSC 4BD1
atgaattccatcctgctttctgataattggaagcccgctacagacatacaactagaaaaagctgcattagcagctgtcaaaagtgattgtaacctggcgattgttgctggaccaggagccggaaaaactgagctattagctcaccgagcgggatatctattacagactaaaaaatgtgaatatcctagaaaaattctagcaatcagctttaaagttgacgctgctaaaaacttagaaacaagagtaaaagaaaggtatggcgaggaaatatcccaaagatttgactccaaaactttcgattcttttgcaaaacacttagtagatcgttttagaaatgctctccctacagaatatcgtccgagtagagattatgaaattattagcaccgaaagagaagttggagagattgctaaaacatatattactgaagaaaatccttattttccgaattgggaatactttttcagtaataaggaattatttaaagctctccataatagtaaacttcccttggtgcaggtgaaaagcgatttatataattggctctctagcagtatgtggtcccttctaattcatggaaaaggtgatttaaaaagttctctcacttttcccatgatatctagattagctgaatatttattaagagtgaatccttatatactttcggcactacagtgtacctatagtcatgtatttttggatgaattccaagataccacaaacactcagtatgatttattaaaaactgcttttttaaattcagatacaatcttaacggcagtaggggacaataaacagcgaattatgggctgggcaaatgctctcaatgatgctacttctgatttcataaaagattttaatggaacacagaatcagctaataatgaatcatagatctgctcctaagttagtggaaatccaaaatgtgttagcccaacgcatcacagaaaattgttctctagctaaagtatcaaataaatggggagaattagaaggattatgtgaaatctgggcatttgaacattatcaaaaagaagctgattatttagcagaaaaaatatcaacatggataaataccaacggtctacaacctcgtgatatttgtattttagtaaaacaacaagagctgatttacggaaaatccttgatatccgcactaagtaaaaaaaatatacaagcaagaatagagaaagagtatcaagaattacttagcgaagactgtgtacacttattcctaaatattttttctatattagcagacgctgaaagttcaaaagcttggctaaatattgtttcccttttaagtactattcgtggtatacaggataatcaaaacaatgaagttttcaatcttgaaatagaattacaagtctttattgaacaactacaacgagatataaatacattcaactttgaaaaagatacattatgtttaaatatagaaaaggtcttaagacgaattatagatttcataggtgactcaaactttaagtgctattttccttattatcaaaaagataaatatttaaccgctatactccaaaaattttcattaaaattagcaatagcttatattgaaactaaggattggtataaagctataaaagaatttcttggagattatagtattcctattatgaccattcataaaagtaaaggtttagaatatgatacagtaatttttgttggtctagaagatgatgctttctggagtttcaaaacccagacacaggcggatacatgtgcctttttcgttgctttatcaagagcaaaaaaacaagtaatttttacatttagtcaatacagagagattaaaaaaatgaaaactttaagcactgaaagacaatccgtacaaaacatttcagaactctataagattttactatctgttaaagtaccaataaaaaaaataggatctactatataa

SEQ ID NO: 72102 - DNA, 2397 bp, Bacillus thuringiensis IBL 200
atgtttattgaaaaattgaatataaaaaattataaaaagttgaaggatgtaaaagtttgtttatcgcagaaacaaaatttatttattggccctaataatagcgggaaaacgtcagctattgaaattttagtgaaatttttaacagataaaaaatcttttaatatttatgatgtaacaataggtaattggagtcaattagacaatctatttactttatattattccaaacacgatgaagatggacaagaattagtgttagcagatttatataataaaatgatgcatctacttcctactttaaaagtaactttgaggatagaagaggccgaattatatcacgttaagtcgttaattccatatttaaataaagaatgcgaaaaagtagctgtgacatatacttatgaacccgttgactttgagaagctgatattagattataagaattttcggaattcagttagtgcttggaaaacactaactttaagtagtcaccaggtacctgaagtagatttggaagaaattgcgaaggatcattggccaagtaattttaaatcctttttagcaactgatggtagattcaaaaaatatttcacgattaaatattatatttctaatccagatttagaggatggtgatatttatgatgtatctactagtctaactacaaaccctttaaagaatattgttaaagttagtgtgattggcgcacaaagaggcttaatagattcgaatgaagatggcgatactattgatggagcaaaaattaatttaaataatacaagaaagttatccaagctattttctagctactatagtgagtatttaaatccaattaatcaatattctgaaaaagattatacaatattgaatgcggtaacaaattctaaaaaagcttttaagcagcatttagaagaaagtattaaacctatccaaaaaaagatgggcgatttaggttatcctggattcgggagtccttcaattactgttcgtccacaaataaatctttcagattctattaagggagaagcaagtctgttacttaatacacataaagatgggataaatgatgaacagtattttttaccagagcataataatggtttaggatatcagaatttaattgcgatgttttttaaattaaatatttttaaacaagaacgattagcttatgggggcgaaaatgaaaaaattatagagccacttcacttaatgttaatagaagaaccagaagcgcatttacatgctcaagcacaaaaagtatttattgataaagcatatgaattaattaaggtatctcttgaagagactggtataaatgcttcgtttactactcaattacttattagtacacattctagtcatattacttataaggctgatatcgatgaattgatttattttaatagaaaattgcaagatgatgttttttcttctgaagtaatcaatttaaaagacgttcctttagatccgaatgctatttttaatgatgaggatgaacagttgaaaggtttgtctaataagaaatttgtacaaaaatatttgcaattatatgagcatgatctgttttttgctgatgcggttattttaatagagggggtatcagaaagaatattattaccagaattaattagaaaacatgtaactagtctaactagtcgctatattacaattttagaaattggtggcgcttatgctaatagatttataccttttttaaaggcaataaatcgtcccactttaatcattacagatatagattctgtaaaaatgaatgggacaaagacacatgtaagtattactgaagaattaaaatcttctaatactactattaataattggtttgagaaatctccagatgaacggaagttacatagaagatttggagttagtaaaggtgctggtaaaggtgctcgtaaaaaagtttctaactcagttttagatgataagttaattcatcaacttattagtaagtgtcaagaagagaaaataaaaaatcctattcgtttagcataccaatatgaagaatatagtgaaaatatttatgcgagaacatttgaagatgcaatagcacttgaaaactttgaaatgtttaaaaatttagatgtgaaaaacaatcaatttagtaaacttattctaaatatacatgagctatttaaagaagttggagataaaggaagcttaagcatacaacatgccgaaaagttatttgcttatgttaacgagaaaaatgtaaagtctgaatttgctcttgatttattatttattgatgaattcactgaggataattttatgaactgtcctaaatatattttagaaggattattatggctagaagagcaactcacatcaaaaatagaaactagtaaagctgaggaggaagcatatggaacagtataa

SEQ ID NO: 72103 - DNA, 1644 bp, Bacillus thuringiensis IBL 200
atgaatatcactaagaatagtggggattatttaaagaaaactagtaaaaaaattgctgttataacatacacaaaagttgctagtgaagaaataatctctagaacccctgaaaatatattatttgatatttcaacaatccatagttacgtatggaatttaataaaaggatataatcgtaatattaaagaagtattacttcatatttgtgataaagagatcaatgattatattgcgaagggaaaattaacaaaatctcaaaaagaaaaattggaaaatcttaagaacaaaaagagagaaattgaaaaacaacagatttttaattattcaccagaaagttcgataaacgaaaaagggtcgctaactcactcagaagtattaaagatattctgttttctcttagattcaaatgaattgtttaggaaacttgtgtgtcataagtatcctattattttaattgacgagtgtcaggatacaaataaagaagtattagatgcctttttgaaattgaacagggaaaataaaatttgtttaggcctctttggagacataatgcaaagggtttatttggatggaaaaaccgatttgattcagtcattaaaaggattagaaatgcctgaaaagaaggttaactggagaagttatggaaggatagtgaaatttacaaacgctcttagaaaaaatattgacaatttagaacaagaagtttgtaatggagacagagaaaataaaggattaatccgaatatgtcttgttaatcacgaattaccaagaaccaagagtgaagaggatgttctggaaaacattaggactcaagttataaataataatgttgacagtgagtataatccgtataaattagtattagaacatagattagcagcagaaaggaataactttttaaagttatttgatgcattcaaatctggtaaagatacaaataaaacaataatagatggagaatctagggagcatacattttttaaacaaatcattataccattgtatctagctttgaaagcaaacgatgattttagtctacatcgattattgaagaactacagttatagatttgaagaattgaatcggaaaaatatcgattcatatagaatattaagagatatagggatcgattttaaaaaatttttagaaacgtttaatgatgatatcacagtaggggatgtatgtgaagcaatacttaaatctaatttgtttgaagtcccagaaaagttaaaggtcgattttcaagaagaaacggggtggaagtttgtttttgaagttgattttatagagttagtaaatttttatgagtatattgatggagtttcagatatcattacacaacaaggttcaaaaggtttagaatataatcacgttcaagtaataatcgatgattacagtgcaaaaggtcgtttatttagctatgaaaaattatttggtgtaaaggaaaaatcagtaaaagatattgataatgaagcacaaggtaaggagacaactttacataaaacaaatagattattttacgtagcatgtagtcgagcaattaaatccttagtattaattatttatacagccaatcagcaaaaagtaaaagagttttttatagataatgaatttgcaagtgaagaagagattttgcttttataa

SEQ ID NO: 72104 - DNA, 786 bp, Bacillus thuringiensis IBL 4222
atggtgcgtctaactgaaatgaaaaaccttagagtctcaagaccactaaatcatttagaaagtaaaatttatgatttttcgatttttaaggagagcttgagtggcgatattactttggatacgttctatgattggttttatgaaattggattttcagaaattgtttttgcagacagagttattctttatgagggtgatacagaacgactgcttataagaaagttattgactttagatgcatatgaagagcttaatcaaaagtacatagcgtatgttcaggtaggtggtgcttatgcgcacaagtatagtaaggtaatcgatttcctgaaaataaaaacacttattctaacggatttagattataaaaaaggagcagtaactgtagaagcagtaaaggaatctaacacaacaaatgcaacaatcaatagctactataatgattcaaaagggacggatcttccaacagtacttgatctgtataaatggaaagagaacggtgaaaataacatgttcggaggactagctttactcagttatcaaggacaagctgaacagtacgctcgtaccttagaagaggctatgttatcaaagttttataattttaatgtattagaaaaaaagatagagctttttggattcaaagaagggatattgataaacttaaatatactgttccgaaccctgttaaaccaaatgaagataatccaaatccagataacaaatatagtattagggatattgttaaacatacagaaaatcgaaagactgattttatgtactcattga

SEQ ID NO: 72105 - DNA, 1938 bp, Bacillus thuringiensis IBL 4222
atgttttgtgttaatgcgccagcaggtagtggtaaaacaacaaaaataaaatcaatgattgtaaatcataagataaaacatccaatagataatatactttgtataacctatacaaagagagctgcggaagagcttaacaaagattttaatgaagaagggattcatataagtacaattcattcatttcttcataaatttttaaaaatatatttttgtaagactgaaatgaaggatttatattttgaaatgtttgaggacttaatcaaagaaagtatagagaataaagaggaaaaagaacatatagttacaagaaaccaaaagtatattgaaaagcatggttgtttatcggtagagagtatcaaagcgaatatagatgctatttattataatgagtcttcgaacaatcatctttacacagggggattagcccatgatagtttattgttattcgcagaaaaggtgtttgataagtttccgaagattaaaatgagactaacgcaaaagtatcaatcaatcttcattgatgagtatcaagattcggctgctagtgtattaagaatgttttataaggcatgtcttaatacaaaatcaaacctctattttcttggtgacaagatgcaacaaatatataagaactatgatggatcatttgaagaagaattaaaaactttgaataccgatattaaattagatattaatcaccgttcaataccagatatcgtttctgtgctaaataatatatataatgataaggggtttaaacagaacccgtctaaaaaaaatcttgatattaaaccagaccatccaccaagaataataatgtgtgataacattcaagaaaggctaaaaagagagtgttcaatttatcccgatgctttattgctatttttattaaatcaacaaaaatttgcttcaattggtgcaagagaattatataaacaatttagtcacttggagagatattcacatgcaaaacaattaagtgccacggatgttttatctgataatactagtgaaaatacagatcctcttttaaaactactttttatagtcggagaagtggtagattattataaaaagtctaatgttggaagtataattcaaatttttaaagcgaatcgtaaattatttgacatggggattggtacaattactagtcatcgggatagaattgatttgaccaaactgttaaaacagctgtatgaagattatcataaagaaatctcgataagtgaatttttaactttattgaggggatgtaatctatttaaaagcagctatatagataacatgggcgatgaatatttggaagttttaaaagtgaaattaaatgaatttaaagcactatcaaattatttgcgaaatccagcagtctcaacacagcacggggtaaaaggagagagtcataatactgtattctttattgcagaagattcttttaggacgccaatagttcatatgcataaattcttaaaattatggactattaaggaattaacgttagattctttggaatctttttattatgattataataaatggattgaagatacaattagccacttgggatgtaaaatatcggatttaaataaagaaagtcacaatgaacataagatttatttaaaaacaagggtagagcaattatgcaagcattttgaggctgattttatatttaaggatttatgtgaagaatcttatagtaaatatattctcaatcccaatgttacaaatattaaaaagtgttttaaagaaagtactgtgtatggtgttctttcggcttataaacttttttatgtaggttgttcaagagcaaggagcaacttatctatttttgttgataaatctaagattgaaggtttctcagaggaattgattgttaagttaagaagaattggttttagtgttgaaattgaaacaaaagaattgcagaaagtgtag

SEQ ID NO: 72106 - DNA, 2190 bp, Enterococcus faecium TC 6
atgtttatatctactcttcaaattcgaaattttagaaattatgaatccgaaatctttcgattcgataatgagacaaatactattataggtgagaatgattcagggaaaaccaatgctcttactgcattgagaatcttattagatgatagttattactatagtagtaaaacactgaaagaatcagatttttttcatggaattcaaaatgggtggcaagggcattggattattatctctgcgacatttgaaggaatcagcgaagaagaatttgacaatgagatttgtgcttccatttctttaaattctgaaagtcaaacaatcttagaagaattgatttcaaatgcagataaaggtgtaggtagtatttctctatttattagacctaacaaagctattagaaagcaattatttgatatttccactgaattagactctcatcaatttaacgaatttagaaattctattcgtctatccgactatgaattttactacacatctaaatcaaatctaaatttctgtatcaatgaaaattatgataaattggtaggaagactcaatgacaatatagctagtaatcctgaagaagacgatgaagctcttttgggctcaagaattgacatgtcagatattttcaagcatatttcggttgtttatgttgacgctcttcgagatgttcttagagaaatgaaaaacaatcgaaaccctgtcaaaagaatcatggaaacaattgaatcaaaaatatcatcagataatgttgagtcattaaaaacaattatacagcaattaaatgagactattaccagtgttcctgaaattaggaaaattggcgaaaatattaatcggcaactaaatagcataattggttcagtgtattctcctaatcttcttctttcctcaactatgtcagatgatatgggttctttagcaaaatttctttcaatgaagccagaacaaaatatcgacttagacttactagggttaggacatctaaatatgatttatttagctttgaaaatagtcgaatttgaagcgtgtcgttcaagagaactacttaatattatgttgattgaagaaccagaagctcatattcatcatcatattcaaaaaactctgttcgaaggattaaatcttcaaaaaaactatactcagattctcatgaccacacattctgtacatttagctgaagtgtctgaaatatctcggatgaatgtattaaaatcgtttaatggcaaatctatcgttatgaatccagaaaataatctgaactcatttgctaaagaaaagttaaaaaagaacaatctaaatctaataaacgcagtagagagatatttagatgttaaaagaaatggattgcttttttctaaaggtgttatcttagttgaaggagatgctgaagaaatacttattcctcaaatagtaaaaaaattatttggtataaacttagacgaacttggaataggtttgattaatgttggtagtacttcgtttgaatatatcgctagcttgtttgacgatgatagaatacagagaaagtgtgctattgtaactgatttagatgaacaggcaatcccatcagaacatcgattgtataaaagcactgcacaagagaaaggtcaagcaagaaaagaaaaattatcctccctttttaatgaaaacaattgggttaattgtttttatgctaatacaacatttgaaattgagtttttagatgtgaataaagaaaatattctaacttatgtcagtccaattatagatgacgcattcaaagataaaaaaacaataactgcttataaagaagaaatacaaagtgaacaatatttagaaagaaatttagcgatgttaaaactagccaatcatgttggtaaggggtggtttgcaattgagttaggtgaaaaaattgactttttaatcaaaattcctaagtatattcttaatgctattgcttttgcatgtcaggaaatagtagatctctcaatttataaaaaaattctactccatacaatcgacttgtacgaggaaactacagaattgtcagctttatcagctagtttaaaaacaagtgatacagctgatttgaatatagcaataatttctttattagagtactttggtaaagatgaggatgttgtgtatctaatcaatcagatagaaaattacacaaaaatactttatgctgaggtttcaaaatga

SEQ ID NO: 72107 - DNA, 987 bp, Enterococcus faecium TC 6
atgacaaatatcttcgaaaaaatcgtaaatgatttaaatttagaacaaaaagatgttgtggaaagtgaagataacctttatgtaaatgcatgtcctgggagtgggaaaacaagggtacttacaaggaaaattgcttaccaagcaattaaacacgatggatcactaaaaagaataattgctatcacatacactaatagagctgctgaagaaattaaggaacgcctaagtttacttagtatagatgatgatattaatatttgggtggggacaatacatcagttttgtcttgaatttattatttatccttttaaaatgaatctctcaagagtatcaaaaggatttacaattattgatgattatactcaaagagcttacgtcagccaaattaataatatgctgaatttaaatctcaaaacgtatgaactgaacaaaattgatttgtcactttctcatgattttaaaattaatgaagttcagtatactcaagtttctgaaatgtatcacactatgttggaaaaaaataaagaaattgattttgatatgattttactagtagcgtataaaattttaactgtaaacagtaacgttgcacgtaatattgctagtaatataagggcgatttatgtggatgaatttcaagatactagagaattacaatacaatgtaatagctaaattacttcaaaacaaccctcaaattcagtcaatgtttgttggagatattgaccaagcaatttatggatcattagatggtatagctaaatcagttgaagaactagaaatgctaactagtcacacttttcaatcaaagacgctacatggctgttacaggtctaatcagagattagtagacttctactctaattttcagagttgtccttacgagattgaaagcagagggaataataaaaacgaccgtggttttataagttatgattgcaaagttactaaggaggatttacccaacataataaaaaatataatatag

SEQ ID NO: 72108 - DNA, 2067 bp, Eubacterium saphenum ATCC 49989
atgattttaagaaagatgaaggttaaaaactttaggttgctaaaagattttgaattagaatttaaagatgaattgtcattagttataggtaaaaataattgtggaaaaacatcagctcttattattttggacaagatgttaaattcatctaaagtaatgtgggaagatataaatttggaatgtcagaaatatctgtataagaaaataatggatttcgagatgtctgagcaagagaaagttgaatcattagaagctgttaatctccaattgtttattgagtataatgacaatgattcatatgtaaatatacaaaaatttatgatggatttgaatccagataataatattatagttttagaatttatttcattaatacctataaagaaaattatagaattaaaagagatcgttaatgaaaaaaaacttgaagacttcatatcattttctaaatttatcggcaagaatttttcaaacttttttgaaactaaaaaatattcgaggggatttgatgctgaattaaatcaaataacacaagatagatcagaagagattgataataaggatattcaaaaagtaattaaagtggcaggaattagagctgatagagcagtttctaatgatgatcgtaatcatgttttatcaggtttaactggtaaatattttgcttcttataaggccgcaaaaaatgaaagcgaattagtatttacaagacttgaagaaaaattggatgaagccgataaagaattatataagatttacaatggagaaaaaagtgaaagtggagaatctattgaaggcatttttagtggagttatagatgttataaaaacttatggtggttcagaaaatggaattgatatatcaatagagtcatctatttcagagaaaaatttattgtcagataatacaaatttaagctatcgacaaggaggagactgttcacttccagaaacttacaatgggttggggtatttgaatttaattggtattttgtttgagattgaaaccaagatacaggaattatttgaacaaccggcagatataaatctcttatatattgaagagcccgaagcacatacacatcctcagttacagtatatatttataaggaatattaaatctcatatcaaagcacatagaaaaaagttgttggaagacaagaataaacagttgcagattttaatcacttcgcattcatcacatatagtttctgaatgtaactttgatgacattatatatttaaagaaaaacgggaatacggttatagctaagagttttaattctttaaaagaagagtatggtggagatgaacagaaaggatttaagtttgtaaaacaatatctgacaataaatagaagtgaacttttctttgctgataaagctatttgtatagaaggagataccgaaagaatcttaatgtcaatgatgatgcataagattgataataaagaagagccagaagaaaatattatcccactattatcacaaaatatttctgtaatagaagttggagctcattcacatatctttattccattatttgagtttttaggtattaaggttttaataatcacggatatagatgccgctactaaaaataacaatgggagatatgtaaaatcacaccctcaggaagcaaagtatacaagcaacgcttccataaaagattttttcaaagatacttgttttgatgagtcaaataatgaatttgaggaacttttaaaaaaaacacctgaggataaaattaaaaataatataagaatagcttatcaaataccggaaactgatggtgagtaccaagcaagtagttttgaagatgcatttatagcgttaaataaagactttatattaaagaataaagaagggctttgtgaatatggagctttaaaagatttttcgaatgatgaaatagaaaatggtgattattataattttgctttgaataatgtgaaaaagaaatcggcatttgcatcaagcttattgtattttgatgatgagaatggcgaagaagatgaaaaatgggcagttccacattatattgaggagggcttattatggatacgctaa

SEQ ID NO: 72109 - DNA, 1908 bp, Eubacterium saphenum ATCC 49989
atggatacgctaacattggaaaaagaagtattagaagctcttcaatgtataaaaaatggtgaaaatttcattttagaaggtggagcaggaagtggaaaaacatactccttaatttccttaataaatgcactcacagaggaattaccagatattaagatagtatgtattacatatacaaataatgcagttgcagaaattttatcaagaatagaaaatgagaacctttgggtttcaacaatacatgagtttatatgggctcttatcagaaaatatcagaatgaaataaaagatattttagttgagcttattaacgatgataatgaaaagaacttaaaaaagccaaaagatttttctgaggatttaatttctaaagaatatttcgaaaatctttatgtggattatgacgagtattattctgtaacgccaaatgatgaaaatagagtgaaaatcagccatgatcacattttgattgttgcagagaaaatgtttgagaaatataaaaaaatagcggacattttaaaggatattgcagattgtatttttgttgatgaatatcaggatacaagtcctttagttgctgatattttactaaagcatcttgagcaaagcgataagaaaaatgtaattggtttttttggagattcaatgcagtctatatatgacgacggagttggtaatttaaatcaatataatttaactaaaatagtaaagatgcaaaaccgaagaaatccaagagttgtaatcgaaatagccaataagtttagagatgatgatattgagcaaagaccttcagaagatacaaatgcacctaatatggagaatggtactattagagaaggtagtattaaatttttatatggaaatgaagcagatgattttataagcataaaggaaaagagtatttttgaatcttggaatttctcggatggaaaacaaacaaaagagttaaggttgacacataaatataatgctgaaatggctggatttaaaggcttatatgatctatataatgctgatttgataattacgcttataagcaagataaaggaaaaaattgataagggaaatttagacggtgataagactttgggagaattggcgttaaaggtaaaaccgacatataagaaagtagagttgctggatcaaattaacggaaacgaaatttatcagtcaatatacagtgttttagaaggtatgtcatgggaagaagcttgcgaaaaatgtagagttactaaggaatcacttatgtcatataaattaaatgggatgagtggtagatatgaagctaattcttatagagataggattttacgcagattagatatattagaggaaattattgaattatatgaggctaataaatttaatgattttctacgaataacaaaattttctattcataataggaatgataagatttgccttaaacaagcaattgattatcttgtaagtgaagatgatcaaacgatagaagatgttttaaaatttgcagaagtaaaaaggttactcaaagaagatgaattattcaatgattatattttaaataaagggttttatttatgggagagaataaaaaagataacatttaatcaatacagaaaaagtgtcttatatttaaaagaattttcaccaatttgcactcaacatagtgttaaagggagtgaatatgataatgtacttcttgtattagagtctgattggaataaatacgattttaatacattatttggaaaagggtcttcaaattctaatgttcaactaagaacgaaaaaattattttatgtatgtataacgagagcaaaaaagaatttaataatatatatgcctactaatgattctgacatattgtggaaagcgaaagaattttttggtgaagaaaatattatagatattacttccattgattag

SEQ ID NO: 72110 - DNA, 1254 bp, Faecalibacterium prausnitzii A2-165
atgaaactcacaagcctctatgtgcatgacttcaagggctatagagaacatcaatttgatttgctgggaaaaagcaccgtccttttcggtgtaaacggtgctggcaaatcaaccgttctgacagccattaattatttaatgtggccagttttgaaccgtttaagcaacactcagggaattgctttccgctccttaaatacagaatctgttcatgctggctttggaatgatgaaccttggtgctgatttcagcctggctggtgaaaccttgtctttaagaaaagattatattaaagccaagcccggaaaagctccacgagtaattccatacaaggatttatacgattcttttgttgaaaaatttacagcaacttatctctctgagggatcagaaaacaatatgcccattttcgtcaattatggaaccaatcgttccgtccttgacattcctcttagaattcgtaccaatcatgaattttcgcagctggcagctttagagcgagccagcgagaatgaattggattttcgttccttttttgagtggtttcgcaatcaggaagacatcgaaaacgaaacaaaaacagaaaccaaaaatttcgattatgaggatgtttctttagggtgtgtccgcacagctgtctgttctatgttggataatgtctccgacctaaaagttaaacgtagtcccctgcgcatgacagtcaagaagaatggtctagaaatgcgcgttgataatctttctgatggtgagaaatgtaccctcgctctctttggtgacttagctcgtcgtattgctctggctaacccttctcgcagcaatccacttgagggagaaggtattgtactcatcgatgagattgaacttcatatgcacccttcttggcagcgaaaaattctcggtgcattaaaaagtacttttccgaacattcaatttatcatcacaacgcattctcctcaagtgataagcgaagtagatgacagttacaatcttttcggtctgaagcaggaaaatgacgatgtaatcgttaaaccctataatgtgcatggatgggataccaacggaattctgcatagcgtaatgcataccactgagcgtcccgaaaatgttgtacgagcatttgaagcattcgatagcgccatcgaatgtaaccttgaagaagcatctaaaattcttcagtatctgaaagaaactgttgatcccaacgatccaaagttgacagagtgtgaagttcgtttcgatttggagaatcgctga

SEQ ID NO: 72111 - DNA, 2097 bp, Faecalibacterium prausnitzii A2-165
atgacaactgcaaaagtcgcaatttccgctgattttttgacggcctttgcacaccttccccgtcaggtgcagggcaaagttaccgaacttgtcaacaaattccggaatgaccctgcttcgccgggaattcactacgaaaagataaactcttgtatcgataaaaaaatatattccattcgtatcgatgatacctaccgcggcattgtcgttcgtcaatccgaagtttatctgcttttatgggtcgatcatcacgatgaggcctaccagtgggccgcccgaaaacgctgtgaagtaaacccgaacaccggttcacttcaggtttttgatgtacaaacggtttccgaaccgatcgcagcacacagtcagccgcttctgttttctgctttcaaagacgcggatctgcttcggctgagtgttcctgaagcgctgctgccttatgtccgcagctttgaaacaaaagaacagttttatcaggcgcgatcttccttcccggcagatgcatacgaatatctcgcctggcttgcagaaggcttttccatggaagaagttctggaacttgccaacgaagaatgcaatacctctcccgcagcacaggatttgtcggcagcattggaacagcccattaccatgcggtcctttgtcgtcgtggaaggggaagacgaactgcgccgcatcatggctgcaccgcttgaaaaatggcgtgtttttttacatccggctcagcgaaatctgacgcagaaaaattactctggccctgttcgtgttctgggtggtgcaggaacgggaaaaacggttgtcgctctgcaccgcgctaaatatctggcatctcaatgcaccgggcagcagcgtattctttttacgacctatacggcgaacctcgctgcagatattcaggaaaatctccgcaagatctgctcgatcgaggaactacgcaaaattgaagtcattcatcttgacgcatgggtcagccgctttatgcgcgagtccggcttttctttccagatcggctacgatgacgccttggctcctatatgggaaaaggcgctctttcttgcaaacacggaactgccttacgacgtttctttttatcaggaagaatggaatcgggtcgtgatttcacaggaagcgattacgcgtgaccaatatctgaaagcctcccgaaacggccgcggcacacggctggaccgcagaaagaggcttcttgtatggcaggttctggacaactaccaaaatctgatgaaagagcatcagatccgcgacatcaatactgccatgtatgagtgcacaaaacttttacagggcagcagtgtaaagtcgcagtatacccatatcattgtagacgaaggacaggatctaagcgatatcgcatatcgcctgattcgtgctctggccggcccggaacacgcaaacgatctttttatcgtgggtgatgcgcatcagaggatctatcggaatcggcctatcttatcgaaatgcggtatcaatgtccgcggccgaagcagtattttaaagatcaactatcgcaccacagaggagattcggcatagtgcattctccttcttagagggcctctcttttgacgatttggatgaaagtaccgatagcggaacccaatgccaatctttgacccacggagaacctcctatcattcggaatttcccggatgcaaacgcagaattcaacttcatttatactgaaatccggaagctacaaaattctggtattttgctaaaggagatttgcatcgttgcgcgtacaaagaaccttacaaacgattatctgtccctgctgacaaaggccagcatccgttcttacgcaatcaaacggaatcaacctgacaatcgaaactttgatggaattcgtgtcgcaaccatgcatcgtgtgaaggggctcgaattcaaatacgtctttattgctgccctcaatcaccgcgttgttcctctagctgctgccatcaatcacatggatccaatctccgaaaaagaatccatcacatccgaaaaatgtctgctttatgtggctatgacacgcgcgcaaaagggagtttacatcacaagctatggtacttgctctcagttcctacatcaatctgactga

SEQ ID NO: 72112 - DNA, 2082 bp, Acinetobacter johnsonii SH046
atgcgtatcgaaaaagttagagttgaggggtatagacttcttgaagatattgagattgtattagaaaagaattcaactgtgattgttgggcgaaataatagcggaaaaacatcttttactagcatatttgattgtttttgtggtgagtcaggagcccgttttaggttggaagatttttctagtttgtctcgtgagaagtttttaaatgcaagaaaattgaaagaagagggggcaagtccagagcagatatataatacactgcctataatcactctttctttgacatttcgatacgatagtgatgccccgactttaggacctctttcaccatttatcattgatttagatatggactctacaacagcgattgcttgtattgaatataggcctgtcttagcaaaaatgcatttgttgtttgatttacctcaaccaccagtaggtatggaacctcaaatacatttttttaagtgtttacgtaataatttatcaaaaatttacgaagtgcatgttagtgcgatagatccgacggataagtctaataagagaaatttcgagggtacttcagcattcgcagcattattacaatgtaactttgttcaagcacaaagaactcttgataagacaaagcttggtgaggctgatgttatcggaaaattacttagtgaattgtttaaaacagctgctgcaccaacggctacagaatctgatcaagagttagctgcgaaattaaagaaatctgttgaagatattgagcttaatgttcaaagtgattttgacaaaatgctcaaaaagttattacctgttatgggggtgatgggttttccaagtcttaatgatactgaattaaggcctgaaacttcattaaatgtagaggcacttttgtctgggcatacaaaagttgtttatagcggtacagatggtgtgcatttacctgagggatataatggtcttggtacgcgaaatttaatctatatgctgctacaacttgaaagctatcacaaaatttaccgatctcaaattactcgcccttcagcccatttgatattcattgaagaacctgaagctcatttgcatccacagatgcaggaagttttcattaatcaattaaatgctgctattcaaaagctttcgagtgcctatccagcagaagacgtttggaatgttcagtttattattactacacattcttctcatgttgctaatgcggcatgttttgatgcagtaagatatttctataaccagaaagattcagtgaaaagtattagaaatactaaagttaaagattttaaaaagggcatgcaaacaatatcttctgctgataaagagttcttgcataaatacatgactctgactaagtgtgatctttattttgcagataaagtgattatggttgaagggacaactgaacggttattaatgcctcgcctcagagaattagttgatatatccttaccagaacatcaaaaattagcaagccagtatgtaacttgtattgaagctggaggggctcatgctcatgttttttatccactcctcgactttcttgaacttaagactctagtcattaccgatttagactcaactaaaatggtggaaaaagaaaataagaagaaagtaaaaaccaaaatatgggaaaaatgtccagtagctcaaggtgagagaacctctaatgcggctatcaaggattggtttcgtcctaaagatttagatgaaaaagtaatttggcaaatatctccagctgatttaattgctaaaaatgccatagaaaagcaggttaactttcgtcgaattgcctaccaaatccctgaagatccaaaaactaatatttgtgcaagaagctatgaagatgctcttattttagcgaaccttaatcaatttccattaccaagtgaagacgatgttgctacagaagcttgggaatatgcgcagggacttactaaagcggatttcgctttagaatatgcaattcgtgtaaaagaatgggttgtacctcgatatattcgagaaggcctgatttggctttctgaatctgatgttcctatacaaaatttagaaccattagacaaaggaggagcagcatga

SEQ ID NO: 72113 - DNA, 1734 bp, Acinetobacter johnsonii SH046
atgagtcagattaaagaaaatcctgcactagttgctgcacaagaagctcagagaaagatcaatcaggctctagatgcgggttatagttttagacttgaagcaggtgcgggagcaggtaagacatattctttggtagctgcactcaagagactaatcgacgaacgtggttcaacgttagtacagtcaggcaaaaaagttgcttgtattacttatacagaagttgcacgcaatgagattgctcaagaaattgaagatcatccggcaattcttgttgacacaattcatggcttctgttgggcattcattcgtcaatttcagaaggcaatacgtgatttggtaattgaactaaaggataaaaaagagaaagttgaacaaagtggggggattggatcacagttagtagaatatgatctgggattctttagtgtagatgagatgcgcattacacttaatcatgatgatattcctgaattgatggcaatgcttttggctaaggaaaagtttcggatgttatttagtcagcaatttccagtaatttttattgatgaatatcaagatactcatcgtcaatttatggatgctattactgattattttttaaagtcgaagactggaccaatcataggtcttttcggagatcattggcagactatttatagtagtgagtatgaattagctgaatacccaattgaagaaattgcaaagggttcaaattttcgatcagttcctgctgtagtaaatgttctaaacgctttacgcccagagcttccacaagttgttagcttaccagaagccaaaggtgaagctcggtttttccatactaacagttataatgggcctagaacgaatacagcacattcaaaggaagatttaccttctgacatagcacgtagttgtcgtgaagagttgatggctaggttaagagtagaggggtgggacttaaaaaagacaaaagtattaatgcttagtcacaatgttttggcagttgaacaaggttatccgaaaattgttgaattatttagaggtcgtacagaacagtttacaaaaaaggaagatccggtcattaggttctttgctgaagtaatagagccaatgtgcatggcttatagttcatcacattacggagatatgtttaagatattgggtgctagacctgctattacaaaacatgaagataaaatgttgtggcgtagagatatggatcgattgctaaagttgagaatagaagggactattggtcaagttatagaccatttaaagattactaaacgtccatctctgcctgatcgtatacttagaagagaggaagagcttatttcattgatgggcatacctgaagttgaaatgtcttcaagaccacaacgttataaaaaattaagagaaatcccgtataaagaagttatcgaggttacaagatttattgaaaagttaaccccttttgcaacccagcatagtgttaagggtgctgagtttgataatgtattggtaatcttaggtggagggtggaatcattataattggcctcagcttcttgagctacttgaaactaaaaagctgactaagacaaatatgaaaggtttctatcgtgctcggaatcttttctatgtatctatatctcgcccaatgacgagacttgctgtgctggcaactcagtcattgtcagacactgcacttcttacagtgagtaatctttttggaagtgagaatgttgaagagttaagttttggtacataa

SEQ ID NO: 72114 - DNA, 1926 bp, Lactobacillus crispatus 125-2-CHN
atgagggggattagattgagactaaagacattactaattaagggatttaaatcgttcaatgaagaaacgaaaattgatttttcaaaagaaacagcatttattggtacaaatggttcagggaaaacagcctgtcttcttgcacttaataaattattctcatataatgcatcggatagaataatacatgaatcagatttttatataaattcagcaaatcaagatagtcaatcgagggacctatatattgaagctgtttttgagttagataaagctaataaagacgaagataagaagtgtgaagcacagtattggaatcggctaatcataaaaaacggacaagataagccgcttttacgaattagacttgaatctacttggacgaattcaggaattgctgatggaacagtagatacaaatatttacttcatgacttctctagaagataataatgaagaaaataagatagtagctagaagatcagagttaagcagtatacagttcatttatgtacctgcagttagaaatcctgaacgacaattaagtaatacctcagatggaatgatttctcaattgataaaaagagttaattgggatgatgaaattaaacaaaagatagtaagcatttcatcacaattaaatgatacattttgggacgaaaaaggaagtaaattaatacaagatactttaaatcaagaatggaaaagtctagaacctaattctagattttctaatgtaaaagctagtgtatctagcatagatatcaataagattatgagtcgtatacggtttgaatttaattcaaatgtaactaataatgtattttctgtggatgaaatgagtgacggaataaaatcattgttttatatttctaatattgcaagtgttttagcaatagaaaatacggtacaagaggatgatataaaaattgaatatcctgttgtaacaatatttgcattagaagagccagaaaatcatatttctcctcatttacttggaaaagtaatggataaagttaaaagcataactaaattagataatacacaaactataatcacctctcattctccagcaataataaaaagagtattgccagagaatgtacgctattttcatttgacaaaagatgccgtgacagaagtgaagaaaataaaattgcctgatgacaaaggagaaaaatataaatttattaaaagagcggttcaaacttacccagaattgtatttttcaaaattagtaatattaggtgaaggcgagagtgaagaaatagttttatcgaaaataattagttcgtatactggtttagatgaagcaaacatatcaattgtacctttagctggacgaatggttaattatttgtgggatttattagaaagcttaaatatagcacatataactttgttagatcttgattatgggagatatttaggcggaaagaaaagaattaaagatattattgatgagttgaagcgatttaatcctaatgatgacgaattagaaaaaatagaaaacaaatgcgccgatttagcagaaaataaaaataatttgttggatttgacgaaacaactagaaaagtatgatgttttcttttcctttcctttagatttggattttatgatgttagcagcttttctggataaatataaaggaatagcatcaggaagtccaaagaccaaagcggatgaacgcaaaaaaattttggatagaactttaaaaggaaaaagagaggaagaagttgattatgataaaaatgatatagaattaatgagatggtataatatgcttttcttaggaataggaaaaccattagtacattttactgctttggaagatatatctgaagaagagctatgcaataatttacctgaacaattaaaaagattatttgagtctgtaaagaataaattggataagaaaaatgatgaataa

SEQ ID NO: 72115 - DNA, 1863 bp, Lactobacillus crispatus 125-2-CHN
atgatgaataaggatcaatggaaacctagtaatgggatagttttagaatcaaatgcaaaacaggctatttttacaaatgataatattttggttcaagcaggcccaggagcaggtaaaacagaattattagcacagaaagcatcatatttatttcaaacaggattatgtcctgctccttttaatattttagcaataagctttaagcgtgatgctgctgagaatattaaagatagagtttcaaaaagagttggtaaagaagagggaagtagatttatttcaaaaacttttgatgcttttgctaaattaatagtggacagattttatttagtattgccgaaagatttacgacctagacctcagtatgaaatctcctctaattcaactcaaacaaaaatatacgaacgtgccttcggctatgttcctgatagaaacgctgtaaatgatcttttgaaagtagatatgaatgatataaaccctcagagtaataattataaattttggaagtatatgttaatgggagaagaaaaaacgtatttgacttttgaaatgatttctagactagcattatatattatccagcataataaatatgtaagacatattattcgatcagcttttccttttgtgtttctggatgaatttcaggatactacagttttgcaatatgatattttccgtgaatgttttttaaatagtgaaagtaaaattacggctgtaggggataataagcagcaaataatgttatgggctggtgcggataaagaaattttgggaaagtatacgcgtgaatttagagcaacaaaggtatttttaaaagaaaatcatcgatcagctttaaatatagtgaaattacaaaaacttatgtatgaaaaaatagataaggatataaaccctgacataataattaataaaaataaggatgaagggaaagtttttctaatagaaactaacgaaccctcaaaagaagctgaaattgttggggaaaatattataaaagaaatacgtatgggtgttaagccttcagaaattgctatattagtaaaacaacgccctgaagattacataagaaatataaaagagtatttaaaaactaaaaatgtaactgttagggttgaatcaaagtatactgaaactttctctgaacctatagttaagttgattttgaaaatgattttagcgtctattaacgtgataaatggacaggagtggcaagaactggtagatgagacttctgaaatatttctcattaatttagctgatgctgaaatagagcaaaaatatatcaaaaaattaaatgtattccttgataagctatttaaaaatctattggttcaagtccatgagaatagatcaaaaagtaattattactgtaaaatcgtagaatctataatagacttttttacgattaataggcttcaagtttactatccagaatacttagaaatagatcaattaaatagaacgaaaactcaatttatagagcagcttaaagaatgcggatcaataaatgagttaaatactgacatcaaagaaatatggaaagaaataattgacaattatttaggaaagaattcaatagcaactttaactatacataagagtaagggactagaatataattctgtttactttattggattagaagatagtgctttttggagtttctcaaaccaatctgagtctgatcgtaaagcattttttgtggcaatttcacgtgctaaagaaaagctgtactttactttttgtcgaggaagacaaacggttagaaatatttatcaaactaaaaaaaacattaaggaattttatgagttgtttgacaaatcaggtattgtaaaggaaataaatgataataacaattcttga

SEQ ID NO: 72116 - DNA, 2082 bp, Parabacteroides sp. D13
gtggaaattaaactatattttggtaaggaatataatatgtatattaaggagattaaaatttcaaactttcgtaattttagggatgcttcggttcccttccacgaaggagtgaatgtcataataggtcataataatacaggaaaaagtaacttgctccgtgcaataggtttagtgcttggctatagtgacggtcgtcggttgggtacatgtgacttattttatgagacagatgtggttacgcttcaacagcagtctccacggattaaaataactcttatatttcacaggagtcaaggagaagccttggattctgccgaaatggggctattctccggtatgatgacagatcctgcattgagcgaagaggcaaaattgagatacgagtttaaattggctgatgatcaagaggacaactataaggcagatgttgcaggtgtaacaactgccaaagaaatatggaaaataattgaccgcgactatatcagactatatagaagcagtcgctctggaggtaatcaggccgcaggtatcagtgttaatgatgctttgggacagatggacttccaattccttgacgctattcgggatgttagtcacgacctatacgccggttataatccactcctaagggatgtgttaaatttttttattgattattcagttaagaatgatgccacaaagaccgaggatgagattaaggaacagttgaaagccctaagaaatgattttgtccaacagtctagtccattgatgcagactttacaagatagattgcataatggcaaaaacgtatttctaaagtacgcactggatacaggagcaacattcaacggagccgtgccggactttgatggtgaagtgacggaaaatgagatgtttgcggtattgagaatgattatcaagtatactgttggtatcgaagtaccagcaacatataatgggttaggttataacaatctaatctatatgtcgcttttgcttgcaaagatgcaggcagacagtagcattacttacatgaagcgcaatgctaaggtaatctcatttcttgcagtagaggaatgtgaagcacatctgcatccagccatgcaatataagtttctacagtttttgcaggataacaaagcaaatggacatgtgcgtcagatattcatgacctcacattctacccagattgcctccgctgtaaaactggatgacttaatttgtctaacttcacccgtattagggcagatcaatgttggctatccacgtgtcatttataaagaagataatgatgatgatgtggtgtccaagcaatatgttcagagatttatagatgctactaaagcggatatgttctttgccaacaaattgatatttgtcgagggcgttgcagaagagttgttacttccagtctttgccagatatttgaataagaatcttacagatgagcatgtgttggtggtgaatatgggtggtcgctatttcaaccacttcctaaaattgtttgatacgaacaatccatacaccatcaacaagaaaattgtctgcttgactgacattgatccctgtaggaaaaagaatgaacctgacgaggattatgaagcctgctacccatacgaatacaatatagatacagctaactacaactataagcatcatgcagatactgaggtagctcaatatgcagcccatccaaatattcggttctataggcaagatgtaacatatgggaaaacgctggagtatgacataatgcgtgagaatcccgattgtgaactgttgctgactaactccgtttccaatttgaaggagataaaagctatgatggcagaacaggatatgaacaagatgatgagtaaaatgcgaaatagtgaagcaaatacacgtatcaagacatccataggtgcatcgaagtggacggatgaggagaaacgaaaagctttacttgcatcacgctatttgaactctgtttcaaaaggcagcaatgcgctggaactaaacgtggtacttatggctaatctagataaacctgtagcagatagaaaagagttccatgtaccccaatatattgttaacgcattaacatggctattatcataa

SEQ ID NO: 72117 - DNA, 1662 bp, Parabacteroides sp. D13
atggctattatcataacatcagaacaaaccatacctatagacgaaccgtttaaggtttgtgctggtcccggtgcgggaaagacgcattggctgataaatcatatcaagaatgtggtgtcaaacagtcacaaacttgatattgttaaaaaagtagcttgtatcacctataccaatgtgggtactgatactatcacctcacgtttgaatattgggaatgacgtggttgaggtatgtaccatccacagtttcttgtatgccaatgtggtaaaaccctacgttcacttggtagctgaagatttcgaattgaagttagatgaacttgtagtgatagatgattctaattttaaatcagaaggaacagctaaaatcgtactaaaccgtattggtaggtcatggttagatgccaaaatctatttgaaaggattggagagtgcaaactggcgttatgaaaaccatgagtacaaacattacaaacccaattacccacaggtttattacactaagagtggcaagcggtatgtgggcaatgactggtatatggggttcaaaagatggctctggagtggaggttatatgtcttttgatgacattttgtatttctctcatattctgctttcaagatacccaaacatatataaattaataaaagctagatatccgtatatttttgtggacgaatttcaagatacaattccttttgtagttgatttcttgacactattaggcaatgatggggtaattattggtgttgttggcgacaaggctcaatccatatatgactttcttggtgctacagtgcagcaatttgacaattttgctttgccagagatgcaagagtttgagataagaggaaataggcgtagcacgaagcagattatagaattgttgaatattgtccgaactgatttttcacaagactggctgaatggagcagaaggaatggtgcctgaattacttgtgggcgatatgctaaattgttatcaacagagcatagaaaaaagtgggactgacgaaattcaatctcttgcctttcaaaacgtacttgctaattcgatgcgtaataagaatgggatgcgcaaggcagagaaaatattagagatggattttgacagcaatgtcgagcgtcagatggtgataaaggcgttgataaaagccgtggaatacacaagaatgaacgacttgcgaaatgcttggcatcagttagacattatagatcgcgaaaggtcactaactatcgtgcttctaagacacttgctgaatggctataaggattacaaagacggaagcatgatggatttctacaattttctagtgaatgatttacatgtcaagatgcctaagataaaaaagaagacaatcaaggatttctacatggaccatacatatgccgatgctgcccttggggtgaagtatggtgattcaaacgacaagcataagactatccataagtcaaaaggagaggagtatgataacgtgtttgtcgttctgaaagaagaagatgacatagagttcttgctgacaccagacctgaatggcaacaatgcgcatcgcgtatattatgtagcagccagtcgtgcgattaaacgattgtttatcaatgtacctactctaagtgcagaaaaccgaatcaagtttgaaggtaagcctattaatatttcataa

SEQ ID NO: 72118 - DNA, 2076 bp, Fusobacterium nucleatum subsp. animalis 3_1_33
atggttttaaaagaaatagtagtagaaaattttcgtttattaaaaaattttaagttagagcttaaagaggacttatctttaattatagggaaaaataattgtggaaagacatcagttcttgttattttagacaaaatgttgaattcatctgaaattgcatgggaagatgtaaatttagtgaaacaaaaagaactatacaatgaaataaaaggatttaatgggagtgttcaagacggtaataagcttcttgaagcaataaaacttcaattgtatattgaatatagtgatattgattcttatgaaaatattcaaaattttataatggatttagattcagaaaataatattattcttttagagttcatttcattaataaatataaaaaatattttagagttaaaagatataataaaaggaagaaagataaaagatttttcaactttttcaagatatatgagtaaaaattttacaaaatattttaaaataaaaaaatattctaggtgttatgataaaaaaactaaaaaaataatttcagatatgatagaagaagtagataataaaaatatacaaaaagtgctcaaaattgtagggataagagctgatagggcagtttctaataatgagaaaaaccatgccctatcaagtttaacaagtagatattatgaaacttatagaaaaaatatagaagataaaagtaattcaatatttcaagagcttgaagtagagttagaaaaggcagataaggcactatataaaatttataatggagaaaaaacaaataataggcaagattcagaaggaatatttaagagtattatagatgttgtaaaaacttatggaggatctgataataaaattaatatttcaatagaatcttcaatctctgaaaagaatttattaacagacaatactagcttgtattataaacatggtgatggagatagttcttcacttccagaaacttataatggattaggatacttaaatttaatagggatattgtttgaaattgaaaccaaacttcaagaattatatgagcaacctgctgatataaatattttatatatagaagaaccagaagctcatacacatccacaacttcaatatatatttataagaaatattaaaaatcacattaatagtcatagaaataagttgaataaagaaaaaaataaatatcttcaaataataattacatcacattcatctcatattgtctctgaatgcaattttgatgatattatttatttaaaaagaatagataataatattttagctaaaaattttaattctttaaaaaatgaatacgaaggagataaaaaaagagaatttaaatttgtaaagcaatatttgacattaaatagaagtgagttattttttgcagataaagttatttgtattgaaggagatacagaacgcatattaatgccagcaatgatgtataaagttgataaaatgcaaagttcaaaaaatgaatcaactattccattgttgtcacaaaatatttctataattgaggtgggagcatattctcatgtttttataccattatttaaatttctagggataaaggtcttaattattacagatatagattctgctataaaaaataataatggtaaatatgaaaaatctcatccagataatgcaactcatacaagtaatgcctctataagagaattttttaaagaagatggtttagatgatggaaataatcaatttaaagaacttatagaaaagaaaggcaaagataaaataaaagccagaataagaattgcttatcaaattcctgaaattgataaaggttaccaagctagtagttttgaagatgcttttatatcactaaataaagattttattttaaaaaataaagataatctttatgactatggagcattaaaaaattttagtaaaaaggaaataaataaggatttttatgaattttctttaaaaaatattgaaaagaaatcagcgtttgcatctgctttattatattttgatgaagaagaagatgataaggaatggaaagttcctcgttatataaaggagggcttactatggatacaagaattttag

SEQ ID NO: 72119 - DNA, 1902 bp, Fusobacterium nucleatum subsp. animalis 3_1_33
atggatacaagaattttagaggatgaggtaaacactgctttacaatgtatagaaaaaggagaaaattttatattagaaggtggagcaggaagtgggaaaacatattctctgattttattaatagaaactttaattataaaattacctgaaattaagattgtatgtatcacatatacaaataatgcagttgcagaaattaaatcaagaattgataatgaaaatctttgggtttcaacaattcatgagttcatttggtatataattaaaaaatatcaaaaagagataaaaaatgagttagtacttcttattaataatgaaacaattaaaagttttaaaaagccaaaagacttagaaaataatttgattacaatagattattttaataatatagatgttgaatatgatgaatattattctatgaatcctaatgaaaataaagttaaaattagtcatgatcatattttaattctggctgaaaaaatgtttgataggtataaaaaactatcagatattttaaaagatgtagctaattgtatttttgttgatgagtatcaagataccagcccatatataactaaaattttattagaacatcttaaaaaaagtaaaaagaaaaatgttataggattttttggggattcaatgcaatcaatatatgatgaaggagtaggagatttaaataaatataagttaaaaaaaatagtaaagaaacaaaatcggagaaatccaaggatagttatagagattgctaataaatttagagatgataaaataacacaagttccttctaaggataagaatgctcctaatatggacgaaaatggagttattattgagggtaatattaaatttatatatggaaaagagcaagaggatataaattttcttaaaaataaagctctttttaagtcatggaattttttaaatggtgaacaaactagggaattaaggctaacacataaatataatgctgaaatggctggatttaaaaaattatatgatttatacaatgatgatttaataattaaattaattgataatattcaaaaaaatattgataataatgaaaataaagaaagtatattagatgaattagtactaaaattaagaccaacttataatagaaaagatttatttgaagaaattattggtaatgaaatatataaatcaatttaccaaaatataaaaaatttagtatggaaagatgcattagaaaaatgtaaaattagtaaggaatcattgatgtcttataaatttaatggaataaatggaagatatgagactaattcacacagagataaaattttaaaaaaattagatgttttaaatgaattaatagaattgtatgaatctaagaaatttaatgaatttttaaagaaaacaaatttttctattcaaaataaaaatgataaaagtaaacttaaagaattaatgaattttttaatatttgaagatgaaaagacaatagaagaagttttagacttttcaaaaaaacaaggtttgataaaagaagatatgaactttgataactatattagtgttaaaggtttttatttatgggaaagaattaaaaaaatatcttttaaggaatatagaaatagtatcctttatttgaaagagttttcaccaatttcaactcagcatagtattaaaggaagtgaatttgataatgtacttgtcatattagaatcaaattggaataaatatgattttaaaacactattcggaaaaggttcagaaaatgaaaatgttataaaaagaacaagaaaattattttatgtttgtatgacaagaacaaaaaagaatatagtgatatatatgcctactgaagatttagaaataataaattcagctaaagaatattttggagaagaaaatgttctttcaatagattcaatttaa

SEQ ID NO: 72120 - DNA, 2046 bp, Prevotella sp. oral taxon 317 str. F0108
atgtatatcaaggagattaatatattaaacttccgaagctttaaggaagctttaataccctttcatgaaggagtgaatgttataataggtcataataacaccggtaaaagtaacctgctccgtgcgatggggttagtgcttagctatagtaatggtcatagattaggtaccagtgacttattttatgagacagatgtggcagagcttcaacggcagtcaccacggatccaaataactcttgtcttacgtagaagtgcagatgaaaacttagattcagcagatatggcgctgtttgccaatatgatgacagacccagcattaagcgaagaggctgaattaagatacgagtttaaactggatgatagccaagagaaaaactataaggcagatgttgctaacgcaattacagccaaagaaatatggaagattatagagcaagactacatcagactctataaaagtagtcgctcgggaggtaatcaggctgctggtatcaacatcaatgagacgttggggcagattgacttccagttccttgatgctattcgcgatgtcagtcatgacctatatgcaggttataatccgctccttagggatgtgctgaatttctttattgattactcagttaagaatgatgtcacaaagacagagaatgagataaaggaacaattaaaagccttaagagatgatttcgtccaacagtctaggccattgatgcaaactttacaagataggttacaggatgggaaaaacgtatttctgaagtacgcacttgatacaggcgcaacatttaatggagccgaaccagattttgatggaacggtgacagagaatgagatgttctctgtattgagaatgtttatcaaatacgctgttggtatagaagtgccagctacatataatgggctagggtataacaatcttatatatatgtcgcttttgcttgcaaagatgcaggcagacggaagcattgcctacatgaaacgcaatgccaaagtactctcattccttgctgtagaggaatgtgaagcacatttgcatcctgccatgcagtacaagttcctaaagtttctgcaggacaataatttgaatgggcatgtacgtcagatattcatgacctcacattctacccaaattgcctcggcggtaaagctggatgacttaatttgcttaacctcacctgcgttgggacagatcaatgttggctatccacgtgccatatataaagaagagagctctaatgatatggtatccaagcaatatgttcaaagatttttggatgcaactaaagcggatatgttctttgccaacagattgatttttgtcgagggcattgcagaggagttgctgctcccagtctttgccaggtatttgaataagaaccttacagatgagcatgtgctagtggtgaatatgggaggtcgctatttcaaccactttctaaagttatttgatacgaaaaatccatataccatcaacaagaaaattgtctgcttgactgatattgacccctgtcgaaaaaagaaaggagatgacaaaaattatgaagtttgttacccatatgagtacaatatagatacagacaactacgactataagcatcatgctgatacagaagtagatcaatatgtagtccatcctaacattaggttctacaggcaagatgtaacgtatggaaaaacgctggagtatgacctaatgcgtgagaatcccaattgtgaactgttattgactgactctgtgtccaatcgggacgagataaaagcaatgatggcagaactggatgtgaacaagatgatgggtaaaatgcgaaacagtgaggctaatacacgtataaagtcatcaatagaccaatcggggtgggaggatgaagaaaagagaaaagccttacttgcatcgcgttatttgaactccgtttcaaaaggcagtaatgcgctggaactaaacgtgacgcttatggataacctagagaaaccagaagcagaaagaaaagagtttcatgttccccaatatattattgatgcattaaaatggctactatcataa

SEQ ID NO: 72121 - DNA, 1677 bp, Prevotella sp. oral taxon 317 str. F0108
atggctactatcataaaatcagaacaaactatacctatagacgaaccatttaaggtgactgctgggcctggtgcaggaaagacacattggctgataaaccatatcaagaaagtggtgtcaaatagtcacaaacttgatgtggtgagaaaggtagcttgtatcacttataccaacgtgggtatcgatacgatcacttcacgtttgaatatggggaatgacgtggttgaggtatataccatccatagtttcttgtatgcaaatgtgataaaaccctatattcatctaattgctgaggacttcgggctgaagttagataaacttgtggttatagatgactctaattttaagtcagaaggaatagctgcactagttctaaaaaaagttggcaaatcatggttagataccaaaatctacctgaaaggattggagagggcaatgtggcgttatgaaaaccatgagtacaaacattacaaacctgatcacccacaggtttataagataaaaagtggtaaacgatatgtgggcaatgactggtatatggggttcaaaagatggctatggagtggagggtatatgtcttttgatgacattttgtatttttctcatattctgctttcgagataccccaacatatacacattgataaaggctagatacccatatattttcgtggatgaatttcaagatacaataccttttgtgattgacttactagccaagttaggcaatgagggggtaattgtgggagtggttggcgataaagcacaatcaatctatgattttctaggtgctacagtgcagcaatttgacagctttactgttccagaaatgcaggagtatgaaatacgagggaataggcgtagcacgaagcagataatagacttgctgaatattgtcaggactgatttttcgcaagactggctgaatggatcagaaggaatgatgccagaattgcttgtcggtgatatgcttaactgttaccaacagtgtatagaaaagagtggaactgacgaaatacaatcgcttgcctttcaaaacatacttgccaattccatgcgtaaaaagaacggggtgcgggaggtagagaatatattagggatggattttgatagcaatgcagagcgtcagaaggtgataaaggcgttgataaaggccgtggaatatacaagaatgaatgacttgcgaaatgcttggcatcagttagatatcatcgatcgcgataggactcaaaccatcgtggttctaagatacttgctggatggctataaagactacaaagacggaagtctgatggatttctacaattttctggtaaatgatttacatgtcaaaatgaccaagataaaaggcacggcaatcagggatttctatcagaaccacacgtacgcagatgctgcccttggagtgaagtatggtgattcaaataacaagcataaaaccatccataagtcaaaaggagaggagtatgataacgtgtttgttgttctgaaagaggaaaaagacttagagttcctgttgtcaccaaacctaaatgacaacaactcacatcgggtatattatgtggctgccagtcgtgcaataaatcgcttgtttatctgtgtaccgacattgagtgcagaaaaacgtatccaactggaaggcatgccaataaacatacttctccccaataatagctaa

SEQ ID NO: 72122 - DNA, 1728 bp, Bacteroides sp. 1_1_14
atgatactagcagatataactctcaaaggatttagaaattataaagatgcacatattaagttagagaaaaatacacttattattggggcaaatgatgttggtaagacaaatttaatctgggcgatgcgattactattagatagaagcctgtcagattatgatatagaaccacgatctagtgatttttatgtattggaagaaactaactcatttgtcatattattacactttacagatattactgaggaatgtgttttgtctaaactaagaggaaaaataagtgatgctaatgagatgtatatgtcctataatgcatcaagagatcctaatacgggaaaaatatcctatacaataaaagcaggagcttccgttgaacttttgtcggatattgaagcacattattatcgtaaatatttaaatattaaatacatcagttgcagaagagacttgtatgcttttatatctaaagaaagaaattttttatttcaaaatgccaaagagagcaggagcactcaagaagaagaggaagataatacacttttacaagagattaaaactaaattacaagaagctaacaatttaataccgactttacattacatttctaaagcgacaaactcaatcaatagtgaattaaaagaaatgtctatttacaacaataatcaagatgtatattttgatacaaattcttcaaatatagacaaatttatagacagtacctccgtttcgtcaaagacaaatgacacgcccgtaaatataggtggagatggacgattaaatcaaatttacttatcattgtgggcaactaaacatgaaattgaacgtcccaagcttgaagaagtttcgattgtatgcatcgaagaacctgaggctcatttgcatccacatcaacagcaaaagcttgcaacttatttgagtaacaagatatgtgggcaaatattcttaactagtcactctccacaaatcaccagtgaattttctccaaattcaattgttcgcttatacaaaacagaacaatcagataccaaagctgcatcaaatggttgttctaaaattattgaaggttccataataaactttggctacagaatgagcataatcccagctgaggcattttatgctgatcaggtttggctcgttgaaggtatctctgaagttattttctataaagcattatcgaaattttgtggtgtagatttattaaaaaacaacataagtatactaatggctaatgggattggattctctacttttatcaaaatattaaatgccatgaatataccttggaaacttagaacagataatgatatattcaagatacccaaaaagaaatattatagaatggcaggaatgcagagagccataagtattctcgaagattatagagaattggatgcatcagaaaaaaaaataattgaggaaaacaaggaaaaacttaaagaactaccaacgaatattcctacaaatgaaataaacactatttgctccactttaagaagtatattaaataatcatggaatctttctatcagaaaaagatttagagaatgatatgttcaatagtcctataaaaaatgatttaatagaatttttcaatgatttagaggaatatgaaattatcacggcaatgcaagaagcaaaaggaaatttcatgtataatttcataagacaaaaaagtacatcattaagtaaattgaaggaacattcattaacaaatctattaagataa

SEQ ID NO: 72123 - DNA, 1419 bp, Bacteroides sp. 1_1_14
atgcaagagaaaaagactttcgacaatctcataattcgctcaatgaacaattctgagcgttctcagctagggcaagttgaaaaaagagaaaaaatagaatataaccatatggatataatattgtccttattagaagcaaatattatattaatagaatgtataggaatattagctaattatatctttgataactcaaaagcttgtagaagttacctaaaatcgagatacaaatatttatatgtagatgaatatcaagatactgggatagatcaacattatttatttattaagctaaaaaacatgggtataataatgactgctgttggggatgttaatcagtctatttttgaattttccggaaagaaatcttattacctaaaaagaatacgacaagacaaaacttttagaagttttatactcagtcaaaatcatcgttcacatcaatctattgtaaattactccaataggttaatagattctacatgcacaatcactgatataccggaaaaagacaggcgggtattttatttcattagtttaggagatgaaaaacatatagcatcttttattgatgaaaaaatagcatctattatgaatgcatacaatattgacaaattcaataaaattgctatactttttaggaactccaaaaatgctcaatatatcagtcaagagttaaatactcctcataaaatagtatcaccaaccaaattagatatgcaaattagtatttgggcatctatctttgcatccatattacgtttcatttttaatccaacaaatcgttttattgatatagtagaaacttactcttctttcgatagtttaagaaatacacaaaaaagaagtttgcaaaaaagcaacattgttttaaatggaattgtagatcatggagaaatctgcaataaagacttatttatagaaacatccattaatatagctactatcctaatgcctgaagcacacaatattaatgatataaatcttttgaaggaagttgtttttgattccaaacaacttgatagctataggtctgaagattctaatgagataaatttaatgacccttcataaatcaaaaggtttagagtttgatgctgtaatacatgctgatttatatgaatggggattaccttcaaaaaaggtggaaaataataattttaaggaacctttatatccaaactgggaacaggatttgaatttacactatgttggcattacaagagcaaaaaaagtttgtatcctaattcgttctgaaaaaaggcataagtcaaatggagaattaacaaatgcacaagattcagaattcattcaactacacaatgttcataatcttaggtttaatcctgttaatgctatcccatttcctactcagcgctacatgaatgaagttaaagagaaagaatttccaagatcataa

SEQ ID NO: 72124 - DNA, 1419 bp, Parabacteroides sp. 20_3
atgatactagcagatataactctcaaaggatttagaaattataaagatgcacatattaagttagagaaaaatacacttattattggggcaaatgatgttggtaagacaaatttaatctgggcgatgcgattactattagatagaagcctgtcagattatgatatagaaccacgatctagtgatttttatgtattggaagaaactaactcatttgtcatattattacactttacagatattactgaggaatgtgttttgtctaaactaagaggaaaaataagtgatgctaatgagatgtatatgtcctataatgcatcaagagatcctaatacgggaaaaatatcctatacaataaaagcaggagcttccgttgaacttttgtcggatattgaagcacattattatcgtaaatatttaaatattaaatacatcagttgcagaagagacttgtatgcttttatatctaaagaaagaaattttttatttcaaaatgccaaagagagcaggagcactcaagaagaagaggaagataatacacttttacaagagattaaaactaaattacaagaagctaacaatttaataccgactttacattacatttctaaagcgacaaactcaatcaatagtgaattaaaagaaatgtctatttacaacaataatcaagatgtatattttgatacaaattcttcaaatatagacaaatttatagacagtacctccgtttcgtcaaagacaaatgacacgcccgtaaatataggtggagatggacgattaaatcaaatttacttatcattgtgggcaactaaacatgaaattgaacgtcccaagcttgaagaagtttcgattgtatgcatcgaagaacctgaggctcatttgcatccacatcaacagcaaaagcttgcaacttatttgagtaacaagatatgtgggcaaatattcttaactagtcactctccacaaatcaccagtgaattttctccaaattcaattgttcgcttatacaaaacagaacaatcagataccaaagctgcatcaaatggttgttctaaaattattgaaggttccataataaactttggctacagaatgagcataatcccagctgaggcattttatgctgatcaggtttggctcgttgaaggtatctctgaagttattttctataaagcattatcgaaattttgtggtgtagatttattaaaaaacaacataagtatactaatggctaatgggattggattctctacttttatcaaaatattaaatgccatgaatataccttggaaacttagaacagataatgatatattcaagatacccaaaaagaaatattatagaatggcaggaatgcagagagccataagtattctcgaagattatagagaattggatgcatcagaaaaaaaaaataattga

SEQ ID NO: 72125 - DNA, 1704 bp, Parabacteroides sp. 20_3
atgactcctacagaacaacaaaaggctatattagaatgtagagaaaatcttgtcgtcattgctgctcctggatctggaaaaacatttgttttatccgaaaaaataaaaaacgacattaaggaactgctcgattatcaaggaattatcgccatatcgtacacaaataaagcttctttagaactaaaaaacagaagcctagcaaatggcatttcccctaaaagttcattttttggtaccattgataagttttgtattcaagatataattataccatttggaagcctaatgcaagagaaaaagactttcgacaatctcataattcgctcaatgaacaattctgagcgttctcagctagggcaagttgaaaaaagagaaaaaatagaatataaccatatggatataatattgtccttattagaagcaaatattatattaatagaatgtataggaatattagctaattatatctttgataactcaaaagcttgtagaagttacctaaaatcgagatacaaatatttatatgtagatgaatatcaagatactgggatagatcaacattatttatttattaagttaaaaaacatgggtataataatggctgctgttggggatgttaatcagtctatttttgaattttccggaaagaaatcttattacctaaaaagaatacgacaagacaaaacttttagaagttttatactcagtcaaaatcatcgttcacatcaatctattgtaaattactccaataggttaatagattctacatgcacaatcactgatataccggaaaaagacaggcgggtattttatttcattagtttaggagatgaaaaacatatagcatcttttattgatgaaaaaatagcatctattatgaatgcatacaatattgacaaattcaataaaattgctatactttttaggaactccaaaaatgctcaatatatcagtcaagagttaaatactcctcataaaatagtatcaccaaccaaattagatatgcaaattagtatttgggcatctatctttgcatccatattacgtttcatttttaatccaacaaatcgttttattgatatagtagaaacttactcttctttcgatagtttaagaaatacacaaaaaagaagtttgcaaaaaagcaacattgttttaaatggaattgtagatcatggagaaatctgcaataaagacttatttatagaaacatccattaatatagctactatcctaatgcctgaagcacacaatattaatgatataaatcttttgaaggaagttgtttttgattccaaacaacttgatagctataggtctgaagattctaatgagataaatttaatgacccttcataaatcaaaaggtttagagtttgatgctgtaatacatgctgatttatatgaatggggattaccttcaaaaaaggtggaaaataataattttaaggaacctttatatccaaactgggaacaggatttgaatttacactatgttggcattacaagagcaaaaaaagtttgtatcctaattcgttctgaaaaaaggcataagtcaaatggagaattaacaaatgcacaagattcagaattcattcaactacacaatgttcataatcttaggtttaatcctgttaatgctatcccatttcctactcagcgctacatgaatgaagttaaagagaaagaatttccaagatcataa

SEQ ID NO: 72126 - DNA, 2199 bp, Bacteroides sp. 3_1_23
atgaaaatacaatctgttcatattaggaattaccgaaaattgaaaaattgtcatatagattttgacgagaagaaaacagttttagttggtgcaaataatagtggcaagacttccgctattagtgctattgtttggtttctaaaaaacacagatagattcactttaaaagagtttaccgcaacaaattgggcagcaattaatgagattggcgagaaatggctcgaacatgattctgtagatgaagcattattggattctcatcaatgggataacattgtgccatcaatggatgtttggataaatgtcgaagatggagaacaatatcgagtaaatcacttgataccatcacttagttcttgggatggtaaaaaggttggtgtccgtggacaatatgaacccaaagatgtaaaaaagctctacactgtttacaaggatgccaaaataaaggcaaaaactttagagggtactgaagaatgggagaaagctggctctccagatttatatccaaaaaatttatgcgattttttaggcaaaggtctaaatcttagagagtattttgatgtgaaatactacatcatagatccttctcttgatcctgataacgaagacgaagtgcaatcaacgccagacaatgagataggcaacaatccacttgacggactaatcaaagtagatactatactggcatcaagagatttttcagatccggaaggacaaacagacagtgatatagatacgttgtctaaacagtttcaacagtactataagagcagtgggcaagaagatgaggaattgacttgtgaagggttgaaactccttggaggtattgtaacagcgaacaaaacatatgatgaaaaattaaaaaagacttttgaggttcctgttggagaattgaagaacatcaattaccctggattccagaatccagagataagaatacgaagtaagattcagattgaggaatccataaaacatgactcagcagttcaatttgctattcaaggtatggaggaattagtacttcctgagaagtacaatgggcttggttatagaaatcttatctctatttatttgaagttgattgacttcagggaaaaatggctgaaagaattaagtgaagaaaagaatattgagcctattcatatagtgtttgtagaggaaccagaagcgcatttacatgcccaagcacaacaagtatttgtaaagaaagcttttgaagccttgtgtaacaataaactaattgaagaaaatccttggctaagcacacaacttgtgttaagtacgcattcaaatcatgttgtcaacgaacttgacttgaattgtatgcgctacttcaaacgagtaatagatgtcggcaaaaagatacctgtttcaaaagttgtaaacttatctagtacattcggaacagacgatgaaacaaagcaatttgtaacaagatatatacgtttaactcactgcgatatattcttctcggatgctgttatttttgttgaaggccctgcggaaaagatacttgttcccagctttctcgcaaaagccggattagattcttattatatttctgttatagaggtaaatggtcgtcatgcgcatagtttccgtaaacttattgaaaaaattggaattgcaaccttgattgtgacggatatagatgcgactgacacaaaaatagaagacggaaaagaaaaacatccgtccgtgattacagccaaaggaaatgattataagacaggtaatccctccattaaaagttggctttcaggaaaagaacaaatagacgatttgttggcattggatggaagagaaaagcttgtgaataatgtaaggatagcattccaaacaccggtaaacgtcaagtgggataagaataaagatgacttgactgaagtatgtccttatacatttgaagatgcattgatatttaccaatcttgaattatttcgacaggaagggttaaagaaaatgggtactattaccacaatagcgaatctgttgaaacatagtaattctgctaatgaattacaaaataagatatttaaaaagttggaaagcaagagtggttttcagaaggctgactttgctatttctctgctttataaagacgattttgtcaatttggttgccccagtatatattcaggaagggcttgaatggatgaagtcatatttggattctaatggaaacagaaatggagaataa

SEQ ID NO: 72127 - DNA, 1839 bp, Bacteroides sp. 3_1_23
atggagaataatatagactttcaagtagatgagacactagaaaagtgcattctttcaacaccgcgtaaaagtttctttctttttgctggagcaggctcagggaagacttactctttggttcttcttttgaaaaaaatacataatagtattggtaaagaccttttgttgcaaggaaagaatgtagctgttattacctttacgaatgctgccacagatgaaataatcaaccgattggattatagtcctatttttcatatttcaacaattcatagttttgtttgggatgttataaagtattatcaggcagatataaaaagattgtattgtttttatattgaagaagatttaaaagcgttggaaaagaagttagaagaaacagaaaaaaagactaccaaaacatatctttccaacgtagaaaagtttgaataccagaaagaacggttagcaaaagcgcagataatagaaaagtttgtgtataatcccaatggcagtaatcctgaatataatgcattgaagcatgctgaggttattaaaatatctgctcaaatgattcttgagaacaaaatgttacagcgaatcatagcacaacgatatccgatactattgatcgatgagagtcaagatacgaaaaaagaactaattgatactttctttgaaattcaaagaaactttgctgatatctttactttaggtttacttggagatcagaagcaacgaatttatgcagatgggaaggagaatatagaagattctattcctatcgggtgggagaagccggtaaagaggatgaattatcgctgtgctaaacggataatccagttggctaacaatattggaaaggatattgatattcatgcagaacaaagaccgcgtgaagatgctaatgatggtttgattaggctttttgttatacaacaacgtgagggactaaataaagatgaaatagagcaaaatgtgatgaggattatgagtgagcaaacccaagatgcaaaatggacgaccataggtactgaagttaaagttctaacattggaacacatgatggctgcacgaaggttaggattttctcgtttttttgctccactttataaagtttcaaaatatcagatgacattcctccagggttctgtatcagaaatagaatttttcacaaaggaagtgctaccaattgcagaatctataaaagaagatggacgagttgctttagaaattttgaaaaaatactcgccattattaagcggacagaatacagaaaaaccatatgaactttatttgaaatgcagagaagaagcaataaaggttgctaatcttgtaaatgagaatggaactatccgtgtcgtggtagatgaaattataaaatctcaactattaacagtaccggatgttgtaagacaagcgtatatgttgagcccatcggacatagaagatacagtagaagaagaactacgtgcctgggtagaagtaatggatttaccaattaacatggtacgcagctatgatgattatgtgaaccaccgttcacaattcgatacacaccaaggggttaaaggtcttgaatttgatcgagtaatggttattatagatgattctgaaataaaaggattcttatttagctatgacaaactatttggtgttaaagatttatctaatgtagatttgaaaaataaagaaaatggtaaggaaacctccattgaacgaactcaaagattattttatgttacatgtactagagcaaagaactcattagctgttgtgatgtatacaaataatccagagagagtaaaaactgaaactatcagaaaaggctggtttgaagagaatgaaattattgtaatgtaa

SEQ ID NO: 72128 - DNA, 1785 bp, Klebsiella sp. 1_1_55
atgcggatttctcgaatccggttaattaatttcgccaacttctctgatgttgatgttgaaacgggtgagagcattgttattgttggtgaaaacaaggttggcaagagcaattttattcgcggcctgcagctgattcttgaccctgggttgtctgagcgtgaccgtcaactgggttttgaacatttttgggatggattgggcgaagaaaaattgggggagaccatcgaaatttcggtggatcttacggattttactgacgatgcacgattgatggctcatctgaacgattgtgttcttaatccgggcccacctatggtggcccggcttacctaccgctttcagcccaaaaccgagttaaatcgagctcctgaatcgttaaaagattatgagtatgtgatcttcggtggcgctgatcctgacatgcatattggtggtgcgtttcgccgtatgttgcccatcgatgttcaaggcgcgttgcgtgatgccgagaaggatctttcaagctggcgtaattcacccttaagaccgcttattgaagaactatccgcatctctggacgacgagactcgtgaggagattcaaacccaggttgatgaggctcagcgggaactggctgatcatgatgaggtggcagcgacagccgaacggattagcgaacggttgattgctatcgcaggtaagcaacatgccgttccggtatcgctcggacttgcaccgactcgcgttgatgcgctgctacgtagccttcgcttgctgcttgacagtggcattcgtggcattggcgatgcaagtctggggacggctaatctgattttcctggccctgaaaagcctcgaacttgatcgtcttgttgatgacggtgaacgagaccatacgtttttcgtagtcgaggagccggaagcgcacctacatccgcacgtacagcgcctggtctaccgttatttcttgggtactgacggggaaaatggtgatgaagggacgccgctgacaacgatcctgaccacccattccccacatattgccagcgtcacgcctgttagatctatcgttctactgcgttatgacgcagaggacaagaagacaattgctgtttcaacggcgaacgcaccgtttacgccgcgggatgaagatgatttgcagcgctatattgacgtcacacgcggtgaaatattcttttcacgtggtgtaatcctggtggaaggagatgccgaacgttttctcgtccctgcattcgccgatgctcttgatattcctctcgatatgcttgggatcacggtgtgctcgatcggtggaacaaatttcactccgtatgtgaagctcttggggccacgggggctcaatattccgcatgtgattctgacagaccgcgatcctatggagggtggagtgccgctggttcgtaagagacttatcaatattttaagcgtgcttgagaacgatgttgaccatgatgatatggataccgatgaggtgattgaatatgccggggagtatggatgcttcgtcaatgagatcaccttggagcctgagctgtttaccggtggactgggcgaagccatgaagtcggttatcgagcaggaattgtctcttagacgagctactctgaacgagatacaggcatgggtggatgacacggaccagcttgataaagcccggttgttgaaactgattgagcgaattggcaaagggcggttcgcccaggcgctggcaccttcggtgtcggaggatgtttgtccggattacattcgcgaagcactggagcatatccgcgatgccgtcgcgtaa

SEQ ID NO: 72129 - DNA, 1818 bp, Klebsiella sp. 1_1_55
atgccgtcgcgtaatgtcagtgcagcctatttggctcaggctgccgagctggccgagaatccgggccagttagccgcgtatcactcccgagggcactgcgtggttctcgccgggccaggtagtggtaagaccaagacgctcgtgctgaagctggcccgaatcctggccgaggatgttgaggctccacgtggcgcggcatgtatcacatatagccaagaatgcgcacgcgagctgacccgtcgtctcgaagcgctggggctcagagaggcaccgaatctctttatcggaaccgttcatgggttctgtttgcgccatctgttgatgccctatggacgactggccgatctgccaattccatttccgctgtcagtagcgtctcagcgtgcgagcgaacgattacttcgacaatctggtgaccgtctctttggaccaaaccacccctataaggctattgatctcggacggcatcgccgttcggtacttaaccgcaacagtgttgcctggcgtgcagaagaggaactcgctgcttgggccgaggcttacgaagcggcattgcggcaggaagggctaatcgactacgacgatatggtggtattcggccagcgtctgatcgttgagcatgactgggttctgcccttggtacaggcgaaatttccgatccttgcggttgatgaatatcaggatttgggcgtggcgctccaccgtatggtcaaacgcctggctttcgaagggggcgtacgcttatttgctgtgggtgatgcagaccaatcgatttacggcttcactggtgccgatggcgcgttactcatggaactggcaggcaggagagacgttgaaacagtcaggcttcagttgaactatagatcaggagcgggcatcgtcaatgcatctgagatggtgttgggtgaggttcgtggttatcgagcaagcgacctgaaccgccagacaaccattgcgttccagctgtgtccggatggcctagaggatcaggctgtccatgctgtcgcgcagataattccaactgcgttggctgctaagccgggtcgaacgctgggtgacatcgctattctgtacaaggactaccgtgccggtgatgtggtggccgatgcggtgacagctggcggttttgattacattcgggtggacaccgcagcgccttatcgcaaggttgctttgacgagctgggtggaggattgcgcggcatggtgtgctggcggttggcgtatcgggcaccctcaactgcgcggattgacagaccgttatctggcatttcatcgggcaaggctcgatgatgcatgcgcccggcataagggacaggaattaaccaagctgctttgggcacttcgtgccgaccaacatccagcatgcgattttgtcgcgtcgttgcgcaacggtctcgttgattccctgctggcaactgaaccggcactttctgatcaggcagagcagctagatcgcatgactgtagcacttgccgaaggtggtgcgttggcgatgctggacattacgagcctggggggtcgtgacggttcacctgagcacctcaatttgctgacgcttcactcagccaaaggttgcgaatatgacgtggtcatcatggttggcctggatctggggaatttgccgtggcgtaatgagacgccagaaaagctgcgcgaaagccgtcgtcttttctatgtggggctgacccgcgcacgggacgaggtgcatatgctgtattccggttttgttgatggtcgctacggccctatgcgtctagggcgttccccatttctggatgaactggaggtgcgaatgcgaggggctggtttacagtag

SEQ ID NO: 72130 - DNA, 1983 bp, Pseudomonas syringae pv. syringae FF5
gtgcgcatcgagtcgatcacgatctctggctttcgctgtttcggcccgaatgagatttccattccgatctcggatgaggtcactacgatcgttggccctaacgccgcgggtaaaactgcgcttttgcaggctatgtcgaagctgtttggggttacgcgggcgcagcgcaccgtatcactttccgatttccacctagctcctggacaggatcctgagagccgcgattccaaagagctcttcatcgaggcgatcgttgccttccccgagttgctggacgggtctgcaaccgcggaaaccatcgccccttcatttcggcacatgctgattacgagagcagcccaggcgcccgtttgccgaatgcggcttgaagcacagtgggatgacgacggtacgcttgagggcgaggtgtcacagaatcttttttggatcgattgcttagatgacgagcccgcagaggacaaataccaaccggtggcagtgaccgatcggggcctcatacaactttattacaccccggcaagtcgagacgccgccagccaaatccgagcaactgccggtacgctggccgcacgtctcctgagggccattgaatggtcctccgacaccgaagacaaagtgcaagaggcgactgagagccttaccgctgcgtttgaaggcgagtgtgcgatcgccgcaatcaccgaggctctgcaaacacgctgggcagacctgcatgacgacgtttccaataccaagcctaggctcagtctggtgagccgacggtttgaggaagtgatcaacaagatcgcggtcatatttgagcagggacccgacgggcgagaaagaggtattgaagccctcagcgacggacagcagtcgctattctattttgcattggccgccgccgtttttgacctagagcgcgaggtcgttgaaggttctgtggccggatttcgagaggatgcactccatattcccgctctcacactgtttgctcttgaggaaccagaaaaccacctttcaccctactttcttgctcgcatcatccgacaggttcgatcgttgactgaggctagcggtgcgcaggccataatcacgagtcattcgccggcggttcttagccgagtcgagccaagcgaggtccggtactgccgctgtaacgcaaagacgcgcgtatctaatgtgaagcgaattgagctgccaactgatgatgtggaggccagcaagtttgtgcgtggtgccatattggcctatcccgagctttacttcgcgaggtttgtcctactcgttgagggtgattcggaaagaatcgtcctgcctcaactcgctgaagctcttgacctcctcatcgatcctgcttttgtcgcgatcgtccctctaggaggacgacacgtccaatatttctggcgcttgcttaaggggctaggtattccctacgcaactcttctggacttggatctcggtcgtgatggtggaggatgggggcgagtaaagacagccctagagaagcttattgagttcggtgcacctaaatccaaattgctacaaacatcaaccggcagtttgaccgacgaagaactgcaagggatgcacggatggcgcaatgtagcaaatcactccactcagttgagctggatcaataggctgaaggagtacggggtctacttttccgctccgctcgaccttgatctcgcaatgcttaatgccttccccgatgactatgccgccgtaattccaaaagggggtggtccacgtatgaccgcagacaaggcagcagaggttgtgctggggacgtcaggtccaggactttcggtatacacgggaccctatgaggattacccggcgttgtttccgagctatcgttaccacttcctcacccatagcaaaccagccacgcatctggcggcattgacgcgtgttagtaaagcgagcctaaccgcagatatgcctgtagttctggctgaggtcgttcgacatattgcaagctccctgaggcgagactga

SEQ ID NO: 72131 - DNA, 1905 bp, Pseudomonas syringae pv. syringae FF5
atggccgtttcgtcacgccgaatagctcgaggggattggaaacccgtcggggttaaagctctggaagcgaatgcgctgaaagtggttcgttcaaaaaaaaatcggtccgttattgccggaccaggcgctggcaagacagaactgcttgcgcagcgcgccgcctttctccttcagacggacactgcgccatctccacggcgtattctggctatcagcttcaaacgtgatgcggcatctaatctggcagcacgcgtacgccagcgctgtcaccactcccatgcgagccgcttcgactccatgacgtttgatgcgtttgcaaaaggattggttgaccgcttcggtcaggcattacctgaccgctggaggccaaggcccgattacgagatcacgactcatacggagcgagatttccgcgagtacctccatgaccttccaccgccacctgcggaaatcggaacaagaaatgatgtgcgtgagatagggtctaaaacctttgagcgtcggcacctgctcggctcaccgttacctgtagaaggatggccagacccaactgtcgcgcaatgggcggcagatgcgttctggcgagtgtcgctccacggcggtggcaaaagtgtgctgtctttcccaatgattggccgtctcgctgaattgctgctgcgagtcaatccgatggcgcgggatgccttgcgcctcacctattcgcatttgttcatggacgaattccaggacaccaccagggttcagtacgatctggtaagcacgatttttcgaggcacagaaaccatcgtgactgctgtcggagataacaagcagcagatcatgcgttgggcaatggcaatggatgctcctttctctgcctttgatgctgatttcggaggtgtccggacttcgctcttcaacaattaccgatcttcgccggacttggtacgtatccagcatgtgttggcccaggcgttagatgtgcaagctgtgcagccggtatctcagactgacggcacaattgacggagaaagctgttcaatactcgacttcccgagtccaaaaactgaagcgcgtcagttagcgcaatcagtagcgtcatacattgccgacctgaaactgactcctcgagacttcgtcatactggttcgacaaaaggcgggagaatatgccgaactcttggaacctgccttcgcgaacgaaaatctggcgctgcgtaacgaagctggaatggtcggcaaagtaatgctgcaggagctgatgacagaggaaatctcgaagttggtggtcaattttctctgcctatcaatgactccgagagcgggaagttattggtcgacttgccagaattggctcgcctcaatgagagggatcgatgccgatgactcaatcaggcagagtaggctcgctcgtgtgttggacacctatgcaaccgaactggccgcacgctactccctccccccgagaagtaaggtggcctcacgcgcacttgttgacgacatcctaaatttcgtgggtgtagagcatgtgatccgtttcaacgccgcctatggccaagggagctggctagaaaaggtgctagacgcaacggcggaacatcttttatccagctcgctccatagtaaggactggtcccacaccctcgacatgtacgaaggcgtgcacgcaattcctttaatgacgatccacaagagcaagggccttgagtatcacaccgttatctttgtcggactggatgatggcgcttggtggagtttttctcaggatgaaattgaggctacggcaggattttttgtggctttcacccgtgctaaacagcgggtcatattcacttactgtgcttcgcggggcacgcgaacaaaaattgcgaccctgtacgagctgcttaccaaagccggagtccaaatcacgactggatcgagttga

SEQ ID NO: 72132 - DNA, 2103 bp, Enterococcus faecalis S613; identical to SEQ ID NO: 71990

SEQ ID NO: 72133 - DNA, 1722 bp, Enterococcus faecalis S613; identical to SEQ ID NO: 71991

SEQ ID NO: 72134 - DNA, 2103 bp, Enterococcus faecalis R712; identical to SEQ ID NO: 71990

SEQ ID NO: 72135 - DNA, 1722 bp, Enterococcus faecalis R712; identical to SEQ ID NO: 71991

SEQ ID NO: 72136 - DNA, 2073 bp, Escherichia coli MS 57-2
atgcacattcatcaggtcgaaattaaaaacttccgtcttttagctgatgcagagcttgtattggaggaacagacgaccgtcattgttggacgaaacaacagcggaaaaacatcactctcagaaataatacgcagattcttagcagatggtagtgctactttccaacttgaagacttttccagttcctgctacgaccgtttttgtgatgctctggaagcacttaaggaaggcatggaagatcatctcgttcgagaacttattcccgccattgaacttcggctgaaattccagtacgaccctgcacaacctcaattaggtccattgagtccctttgttatcgatttggatcccgcgtgttctgaagcgcaggtagtagtccgatacgaattgaaagatggccatctgacacaatttctcgaaagtcatactgaaatgccactttctagagaagaccgcctcgctttcctccgtatattgcgagaacgtatccctaataatttctgtgtgaaaatatgggctgaagatcccaacgatcctgataatcgtcgcgagttaccacctagtgcattgcgcggtctggtcaaatcgggctttatcaatgctcagcgaggacttgatgatgtgacatcccgagaatccgatgtactggctaaaacagttgaaaatcttttcgcaacagcctcttcggcatctgcgggaacggctgataaacaaattgctgatgcattgaaaggtgcagttcaggacattcagactcaaattgacacaaacttcggaaaccagctcaacagtctgattccggctctagaaacttttggatacccaggattgggaggacaggagttacatactgaaacattgctcgatgttagcaagttgctatcaaacttcacgaaagttcgctattcaggttatagcggaatcgcattaccggagtcatataacggtcttggtacacgtaatctgatatttattctcttgcaattagctggtttctataaagcattttgtgccgaagttactgagccgggtgtacacctgatattcattgaagaaccagaagcccatctgcatccacaaatgcaggaggtttttattcgtcaacttgccaaaattgcacaacaactggtggatggcactgaggacaggagaccctggcctgtacaatttgtcgtgtctacacactcgcctcacattgccaatgcggctggtttcgagagtattcgctattttctgggggctccagcacaggggactcgggaaggtgtccgaaaaaccaaaattaaagatctgcgtaaagggctgaatcatattccaattgaagataaaaaattccttcatcaatacatgacgttgacacgttgtgatctgtttttcgcagataaagcgattctcgtcgaggggttaagcgagcgattattgcttcccgtcatcatcaaaaaactagaatcagccgaaccagagagaccgaagctgtcgagccagtacgcaacggtgatggaagtcggcggtgcatacgctcatttgttcttcgagttattagcgtttcttgagcttcaaagtctgatcataacagatctggacgcagtcctaagagcaggaggtcaggcatgtgctgttcatcttggtacatattccagtaatgcttgtttgaaagcatggttctctgaagatacccctttcacattagctggtttgattgccaggagtgacgatgataaagctcgtaatggaaatcgtattgcctatcaatgtgcagaagtgacagatggcccctgcggacgcacattcgaagatgcatttatccttgcaaattcggctttattcgggctggtagggagaaatactcaggaactggaaatagaagcccgtgataaagcggctgagtggaaaaaatcagaatttgcattgaaatacgcgattacagagacagaatggaacgcccccaaatacatagtcgatggaatccgctggttagctggcagcaatgagcttatgacacaagatccagtattggcgcaggttgtagaggccacaactagtattgaagaaggagccagcgctgatgtctga

SEQ ID NO: 72137 - DNA, 1734 bp, Escherichia coli MS 57-2
atgtctgagatccattcgcccgccgaagctgctagccagcgagctttggaatctatgtatgcttgcctcagtgaaggacgaagcttccggctggaagctggcgctggtgcgggtaaaacgtattcccttattaaggcacttcgattcttgattgagcgaaataaggatttatttgaaaaacgtagccagcaaattgcctgcatcacctttactaacgtggcgaaggatgaaatcgtcgcgcgaacagatcgaagccccatcgttttttgtgataccaatcatgcgttctgttggtcgttaataagcagctttcaaaaaccgttgagagaactgattgaaacaatgccaacatgggcagaaaagctcgaagaagttggtggaagccttgggaatcgtagtattgagtataatcttggacatcgctctattcgcgaccatcgtataactcttcatcatgacgatgttctttctttaactatctcactcatggagcacgaaaaattccgtagagtgattgcagaacgctttccaatcattctggtcgatgagtaccaggacactgataaaaactggattgaggcaattaaacggcattttcttggacaagctagagcacctttatttggttttttcggcgatcattggcaaaaaatctatggtggtggatgtggaaagctggaacatcaggacgtggttgaaataggtaaagaagccaattttcgttcggacaagataattgttgatgcccttaatcgtatgagacctgagctaccgcagtgtgttaaagatcccgaagctacaggtttagtacgcgttttccatacaaacaattggcaaggagttcgtcaaaaaggcgtgcactggagtggtgatttaccattatgtgaaggccaggctactctggaacgagttaaaacaacgttggagcaggatggttgggtcttttctcccaatcacaccaaaattctcatgttgacccatcgacttttagccaatcagcagggctattcaaatatagtggcagcgtttaaatacaatgaatccttcacgaaaaaggaacatgaacatatagccttttttgtagacaaactggaacccgcctgtgatgcctttaccgctcgtaagtatggagagatgtttaatgcgcttagcggtattacaccactgttgcgtagacattcagataaggtgagttggcacaatgtaatgacgcaacttcttgctctccgcgaaaccggtacaattggcgacgtaattgagttcatccgtgctcaacggaagccaagacttccagataaggttgaaaaatttgagcaggagttactccattttgacagaacggctgatgttgaaatgccccgaagattaaaagaacttgaaaagctgaaaaatattccctattcggaggtcagatcacttcgccgttatcttgatggatattctccattcgaaactaaacatggtgtgaaaggtgctgaatttgagaatgtcctggttgttgttgggcgtgggtggaaccagtataacttcggagaaatgttggaattcgctggagcccaaacgattccagtcgataagcaagactcatttgaacgaaaccgaaatttgttttacgtcgcttgttccagaccccaaaagcgccttgcgatccttttcaaccaagctttgtcacctgcggcactgacaacacttggaaattggtttggagcagagactataataccagcaccgtag

SEQ ID NO: 72138 - DNA, 2316 bp, Enterobacter lignolyticus SCF1
atgcatttgagaaagctggcagtccgtaatttcagaaggctgcacgatgttgttatcgatcttgcgtcagacatttcaattttcgtaggggcgaataacagtggtaagacttctgtcggtcatgcacttcaactattcaccggtaaaagccgattcaatattcatgacttcaatgctgaatgttggactgacattgtcacatttggagaaggggcggatgctgcgtcgctaccttcactggaacttgatatttggtttgaagtaacaccgaatgatgttcatcgtgtagtcgatcttctccccagcctatcgtggtcaggttctctggttggaatgcgcgttgctttttcccccatcaatcctgaagaaatccgttcgcgcttcctcgcagtacgtcagcttgctatcgatgccacacctaaagatgaaaatggaactctcaaatacgatccttcacctcgtaatctttgggaatatcttcgcgatagactcaatgacgaatatgaactccgctattatgttcttgatcccgcacatttcaatgcggaaatgatatccgaggaaggctatgagcctactccgctcacagggcgtgatcgaagtggtcgcgaaatactgaacagccttatccaaatcaactttttgaatgctcagcgtcatctttcagatggttccggaggttcccgttcggaggatctttctcgtgttctcagccgtttttacggacgaaatcttgaacaaaaaggtgaagattacgaagcattaattgctttagctgcgtctgaatcagctttcaatcagcatcttgaacgcgtttttgcacctacgctgaaaagtctggcgaaactcggataccctggactttcaaacccacgcatgatgattcgttcggccttagatccggcgcagatcatgaacaaccaaaatggggccgtaatacattacgcgctgggggaggatgacggtaatcctaccccaccaacactacccgatagttataacgggcttggatttaagaatctgatctttatggttgttgaattactcgacatccacaaccaatggttagcaatagaagagaatcgaccaccggttcacctgatttttattgaagagccagaagctcatctccacgcacagttacagcaggcttttatacgcaagataatggaccttcttgccatggagagtcaggagcttatgcactacaccactcaagtggtggtgacttctcattcaactcatattctttacgaacgtggttttcggccgatccgttactttcggcggaagcgttcatcaaatatgtcggcaacagatgtgctcaatctctctgttttttatgataatactgatcctgaaattcgagattttcttgagcgttacttgaagctgacccattgtgatttgttttttgccgacggggctgtacttgtagaaggcaatgttgagcggctactgctcccgcaaatgattgctaccgccgcacctagattaaaatcctcttacctaacagtccttgagattggcggtgcttttggctatcgattccaaaaactaattgaatatcttgggcttactacactcattattactgatctggatagtgtgtactgtacccctccggaacaggatgcaacagaagctcgagcagatgagttagatggtcttgcagaaaatccggctgcaaatgatgatggcgaggaacctgatgatgatgaggaagaacaggccaacacagaaacaccaggaaaggcttgtattgccagtcatcctggagctatgacctctaatcaaacacttcggcagtggttaccgaaatgtgacaccgttgtcgctttatgggaagcaactgaggaaatgaaaatacaaagccgcacagctgagtgtgacgctttggttcgtgttgcttaccagtgccagacagatgttacatggaaagaggaaacactggcacttgctggtcgtactttagaggaagcttttgcacttgaaaacctgtcttggtgtcaggatgtgagctgtaagccactcaagctacgcattgccagagctgtaagtatggacctactgcaactggcccagcgcattcacaaacgcgtgcaatcaaaaagcttcagtaaaactgattttgctctgaatttacttcttaaaaaaccggatgaatggtctgtcccaacatacattgctgaaggattaaaatggctcgaagctgaaatagccccgccggaactagaagttgcagaaggtcaggaagagaatgttcaggatatgtccgtcgctctggctgaaactgatggtgggagggttgcatga

SEQ ID NO: 72139 - DNA, 1878 bp, Enterobacter lignolyticus SCF1
atgaccagtcgcattggtagccctgatacacaggcagatattgatgttcgtatttgtctggatagctcgccaccacgttcatttgtcatggtggctggtgctggttcaggtaaaacaacatctcttattaaagccttggcacatttggctgatacccgtggttctgctttacgtcgtgccgggcaaaaaatatcctgtataacgtatacagaagtagctgttggtgagattgccgctgacgttggtaactcacagttatttcatatttcaaccattcatagctttctttggtcgatcatccgaccttttcatttagatatcgcaaagtgggtcgtagcgcgaatacatgaaaaaatagctgaaaagcaagcccattatgataagcccagaacacaagctaaaacaaaatctcgtcttgaagatgaaattgcctatctctctgctcaacttgagtgcattgatgatattgataaatttatctacgggacaggaagtaactatgctaagggtattctaggacacgatgatattcttaaactcgtccctgcttgtgttgaggctcatccacttttgagaaggattgtagccaagcgctttccatttgtttttgtcgatgaaagtcaggataccgatcctgatgtgatctctgcgcttcgaactattgctaatgacaatcctgacatgtgcataggattttttggtgatccgatgcagaaaatctatatgagcggagctggtgctattccgttaagtgatgggtgggctgaaattacaaaaccagagaatttcagatgtccgacgtctgtacttggtgttatcaattcgattcgagcttctggggatggcctccaacaaattcgtggccgaaaaactatcgtagatggtgttgaacagactgtattaggcacagtgaatcttttcatcttgccttcaaatgtggaacgaagtgcctatctcacatctgtcagacgttaccttgcaaatgaaactagcgatgaacaatggctaagtgatacacgcgaaggtgatgttcgtctgcttgttttggtgcatcgtatggcagctaatcgactgggattccctaatttattttctgcccttactgataaagcaccgatgagcttgagtgaaggggtgaacgatgggtcagcttggccgcttcgcccatttgtccagcatatccttccaatttttgcggcggctcaggcaaacgatcaatttcagattatgtcgattatgcgtaacgagtgcccaaagctggagccatcacgactgcatggtcaagctatggtggcagtcttaaatgaactacaacaaggcatcaatggcctgcttgcactgttggaagatggatcgcaagcaacagttcgggatatattgcgacacgttagagactgtgaactgctacgtcttgacgatcgttttgataatcatttaagtgatgaacctgtgaacgatggtaatgatgacttcgaaaatgttcagaactatctaagatgcaatgcccatgaactttgggcgtaccgacgctacctttcagaggaatcaccttttgccactcatcatggtgtaaaaggtgcacagttcgagcgagtgttggttgttatcgatgatgaagaggctcgcttcagccaatattcgtatggaaaatattttcaatacattcccctatccgacaatgatctagccaatcttgaagaggggagagagtcagtactcgaccgtactcgtcgtcttttttatgtatgttgctcccgtgcactgaaagacttggctgttgtcatctttgttccagatgtcgccgtcgctcaagcggcaattattgcgcaaaatttattcccggcatcggtaattctaagggcgcacgatctggtctag

SEQ ID NO: 72140 - DNA, 2061 bp, Ketogulonicigenium vulgare Y25
gtgaagattgaaaacttccgattgctgcaggacgtcgagattgggttcgaagatagaaccacgctgatcgtgggacgaaacaatagcggcaaaacatcgattgcagagcttttccgccgactcctctcagaaaagactctcaccttccgtctcgaagatttttctctcggctgtcacgagaagttctggaacgcatttgaggcgttcagcgccggagcggaggtttcagacgtactggatacacttcccgtcattcgtataataattgatgtttcgtacgacgttgacatgccggaccttggagctttgggcgactgcatcatcgacctaaatccagattgtacatatgggcgtcttgtcctgacttttggccctcgacccgacgcaactacatttctcttcgccgatctccctgcaccagaagaagatgcagagaatgccagaagtgcgcttttccgtgctctgggagcgcgggtttctgccacctacatatcgattttagaagcgattgatcctaacgatcccacgaataggaagccgctcgaaacgaaagtgctcactgctataatacaaggcggcttcatcaatgcgcaacgtggattgggtgacgacacgaaacgcgaacgagatgttctcggaaaagtcgtagaaatactttttcagtcggcactaagcgatccgaccgaccctgaaaaacggactaccgccgaacagttgaaaagcgctgtcgaagacattcaaagcgatctgcacagcgacttcaatgtcaagcttacatcgctgctgcccaccttcgaactgttcggctaccccggactggctgatccaggactcatcactgagacgagctttgacgttgagaggttgctaagcgatcacaccaaggtccgttatgtcgggaagaacgggataacacttccagaaacctacaatggtctcggcgtgcgtaatctcgtattcatgctgctgcaactcttgcgcttctttcgtgagtatcaggcaacaccgacggcggctggagtgcatctaatattcatcgaagagccggaagcgcaccttcatccccagatgcaggaggtattcattcggcaacttgatcagatcacgaatgctttcgtcactcaattgaacgataatcacccttggcccgtccagtttgtcgttacgacgcattcgccgcacatggctaacgaggcccgctttgaatccatgcgctatttcctgtcgaaagcggacgaaaatggcgtccggcggaccatcatcaaagaccttcgccggggcatgggaactgcgcccgagcctgatcgggagtttctacatcagtatctgactctcacccgttgcgatctgttctttgccgataaggccgtcctgatcgagggaacgtcggaacgcctcctccttccgacaattattcgaaaaacggacaatgcggcacctggagcaccgcagctcggcagtcaatacctcaccgtcatggaagtaggcggagcctatgctcaccgcttcttcgatttgctgacgttcctcgaactccgcacattgattattacggacatagatgcggttcgtcccaatgcaaacaacaagcgcgaggccgtacctgtcgcccaagggcaattcacgagtaacggttgtctaaaggcattgtatggtgccgatatatctccggctgccttgctcatcaaaacaccagacgagaagattacaaatgacaggcgcatcgcgtaccagattccagagcaggatggtggagcgtgcgggcggagcttcgaagatgcgttcataatcgcgaaccctggccttttcgcgcttggagaggaagatgttgcaacggcggcgtatgaactcgctgcggaacaaaaaaagtccgcctttgctctgcaatacgcgatcacaaacaccgagtggattgttccccattacatctctgaaggtttgagatggttggcacagggtaatccggcccctgtgcctcccccagtggccgtagcggtcgaaatcctcgccgaagctgccggggtcgagatagcccccatccagggaggcgaacatggctga

SEQ ID NO: 72141 - DNA, 1761 bp, Ketogulonicigenium vulgare Y25
atggctgagggacaagaaagccccgcagatgccgctggtcgcattgctctggaacgcatgttcgcttgcctggatgaaggacgcagctttcgtctagaggcgggcgccggagctgggaaaacctattctcttgagagagcacttcgcagattgattgaaaagcaaggctccgcgttgctgcggcagcgccaacagatcggctgcatcacctacaccaacgtcgccaaggacgagatcattgccagaacgaacgcgcaccctgcggtgagacccgaaaccgtgcacggtttttgctggtcagtccttcaggattttcagcctacgctgcgtgaactggttcccgggttgccgacatgggaggagcggcttgcggaaaccggcggcgtcggtcatcgtcgtattcattatgaacttggctaccccggcgtgacagacgatcaggtgtcacttcgccatgaagatgtattgtcgctgatgattcaggcgatgagtcgccccaaatttcgtcgggttctgacttcacgatatcccattctgcttatcgacgaatatcaggacacggatgccggtttcgttgatgcgttgaaagagtggtttcttgatcgaggtgaaggccccttgatcggtcttttcggagaccactggcagaagatttacggcgagggatgtgggctggtggaacaccaggcactggaggttatagacaagcaagcgaacttccggtccgttgatccgattgtgcaggtcctcaaccgtatgcgtccagacttgctgcagatggttagcgatccagctgcacagggtgagacccgtgtatttcatacaaacaactggccggggcagcgacgaaccggacagggaggcggccactggaaagatgataccagtcccgaggcagctcgtgcttactttcagcatatgaaggatcggctggcagccgagggctgggatctatcggtagagaaaacaaaaatactgatgctcagccacagtatacttgctcgggagcaaggatacgagaacattcggagcatctatggccagttcaacgatccttggttgaagaaggatgatcctcacatcaagtttcttgcggaccagcttgaacccgcctgcgctgcgttcgaggccaaccggtatggggaaatgttcgaggcgttcgggtcgggcatgccgcgcatccgtcgtcatgaagacaagatcgcctggaccaatggcatgaacgtcctcattgcgttgcggcagactggaacgattggcgagataatcgacttcatcgccgcccagccgcacatgcggctgcctgccgctgtggaacaacgcgaagcgaagctcgctgaggtcggagatgaacccgtagaaggggaaccccgccggattacacagcttagaaagctacggacggttcactatacggaattgatagcgttggatcgtttcatcgacgggcacacgccatttgctacgaagcacggcgtgaagggcgcggagttcgagaatgttatggtgatcgtgggacgtggctggaacaaatacaactttgtacagaccctagaatggatggatgcagcgcctcctgctgacaaacaggatttcttcgagaacaatcggaatttgttctatgttgcatgttcacgccccaaggtgcgcctagctttgctgttcacgcaactcgttagtcccgcagcgatggcaaagctcacagagctgtttggtgagaacaatctcgtagccctgcctcctgatccggtcgtaacatga

SEQ ID NO: 72142 - DNA, 2034 bp, Ralstonia sp. 5_7_47FAA; identical to SEQ ID NO: 71858

SEQ ID NO: 72143 - DNA, 1758 bp, Ralstonia sp. 5_7_47FAA; identical to SEQ ID NO: 71859

SEQ ID NO: 72144 - DNA, 2127 bp, Rubinisphaera brasiliensis DSM 5305
atgaaactcatacatgcgtgtgtaagcggctttcgacgacttgaaaacgtacttattgaattcgacgaacgcgaaacggtgttcgttggaccgaacaatagtggaaagacctcagcagctgaggtctttcgtctcttcctgaagaccggcgatttctcagttcacgatttctctgtgtcgaatgtctcagagtttgacaaatatgggcgaggagaaatcgatgaaaaagacctccccagtattacgctcgatttgtggttttctcttgatcctgataccgagtttggtcgagccggagagttgcttcctgacgcagagcaagactacaacgaagttggtatgcgaattcggtatgtggtaaatgatggagcgaagctaaaacaagatttcctcgcccgccttactccgggagacggagaacaagcgagaaagccgctatcgtattatttgtccatgccaggcacgctgaagcagcactattctcttgcatattatgcgctggacaattcgaccagtgaagaggttgaacgtccgctaaaagccgaagacggaaagagaatcctgcgatcattgatcagggtcgaatttgtcgatgctcaacgcaagatcgatgatcacgaaaatccagggagtacgcggttgtccaaggtcttcacccggttttacaaacggaatcttgtccaagcgtctactgcagaagaagcgaatgacattattgaccggcataacaacgaccttactggccactactcggctgttttcgccgatctactcacagtcatccaaagcttaggagtgccttccgtcaacgatcgaaggctgcgtgtaacctcagctctggttcccgagaaagtgctcgaaagcaatgcgaacctgacatatttcgacgagcagcggggacacgaactgccagagagttacaacggactagggatcaagaatctgatctacctggcagtgcagatatgcgagtttcatctcaactggatgagcacggaagaatccaggcctctgtctctcatgatattcattgaagagccggaagcacatctacatgcacaggcacagcagacattcattacgaatgcatggaaagtcattcgggatgcatcagtacgtgttggcgaagaagagatgacaccacagattgttgtcacgacacattcctctcatattctggacacggttgactttgggaaggttagatactttcgcagatgtcattgtgacggagaaaacgcggcgacgacgacaactctgaatgcttcggttgcaatgaatttgcgatcctttcgtcccacaatgcagacgccccacgccgtagataccgagactggggaagaggattctgagccaatgtcagaagagaagattgaggccacgctgacgtttctgaaacgatacctcaagcttacacactgtgatctcttcttttcagatgctgtgattctggttgaaggcaccgttgaaaagctcttgctgccagagatgatcgatcgggtcgctccggaacttaagcaccgttacctaacggtgcttgaagtcggaggtgcatatgcgcaccgtttcgcttcgcttcttgaattcatcgctgtgccgtatctcgtgatcaccgatattgattcggttgtgccaactggttccaggagtgcctgccgggccgacactgtaggtgctgtttcgtcaaacgccaccctgaagttcttctttcggaaatcctcgatcgaggaattgtgcgatcttgaggcagatgcccaggaagtgtccgcccgtcgttgtttcgtcacataccagaggccatcgccagtcaatgggtatggcgacaacgcgacgatgcatgggcggacgttagaagaatcattcacgtacgaaaacatagacctgttccgctccgaaaagttaagtgtcggcgtagatctaaccggcgatccagactacgaagaggaatatcaagctgtcttcgaagcgattcgggcctccacgttcaagaagacagagtttgccttatcggtgatttcttcagatgctgactgggtaactccgaaatatatcgctgaaggactaaagtggttagaagctgaattgagggcgactgttgcagcagacccggagggggcaattgcatga

SEQ ID NO: 72145 - DNA, 1842 bp, Rubinisphaera brasiliensis DSM 5305
atgaaatgtcttgagccaacccaggctgaccaggaagtgcttaaatgcctccgcgaaaagcgacccttcgcaatgattgccggggccgggtcgggaaagacgacatcgctcgtcgaagcactaaaggcattagatcgacttggaggccatcgcatgttgcgagatggccagaaggcagtctgtattacctacacgaatcgtgcaaccgatgttattcgtgaccggcttcggcagaatcccctcttcgtagtgtcgacgcttcacagcttcctatggggcgagattggacactttcccaagagtattcgagaagctcttcggagaagtattattcctgctcagattgcaaaacaaaagagcaaggataacggaggaaacagcaaagcagctcggatcgcgcgcgaaaaagcagaagagcttgagaaagtacttgggcaaattgattccgtagaaacgtttgagtacggagatgactcaggttacagcgactttcccctagggcaaattggacatgaggacttactttatatagcgtcagatctgttcaaaaacagcaaatcctttcgccgtattatcgcacagaaatatccctattggttcattgacgaggcacaggacacctcacctgaaataattgcctcactcaatgagctttgcaacggcaatggtttgccaatagtgggatatttcggtgatccgatgcagcagatctatgacactggaatgggaaacttctctggccctgcgaactttcaacttatcacgaaagtagaaaactttcgttgctcgcctgaagtcattgtgttgctcaatgcatttcgcgatgacgtgcaacaagtccccgcctgcaaaaatgcatcgattgaaggcagtgtcgccatcacacttgtgaagatggaagagcccgaattgccacggaaacggtatagcgatggccagctggagcgagcacagcagaagcttattgcagcaatcgataattggaagtgggcagcaaacgaagacgccaagcgactttttcttgcacgaaggatgattgcaaggagaatggggttcttaaggttgcatgatttgtttaacggtgacttcgcctcgaatcgcgcaaagagtgcatttgaaaaaggcgagcattttctcctcaagccctttgtcgaagtgatcgttccgctcgtgaaggcacacggcgaaggggactcaaatacaatcatgcggatacttacgtctcgaacgcgagcgttcaattccagtggcgaacatagcgggaaggcgattcgtgaggttcggaagatagcaaacgacgtcactactaccctggctgaaaaattcgagtctgaaactcttggtcaggtgcttcgatattgcacccatcaaggattgattcgtgcgtcagaaaatctggaattgcatcttgaacgatcaaaacgcgaagaggaatatgacgagagccaacacgggactgaaaaaactgattggctcgcggacgccttccttgaaatgaaaggaaccgaagtagaaacatactgcagctttctcgatgataatacgccgtacagcacacagcatggcgtcaagggcgaggagtatgatgacgtgatcgtcgtattcgacgatgtcgaggcagcgtggactcattatacgtttgcgaaacttcttgcccccaaggcggctggatctccaaatgattcccagttagcacgtagtcgcaagctcgcctatgtctgtttttcacgcgcagtcaagaatctcagagttgcgttgttcacacttgatccacaggctgctgcagaagaactaatggcgcaaggcttgtttcagaaggctcagataagcattcaggcgtag

SEQ ID NO: 72146 - DNA, 1074 bp, Lactobacillus crispatus CTV-05
ttgataagaaaaagccaagaggcgcggggaaggagcgttaatcttagctttcaagttttagatgatataaaaattgaatatcctgttgtaacaatatttgcattagaagagccagaaaatcatatttctcctcatttacttggaaaagtaatggataaagttaaaagcataactaaattagataatacacaaactataatcacctctcattctccagcaataataaaaagagtattgccagagaatgtacgctattttcatttgacaaaagatgccgtgacagaagtgaagaaaataaaattgcctgatgacaaaggagaaaaatataaatttattaaaagagcggttcaaacttacccagaattgtatttttcaaaattagtaatattaggtgaaggcgagagtgaagaaatagttttatcgaaaataattagttcgtatactggtttagatgaagcaaacatatcaattgtacctttagctggacgaatggttaattatttgtgggatttattagaaagcttaaatatagcacatataactttgttagatcttgattatgggagatatttaggcggaaagaaaagaattaaagatattattgatgagttgaagcgatttaatcctaatgatgacgaattagaaaaaatagaaaacaaatgcgccgatttagcagaaaataaaaataatttgttggatttgacgaaacaactagaaaagtatgatgttttcttttcctttcctttagatttggattttatgatgttagcagcttttctggataaatataaaggaatagcatcaggaagtccaaagaccaaagcggatgaacgcaaaaaaattttggatagaactttaaaaggaaaaagagaggaagaagttgattatgataaaaatgatatagaattaatgagatggtataatatgcttttcttaggaataggaaaaccattagtacattttactgctttggaagatatatctgaagaagagctatgcaataatttacctgaacaattaaaaagattacttgagtctgtaaagaataaattggataagaaaaatgatgaataa

SEQ ID NO: 72147 - DNA, 1863 bp, Lactobacillus crispatus CTV-05
atgatgaataaggatcaatggaaacctagtaatgggatagttttagaatcaaatgcaaaacaggctatttttacaaatgataatattttggttcaagcaggcccaggagcaggtaaaacagaattattagcacagaaagcatcatatttatttcaaacaggattatgtcctgctccttttaatattttagcaataagctttaagcgtgatgctgctgagaatattaaagatagagtttcaaaaagagttggtaaagaagagggaagtagatttatttcaaaaacttttgatgcttttgctaaattaatagtggacagattttatttagtattgccgaaagatttacgacctagacctcagtatgaaatctcctctaattcaactcaaacaaaaatatacgaacatgtcttcggctatgttcctgatagaaacgctgtaaatgatcttttgaaagtagatttgaatgatataaaccctcagagtaataattataaattttggaagtatatgttaatgggagaagaaaaaacgtatttgacttttgaaatgatttctagactagcattatatattatccagcataataaatatgtaagacatattattcgatcagcttttccttttgtgtttctggatgaatttcaggatactacagttttgcaatatgatattttccgtgaatgttttttaaatagtgaaagtaaaattacggctgtaggggataataagcagcaaataatgttatgggctggtgcggataaagaaatttttggaaagtatacgcgtgaatttagagcaacaaaggtatttttaaaagaaaatcatcgatcagctttaaatatagtgaaattacaaaaacttatgtatgaaaaaatagataaggatataaaccctgacataataattaataaaaataaggatgaagggaaagtttttctaatagaaactaacgaaccctcaaaagaagctgaaattgttggggaaaatattataaaagaaatacgtatgggtgttaagccttcagaaattgctatattagtaaaacaacgccctgaagattacataagaaatataaaagagtatttaaaaactaaaaatgtaactgttagggttgaatcaaagtatactgaaactttctctgaacctatagttaagttgattttgaaaatgattttagcgtctattaacgtgataaatggacaggagtggcaagaactggtagatgagacttctgaaatatttctcattaatttagctgatgctgaaatagagcaaaaatatatcaaaaaattaaatgtattccttgataagctatttaaaaatctattggttcaagtccatgagaatagatcaaaaagtaattattactgtaaaatcgtagaatctataatagacttttttacgattaataggcttcaagtttactatccagaatacttagaaatagatcaattaaatagaacgaaaactcaatttatagagcagcttaaagaatgcggatcaataaatgagttaaatactgacatcaaagaaatatggaaagaaataattgacaattatttaggaaagaattcaatagcaactttaactatacataagagtaagggactagaatataattctgtttactttattggattagaagatagtgctttttggagtttctcaaaccaatctgagtctgatcgtaaagcattttttgtggcaatttcacgtgctaaagaaaagctgtactttactttttgtcgaggaagacaaacggttagaaatatttatcaaactaaaaaaaacattaaggaattttatgagttgtttgacaaatcaggtattgtaaaggaaataaatgataataacaattcttga

SEQ ID NO: 72148 - DNA, 2061 bp, Marinobacter adhaerens HP15
atgatgtcaatcggaaagatgagtatggttgacatactttgcgatagatcagttcatgggcgttctagctgcacacaatcgttagtagttgggaagctgccgcaatccataaaaagatacaaggatggcctcgaactaattatgaaactacacacgatgcgcctttcgaacttccgttcttttggccaaactccaaccacgatattgcttgacgacatcacatatctcattggtcggaatggatcgggtaagacagcagcattggaagccctatgccggctattcgctttcgatccagctcaacgtcgtattcagcgctcagacttccacgtcccaattgatgaagaatcggaatctgaggaacgcgagttatgggttgaagccgatttcacgtttcccgaactgaccgaggatgaagacaacagcacagtggccccgcattttgggcacatgcggcttgatgaggttgatggtattcctcgagtacgatttagactcaatgcaacaatgggattggacggagaaatcgaggagaacctcgtctatgttctagacatagatgacgagggaaatccactagatgtatcgcaggtacctcgctctgaacgacgtcacataaagcttcactatctgcctgctcgacgagatccagcggaccatatttcctatagcgccaatgccctcttggggagaattcttcgctcaattcgctgggaagaagagcgagagaccattaagggtttgactacagaaatcagtgacagccttatagccaacccatcagtaaaggcattcagtgacgcgcttcaagcttcttgggagacattgcacaaaggcgatttcttcaccgacccgaaaatcacttttgtagcgtctgagatcgaggcattgctgcgacacatgtcagtttctttctctccgggacatgacgaggagttggttgatttttctcgtttaagcgacgggcaaaagtcattgctgtacttatcgctggtattttcctcccaagcgataggccgaaaaactctatccgaggaaaacgcatcattcgatccggatcgtctccagcctcccgttttcaccttgattgcaatagaggagccagaaaacagcctttctcctctttatttagggagaattgttaccgcactaaacgaaatggtcgcagacgaagactgccaggcgcttattgctacccatgctccatcaatgcttcgacgtgtaccaccggaaaatattagatacatgagattgggagaaaaccggcagtcaagggtcactcatatccaactaccacctaagaccgatgacgcccataaatttgtcagggaagctgttcaggcatttcctgaagtctatttttcgagattggtgattcttggtgaaggagatagtgaggaaatcgtgttacctcgccttcttcaagcgaaaggagcaccagtggatgaatcctccgtctcaattgctccactcggtggtcggcatgtgaatcacttttggcgcttgctatcggcattgcaaatcccctacctcacgcttcttgatctcgatgtagggagacatcaggccggatggggacgtatcaagtacgtgaacgaccaactcaaaaaattcgaaccaaccaaggcgttacctaattggaatctcccaaaatggaatgatagcgatttgccagtaaggacacatcattggttcgaaaacaatcgcgatgtttttaccgagttggaaagccgcggtgttttcttttcataccctctggacttggatttctctatgctccttgccttcccggaagcatactcagtaaaacgggagatctcagacaggccagccttgcaagccgttctgggaaaaaatcatcacgatgcatctcaatatagcgaggatgaacagagtctcttcacgagttatcacaagcacttcaaattaggaagcaaacctgctgcacatatacaggctttggcaaacctagatgataatcagctagctcaaaacatgccccaagaactcaatcgattaatcgatacagttattgcaaagctaacggagttgcccgaatga

SEQ ID NO: 72149 - DNA, 1665 bp, Marinobacter adhaerens HP15
atgatctccgtagcggagtggaaacctgccgacaatcttacacttgagcctaacgcacagaaggcggcgacagagcagatccactctctagccctaactgctggccctggggcaggtaaaacagagatgctggctcagcgtgcagacttcctacttagatctggcacttgtacttatcccaaacgtatcctcgctatttctttcaaagtcgatgcaagtcaaaacttgagagaacgcgtgaagaagcgctgtggttatgaccttgcatcacgtttcgacagttatacgttccatgcattcgcaaaacgcatcattgatcgatttcgaccagtgttagagggtaatgatgctttggatgtgggcttcacgatcggagaccagaaggttcccagaaaacaaattacttttgttgacctggtgcccctagcaatccagatactaaaaacgtcatcaattgccagaaatgctgtcaggcagacttacagcgacgtttttcttgatgagtttcaagattgtacacaccaacaatacgagttagtaaagttggcatttcacaatactcctgttcgtcttaccgctgtgggtgatgtaaaacagaaaattatgggctgggccggtgcgctagagggaatattcctcacatttgctcaagacttctccgcgatgccactaaacctttaccgaaattttaggtctgtaccaggcctgctcagggtacaaaacgaaatcattaaggtaatagaccctgattctgtcatgccagatgaacaacttgagggagacgctggagagattctgtcgacgcaatttgcgaacagcagcgatgaagcctcctatttggcagacaccataaaaagctggattgaaaccgaggagttggcaccatcagagatcgcgatacttgtatccaagcagcttgatctatacgcgcacgacttaattaaggcgctgacggcaagaggaataccctttcgaaatgaacaagagatgcaggatataacagttgagccagcagctcgcttgattgtcgattacctttcttgcctctacggaaaacgcgaacccaaagcgtggataagactaatgaagcagctgcagccctttgccgatgacgacgtgcagtctgaagttagccggtccctggacagctttataagaaagcaaaggaaagccatggctggccagacggctgagcaacgaagcacggaatggtgggaaccagcaaagttgtttcttcaacacgttggcattgaaaccgttgcagcgctatctcctgaatatgagtcaaaggcaaggctgagagacgttattaccgatacaaaaaatcgcatatctgagctgagtcaatcgacctctaccctcgaagaagcgctggaccgtttttcagacgacgagtcagtgaggatcttgaccatacataagagtaaaggacttgaatttgactcggttatcatgatggcgatcgaaaatgagattttttttggcaatcaagacgagaatcgctgtgccttttttgtaggagtgtctcgtgcgaaacgacgtttagtactaacaaacgcgaagcttcgccctcggccggaaaatcacggcggaatgtggagagaacatcgctcgccacaatcagaatacctttcgtacgtggaaccatttttaacagaacattga

SEQ ID NO: 72150 - DNA, 2058 bp, Caldicellulosiruptor hydrothermalis 108
gtgtatattgataaaataaaaatcagaaattttagatgctttggtcctgaggaaacagtaattgaatttgataagctaactgctttaataggtgcaaatagctgtggaaaaacagcagttttacatgcattaatgaaaatatttgggagtgacaataaagagattaaacgttctgatttccatgtacctaaaagcatggatccgcaagaaattgaaaataacgacttatacatagaggtaaaattaagttttccagaattgcggcaagagaatactgaactcaatagtataccatctttttggaattatatggttattagagaacctggcgttttaccatatgtaaggatatgtttgaaatcttcatggcaaaaaagtaatactcctgatggagatattgaaacagaaatattatttattaaagccccggaaggtagagaaaaagacagcgattacgaaaaagcaaaacgagagcatttatcaagaattctatttgtatatgttccggctataagagatgtctctcctcaattaagaaatgtttcgaactctatactctggaaaatactcaatagcatagaatgggaggaagatttcaaaagtaagataagggagaagacggaagagattgacaaactttttgcaaaaaatccaggagtatctttagtaaaagaaattattagtaatacgtggaagaaatatcatagggattataggtataaagaggcacacatgcgttttagtaggggagacttggatactgttttaaagaaagttgaaatagaattttatccaacttctgaacctaagtcttatacagtaaatgaattgggcgatggattgcgctcgctattttatttaacattggtaaattcccttcttgaatttgagaatagaatcctacagtcaaaacattcttctaaaagtccttttaacaaagaaccttcgacacttgttttgcttgcaatagaagagccagaaaatcatgtttgtcctcatttattaggacgtattatggataacctaaaagatatttcctcaaagcaaaatgcacaggttatacttacttcacattcggcaagtattataagtagaattgagcctacagaaatacgtcacctaagaataaaaaatgaggatttatgtactaaagtttcaaggattattttaccagaacaaattgatgaagcatttaaatatgtaaaggaggctgtaaaagcttatcctgagatatacttttccaggttggtaatattaggtgaaggtgatagtgaagaactaataatcaagaaaatgattgaaaagagcggtttgtcagctgatagctgtgcaataagtattgtgccacttggaggaagatttgtaaatcatttttggagacttctgcaagatattggtattaattatataacattgcttgatatggatatcgaaagaaatacagggggatgggaaaagctgcattatataatgaatcagcttatacaaagtggctatgatgaaaaaagtgttttagcagatttatctaaagaagaatttgacaatatgccaaattggtcatatgacgaatatagcagagagaaaatagaaaagtttgcaaaacatcttcaacaatttgatatatttttttcatttccacttgatatagatttttcaatgttaagtacttatgaggaagcatataaaaaacttatacctaaaaaaggtggtccaagaattcctgataaaattacaaaaaaagaagactatgcacgttatattgacaatgttgtaaaaagtgttttgaaatcagataatgctactggtataacttattcagataatgaaaaggagttgatggtctggtataaatatttatttttgggtagaggtaagccaaatactcattttcaagctttgatagaacttggggatagtataaaatcaaacatgccagatgtttttaaaaaccttataaacagggctaaagaattattagaaaatgacccctactctgatatatctaatttaggagatgaaaaatatgctgataccaaaggaacaatggaaacctgctga

SEQ ID NO: 72151 - DNA, 1926 bp, Caldicellulosiruptor hydrothermalis 108
atgctgataccaaaggaacaatggaaacctgctgatggaattgaacttgaaaaaaatgcagagatagtagttaaaagtaattgcaactatttagtaatagctggacctggctcaggtaaaacagagttgcttgctcaaagggcttgttttttacttcaaacgggtatttgctattcaccaaaaaggatacttgcaatcagctataaaaaagaagctgccaaaaatttagcagaaagggttcaaaaaagatgtggtcagaaattggcgaatagatttgtatcactaacttttgatgcttttgctaagagccttttggatagatttctgtatggacttcctgaagtatacagacctgatgttaattatgatattaatccttctgtattaagagaggggaagcgaagcattttgttaagatttgagggaaaagaaccgaaacatttacttacaggtgattatgttgatggaattcatagtctttcaatagagaatattattaataaaaaaatgacagataaaaagcttccctttaataatgaacctaacaatttagaagaatggatgattaacgaattatggaaattatttttgaaaggagataaagattttaaacctgctctgacttttccaatgatttcaagacttgctgaatatatcttgagggaaaatccttttgttcttaaagcattgcgagcgacatattcacatgtatttttagatgaatttcaggatataacaggagtacaatatgatttattgaaaacttgttttctcgggtctaatgccgtaataactgcagtaggagataataaacagcgaattatggaatgggcaggagcactaagaaattcatttgaattgtttgaaaaagatttcaatgcccaaagaataaatttactgatgaatcataggtctgcgccgcgtttagttgaattgcaaaaagtttttataaaagaagcatttggtgaaaaaatagatttgtccgatttaaaaatagagaatagcaaaaaatggagtaaagatgatggaatatgtgaagtttggatttttaatgattatattaaagaagctcaaattttatctgaaaacataaagaagtggctaaattcagaagatttaagtcatagagatatttgtgttttggtaaaacaacgtccttctaaatacacaaatatgctgattaaaacattagctgaaaatagcatgaatgcaagagatgaaggcgaagtttcagatttattaaatgaggaaataattcagtttataattaatttattttcattagcattaaatattaatggaaataattcatacacatttgtatacgattttataaaaatattaaatggatatgatgatgacactccagagaggtttttaattaaacttgaatctgaaataacagagttattgaggtttgcaaacgaaaaactacttaagattgataatcagaaacaaattgtagaattatataaaattataattagatatttaaaaatggatagattaatatcctattttccgcagtatagaaatacagcatggtttaatgatttaatgaataagtctattaaattattgtggaatgaatttgaaataacaaataattggtcaaaagcaataactaactttataggaataaacagtattcctattatgactattcataaaagtaaagggctcgaatatgatactgttgtattcattggtttagaagattcagcattttggagtattaaaaatcaacctgaacaagatacttgcgccttttttgtagctttatcgagagcgaaaagacgtgtaataataacttttagtaaatatagagatgtcggagcaaatccttgccaaactgcagaaaatgttaaaaaattttatgaattacttgccaaatcgggtattgtagaatatagagattttatgtaa

SEQ ID NO: 72152 - DNA, 2073 bp, Listeria monocytogenes serotype 1/2a str. F6854
atgtacatttcaaaagtgaaaatcaataattatagaagttttattaatactgaaatagacttgaatgaaggaataaatgtattaattggtcataataacgctggtaaatctaatttattaaaagcactagcaattgtcctaggttccacttcaaaaaagatgtcaatccatgactttaataaagacataaaattggagaaattaaagggtggtcctcctcgtattacaatagaaattcacattactcaatctacaaacgaagatcttatgggagatgacttagtaaccgtaagtaattggttgacaaaattagaggaaccatacgaagcaaagcttcaatatgagttttttttacctgttactgaacatgataactatttaaaaaaaatttcaaacgctggaaattctgaagatgcatggtttatcattcagcatgattttcttagactatacatttataaaatctggggtggaaatcctgataatcaaattacagcagatagcgaaagtctaaatagatttgattttcaattcctagatgctattagagatgtagaaagagatatgtatagcggaaagagtgcattattaaaagatgttattgatttttttgtagattacgatattaaatcaaacaaagaaataactctagatgaacaaactcgccaaattaatgtacggaaagaagcctttaaagttaatgcagatttattactaaaatctatcaatgaacgattaactaagggtaaaaatgagatcctatcttacactgacgatataggagcatcttttaacaattcttatccaagttttgatggtgctttaactgagaatgaactctactctgtactcaaccttattgtagaacaagaatctggaatgaaattaccaattgcatataacggacttggttataataatttaatttttatgtcattacttttaaccaaaatgcaggtgaactccgatggaaactatttaggaagtaatgcaaaagtatttccggttttagctatagaagaacctgaagcacatttgcatccaacaatgcaaaatcaattcattcggtttctacaacaaaatataaagaaaagaaaagttaaacaggttttcattacatcccattctacacatataacagctaatataaaattagatgatattatatgtttatatcaagaacaaggcataaccaagattgcttatccaggaaaagtttttacaactaaagacgatgaagaaaatattattcctcaagaaaatagtaaaaaatacgtgcaaaggtttttagatactacaaaatctaatatgctattctcagaaaaaataattttagttgaaggtttagcagaacagctactccttccagtgttggctaattatcatggaacttcattagaagaaaaacatatagctatcatagatgtcggtggtcgatatttcaatcactttctttatctatttgaacctaataattcctttagtctaaagaggaaagttgtatgcatcaccgatatagatccgacaagaaagaaaaaggacgctacgggtgaaagttttaaaaaatgctatccttatgaagtcaatgcggataaaattaattatgagtaccaatggaatcaagccctcaagatgcacattggagcagacaataaatatatacaagttttttcacaagaaataggcattggtaaaacacttgagtatcagttggcatttgaaaatcctttttgtactctgctaatcacaccttcaatggttaatactgaagaaatagaaaagctaatgactaattaccatactagtagttttgaggagttaagtcagatactatctaaaacaaacgaaaattcccgtataatagatggattgaaacagtcgtcccaaacgtggaatgaagacatgaaaaaaagagcattaatagcatctcgatatttaaattctgtaagtaaaggagctaacgctctggagctatcatctatattgcaagataacttagaagaaaaaggaactgaaaaatacgtagattttaaagttccaaaatatattgttgaagcaattgattggatgtga

SEQ ID NO: 72153 - DNA, 1767 bp, Listeria monocytogenes serotype 1/2a str. F6854
ttgttgaagcaattgattggatgtgattctattttgataattgattcaaaaacaattattaaaccaaatctagagtttaaaattgaggccggtcctggtgcaggcaagacagaatggctaatagcccatataataaatgttgtacaaaactccgatatactattttcaacaagaaaagtagcatgcataacctataccaatactgctgttgaaactattctaagcagattgggtacatcattatctaatcgtgttgaagttacaactattcatagtttcttataccgatacgttgttaagccatacagttcattcatcccagaaaaataccgtgtaaatatttccgagttaaatggtcatgaagacccatttatttcttataagcatttaaaagaatggcttgctgatgattcgttcgataaattaaaacatccaagtactaagaagcaactactatataacgaacaaaactatgcattaagaaattggttattatcaatgaaatgtacattaacagaatcgtcagctcaatttcaatgtgagaattcaaaagcattctatgagggaaaaagattaatcagtaatgctaatttaaatattttgaatgcagaattaattaactataaaaaattatactgggcatctggatactttgaccatgaagacattttatttttcagccatatattaatagaacataatccttttattttaaaagtattatgcgcaaagtttccatatctttttattgacgaattccaagatacaaatcctattcaatcattttttgtaactaaatttcgtgaaagtggcggcatcgttggagttatcggagataaagctcaagcaatttacggttttcaaggatctgactcttcacaattcgaaaacttcccaataaaagaacattgttcctataaaatacttgataatcacagaagttcgactgatattgtaaactttttaaaagttatcagaactgatttagaacaaataaactgtgtgaaaacacaatctgataaagttatcattcatgttggttcaagatttgaatcatataattatttaaaaaagattgtagaaaatgaaaaccttgtttcactttcaagagacaatattacttcaaacgcaatgaaaactaaaattgaaggaaatagtttgaataaaaaaatactaaaaaattacagagaagtagatagcaataatgatagaaagagatccatagaagcatatatacaagcaatagagcttgcaaataatcaaaaatttaaagaagcaattaagattatagaaaatctatataagaaccaaaagaactcgaaaaaaaaatcgttaaaaaatttaattggtatgttgaaaaaaaactctatatacaaagaagcaacattgaaaatcttttacgacgttttaaaagaagtaactgaagaaaaaatccctggttttagaaaaggagcaatagaaaaattttataatataactaactatgtggatatagcgatatgcatgaatattgttgatgataatagcaaccacatcactatacacaaatctaaaggtgctgagtacaacaatgtttgcgttattgataatgataatttgctaaaaatgttgttaaatccagatttaactaatgaagaacaccgaattatttatgtagcgatgagcagagcgaaaaaaagactatttatccaactaaatgatttgacttcagcggatgaacaaaaattgaaaaaaatatataatgttgaaatagtacgactaaattaa

SEQ ID NO: 72154 - DNA, 2028 bp, Bacillus thuringiensis serovar israelensis ATCC 35646
atgcttttaaaagaaataattataaaaaattatagaaaatttaaaaatgaatcgttctcaatggctgatgatatcaccttgcttgctggggcaaacaatagtggtaagacgtccatgattaatttaatgggatcaataatgcaaagtggtaaaacccccttttgtatttcggacattccagtaaaattatcaaaaaaatgggtcgatgaagtatatgaaatatttgtaaggtgttttgatgaagatgttttatctacagttgaaatgattgtacatgaactatttggtgatgaattatctagtttaaaaggtgatttaataatacctgcaacactaatacgttttaaaatagaatatacggaaactgatgatattagaaaatttgctgattttattatggatttagatccggataataaaaacttctattttgaatatttgttccaaccaactaggaaatcctttagagaagcattggaggataattataacaaattgtatgcaagatataagaaaataaaatccttagaaggttcatcttcaaaggtccagcaatttaaagaaattatattatcgatatatgaagctagtattattgaaaagtgttactttagtgataggaattatatagataaagtagagattgatgtttcgatttttagaagattatttaattataaatatatcaatgcgggtagaccacttgatgatcaaagtaatggtaattttaaaagtcttagtaaaaatatgattgaacttgcaacgcataacagtaatttaaataccttactagaggagttgccagatcaaatactcagtcctatacaagatgcaagaattattgaagaggtaaggagtgcttcggttagaaatcttagtaatacagttaaaacgatttctaaagcaagtggaggaaatacgggcagcatgattcttgatatagacattaatgaggaaacaataacttctctccttaatcaaataactaacactaaatatcagtatgaaggttatattcttgatgaagcttctcaagggttaggttatagtaatatgatttatatacttcttcagttagaaacatatcaaagaaaaatagacccattagtagtgaatttatttgttatagaggaaccagaatcacatatgcatcctcaaatgcaaagaatctttgggaaacatttaaaaaaatactatcttcaaaaaaaaatacaaggattaataacgactcattctggagaaatggtgcgtctaactgaaatgaaaaaccttagagtctcaagaccactaaatcatttagaaagtaaaatttatgatttttcgatttttaaggagagcttgagtggcgatattactttggatacgttctatgattggttttatgaaattggattttcagaaattgtttttgcagacagagttattctttatgagggtgatacagaacgactgcttataagaaagttattgactttagatgcatatgaagagcttaatcaaaagtacatagcgtatgttcaggtaggtggtgcttatgcgcacaagtatagtaaggtaatcgatttcctgaaaataaaaacacttattctaacggatttagattataaaaaaggagcagtaactgtagaagcagtaaaggaatctaacacaacaaatgcaacaatcaatagctactataatgattcaaaagggacggatcttccaacagtacttgatctgtataaatggaaagagaacggtgaaaataacatgttcggaggactagctttactcagttatcaaggacaagctgaacagtacgctcgtaccttagaagaggctatgttatcaaagttttataattttaatgtattagaaaaaaagatagagctttttggattcaaagaagggatattgataaacttaaatatactgttccgaaccctgttaaaccaaatgaagataatccaaatccagataacaaatatagtattagggatattgttaaacatacagaaaatcgaaagactgattttatgtactcattga

SEQ ID NO: 72155 - DNA, 1809 bp, Bacillus thuringiensis serovar israelensis ATCC 35646
ttggctacagaaatagtggagaatatgttttgtgttaatgcgccagcaggtagtggtaaaacaacaaaaataaaatcaatgattgtaaatcataagataaaacatccaatagataatatactttgtataacctatacaaagagagctgcggaagagcttaacaaagattttaatgaagaagggattcatataagtacaattcattcatttcttcataaatttttaaaaatatatttttgtaagactgaaatgaaggatttatattttgaaatgtttgaggacttaatcaaagaaagtatagagaataaagaggaaaaagaacatatagttacaagaaaccaaaagtatattgaaaagcatggttgtttatcggtagagagtatcaaagcgaatatagatgctatttattataatgagtcttcgaacaatcatctttacacagggggattagcccatgatagtttattgttattcgcagaaaaggtgtttgataagtttccgaagattaaaatgagactaacgcaaaagtatcaatcaatcttcattgatgagtatcaagattcggctgctagtgtattaagaatgttttataaggcatgtcttaatacaaaatcaaacctctattttcttggtgacaagatgcaacaaatatataagaactatgatggatcatttgaagaagaattaaaaactttgaataccgatattaaattagatattaatcaccgttcaataccagatatcgtttctgtgctaaataatatatataatgataaggggtttaaacagaacccgtctaaaaaaaatcttgatattaaaccagaccatccaccaagaataataatgtgtgataacattcaagaaaggctaaaaagagagtgttcaatttatcccgatgctttattgctatttttattaaatcaacaaaaatttgcttcaattggtgcaagagaattatataaacaatttagtcacttggagagatattcacatgcaaaacaattaagtgccacggatgttttatctgataatactagtgaaaatacagatcctcttttaaaactactttttatagtcggagaagtggtagattattataaaaagtctaatgttggaagtataattcaaatttttaaagcgaatcgtaaattatttgacatggggattggtacaattactagtcatcgggatagaattgatttgaccaaactgttaaaacagctgtatgaagattatcataaagaaatctcgataagtgaatttttaactttattgaggggatgtaatctatttaaaagcagctatatagataacatgggcgatgaatatttggaagttttaaaagtgaaattaaatgaatttaaagcactatcaaattatttgcgaaatccagcagtctcaacacagcacggggtaaaaggagagagtcataatactgtattctttattgcagaagattcttttaggacgccaatagttcatatgcataaattcttaaaattatggactattaaggaattaacgttagattctctggaatctttttattatgattataataaatggattgaagatacaattagccacttgggatgtaaaatatcggatttaaataaagaaagtcacaatgaacataagatttatttaaaaacaagggtagagcaattatgcaagcattttgaggctgattttatatttaaggatttatgtgaagaatcttatagtaaatatattctcaatcccaatgttacaaatattaaaaagtgttttaaagaaagtactgtgtatggtgtaccttcgggcttataa

SEQ ID NO: 72156 - DNA, 1719 bp, Yersinia mollaretii ATCC 43969
atgaaaatcgactacgtctatctgcatcagtaccgaaacttcgctgaagcgtacatcaatctagccaagaacagcttggtgattggaagcaacgatgttggtaaaaccaatatgatccatgcgttgcgactcttgctcgacaagagtttgtcagaggctgatatcgagccgactgcacgtgatttccattgtgggcaaaatggcatgcaggccgattattttatgattcgagttgcgttctcagaagtaactcaggacgccgttctttctcagctcaagggttttgtcagtgctacgggccacttctttcttgaatttcgggccaccagggcgaaccatagctatgaaatcgctgcaggctatgacctctcagcaatggaggttattcctagtcgtcactacctgaagcacctccatctgaagtacatccactctcagcgggaccttgtgcggtacatccgttcggagaagcggcatcttttgcgtcttgcgcaggaatcacgcgacgatgcccaagtggatgccgatgccatacagctacagacacttgctaggctgctggaatcagtaaactctggcgtgaagaacctgcactacgtagcagaggcgaccagagacctaaacgatgaattgcaggctctctcccaccatcacatgggatacaacgtttcactggataccggagcaataggtatcgagcaattcatcgagcagttggaactgggggccagcaccaatggttctcgtgtaatgctcgggggtgacggccgcaataatcaaatcctgctggctttgtggaaagcaaagagtgtgcttgagcatgaccaagacagcgaggtggtgatctattgcgtcgaagagcccgaagcacatctgcaccctcatcagcagcgcaaacttgcaagctatctcatcagcgcgttacctggtcaaaccatagttaccacgcattctccgcagattgctgcaagctaccaccccaactcgattgttcgcctattgcgtagcaacggagcgtcccgagcggcaagtcaaggctgctctgattgcatcaatagcgcatggacagggcttggctacagaataagcattcttccagcggaggcgtttttctcctcagcagtcatgttagttgagggaccttcagaaatgctgttctatgcagcactagcacgtgctcatggttacgatcttgatcacagcaatgtatcattgttgtctgttgatggtgtggcgtttgaggtttataagcgcgtgttaaacgctttggagatcccatgggctgcgcgaaccgataatgacatctccgatattctgatcggccctcgaggggcgcaagaggtgcgtcgcaacctcgcgggcatgaaccgtgctctatcactagctggtatgcctcctcagccacaccgttctcaaacatatgatcatgctgcatcgttggctgacggcacttggcaaacagtcagtacctccgtcgccccccacggcatcttcctttcgcaaattgatctggaaaatgacattgctgccgaactcccgacactgttgaacgggttcaaaggtcatgaattaattcaagcgatcgcttacatgcaaggcaaaaaagccatacgcatgcaggagttcgttgagcactgcggaccccagctcagagttcaaattaatgggcatctgttaaagccgttgctccattgcatccaagctgcagcgcaggtttaa

SEQ ID NO: 72157 - DNA, 1629 bp, Yersinia mollaretii ATCC 43969
atggctaccttcacgccaagtgcagaacaaaaccaagctattcaatacgagagcgacatggttatcaccgcccgtcccggcagtgggaaaaccagcgttctgtcatgcaaggttcggaacatggtgtctgagctacgtccctaccaaggcatcatcgccatttccttcacaaacaaagcgagtgacgagctgggtcgccgctgcagagccgacgctttcgacgtgaagagttctttcttcggcactatcgacgatttttgtcttcgagagatcatctttccattcgcgcggcagttgatgtctgcggccgctgaggtcaagactgtcaagatcagggaactgcccgactcggtgacacgtatgctaccggtgacgccgcttaaggacggtagcgttaccaacacaattaagttcctgccgttcatacagcaggcactagccttaggtttcgtccccttagaagcagtaggtatgcttgcccactacgtggtcggacggtcacttgcctgccagaaatacctcgtggcacgttatcgagcagtctatattgacgaatatcaggacagtggatactttcagcatcagttatttcaaaagttgaaggaacttggtttgacagctgttgcagtcggcgacaatgaccaatctatttatgcatttgctcaaaaatcccccaaacatctactagcacttacagcgcaaggcagcggctttgagcatttttctatcactactaatttccgctgtcatccgtccatcaatgattttgcacttcgtctgctcaacccaaaccatccaatcacgccgacggacaatatgcgggtgttaatcaagacgatcaatggtgaccaacgtgctatgggtctctggttagaaaccgccatacctcatctagtggatcactatcaaattgcctcggcggaaagagtggccattctctgtcggcatcagcattcggcgaagttgattgctaatcatctgagactttctcaccgacttgtcgaggataatcctttcgaggcagcaccaacgaccgaagcaacacttttttctgatttgctgaaactgcgttacgacccaaggatgactgccgagtctctgattgatcgagctggtaaactaaatcgaactacacaggagctgcgcgcgcttcgtcgagcgattttaagttgccgatcttgcttagatggcgatctcattgtgagagtgttagctgcggccgcaagcttactaagacaacaaccttcaccagtcgctgtgactgagcttgagagtgtttgcggtgataccgccaagcttcgctggttccaaagacccagcgacaatgccgttcagattatgaccctgcacaaggccaaagggctggaatttgaccttgttttccatgctgatctgtacgatcacgttattcctacacgcctctatcctccaggaacatttggtcaggttatctttgagaatgaaactcaatgtttaaatctgcattacgttggggtcacgcgtgcgattaaagcttgcgtgttgatgacatcgaactatcgcatcaatgggcaaggaaatgttaagaacggtgatccctcacagttcattggtaggaacggcgcgattgctacacccatcatttggtaa

SEQ ID NO: 72158 - DNA, 1905 bp, Yersinia intermedia ATCC 29909
atggagcttgaagtaattcggatatctggtttccaatcttttggcccagaactgacagaggtaagtcttgaaaatatcacttacttaatcggtcctaatggctcgggtaagaccgcgacacttcaggctttatgcaagctatttgcatttaatcctgcattgcgtcggatccatcgttcagatttccatgtcccttatgatgaagaagaagttccagaagagcgccaattgtggatagaagctgactttttatttcctgaacttgatgaggaggatgataacagtaccgtagcacctcattttagtcatatgcgacttgatgatccgagggggctcccacgtgtgcgttttcgcctcactgctactatgggactggatggtgatatcgacgaaaacttagtatatgtactggatgtcaatgctgatggttcacctcaaaacacagctcaagtaccacgagcagagcgtaatcatatccaagttcattatttacctgccagacgtgaccctgctgatcacattacttatggcgcgaatgcgttactaggccgtttgctccgtgccgtacactgggatgctgagcgcgatacgatcaagggtctgacagatcaaataagcgacagccttgcagcaaacccttcagtaaatgcatttagtgagagtttgaaaacaacctgggccactctacataaaggcaaattttttgctgatccaaaaattacatttgtggcttcggaaattgaagcgctgctgcgacatttgtcggtttcttttacccctgggcacgacggtccacttgtcgatttctcgcggttgagtgatggccaaaagtcaatgctttatctttccctagtattatcatcccaagcgattgggagagctgtgctcgccgaggaagatgtatcttttgatcccgataaattacgtccaccggtctttacgttagtcgccttggaggaaccagaaaatagcctttctccacattacttgggacgtatcgtcaatgccttgaataccatgacgaaaaatgtggatgcacaagctctcattgctacacatgctcccaccatgttgcgtcgcgtagcccctgagttaatacgttatctccggttaactgaagctcgaaagacaagggtcaactgtattaaattgcctgagaaatctgatgatgcacacaagtttgttcgggaagcagtccaggcatttcctgagatctatttctcgcgtctggtagtgcttggcgaaggtgatagtgaagaaattgtattgccacgtttgcttcaggcgaaaggtgcgcaggttgatgagtcagcagtcacgatagcaccactgggggggaggcatgttaatcatttttggcgtttgctttcagtattgcagattccatatttgacacttcttgatctcgatgtagctcgttatgcagcggggtggggccgaattaaatacgtcaatgatcaacttattgttcatgaaccggaaaagaaactccccgaggatcatggtatccccatttggaatagtgacacttataaggttcgaaactaccctcactactttaatcttctcgaaaaacgcggtgtcttcttttcgtatccaatggatttggacttcgccatgcttcttgcatactccaaggcctataaagtcgttgaggaagaacctgatgcctctacgctcaaagcagtacttgggaaaagtcattacgattcatctcaatacagtgaaaatgagttaaagttgttcagtacttatcatcagagtttcaaacttggcagtaaaccagcatcccatattgatgcgctggccatgctaaatgacgaggaattacttgaaaatatgcctgagtcactaagcaggctggcagatggagttattgccaaactcaaggagctgccagaatga

SEQ ID NO: 72159 - DNA, 1638 bp, Yersinia intermedia ATCC 29909
ttggaaccaaatgcaaaacgagcagcaaaagcacgtaagcgctgcttggcactcacagccggacctggtgcaggtaaaacggaaatgcttgcgcaacgagcagactttcttttgcgtacaggaacatgccggtaccctaagcggattctagcgatatccttcaaggttgatgccagccgaaacctaaaagagcgtgtcgaacggcggtgcgggcccgatcttgcctcgcgttttgatagctataccttccatgcgtttgccaaacgtatcatcgatcgtttcaggccggtgctcacggggaaaaatgctctggatgcaggttatacaattgtagacaagaaaaatggcccttcgcgtactcaaattgaattcggcgatctagtcccgttggcaatccagatattgcaaacctcaaaaattgcccgaaatgcaattcggaaaacttacagcgatattttcttggatgagttccaggattgcacgaatttacaatatgacttagttaagcttgctttccaggggactagtcttcgccttacggcagtaggtgatactaaacaaaaaattatggcttgggctggggcgctggatggtattttccaaacctttgccaatgattttaatgctgtaccacttaacatgtatcgcaatttccgttctaaaccaaaattgcttcgggttcagaatgaaattattcgtacgcttgatcctgactctgtcatgccagatgaacaattggatggcgatgaaggtgaggtttatgcctaccgttttgaagacagctgtaaagaagccatctatttagctgatctaataaatagttggataaattcagaacaattaccacctgcagaaattgcagtcttggtttccaaacagttggaactttatgctgaccaccttatgattgagttggaagtacgcggtattccatatcgtaacgagcaacaattgcaggatatcactatagaacctgccgcacgtttgatcgtagattatttatcatgtctctatggtaagcgtgaacctaaggcttggattagattgatgaatcaaatgattccttttgccgatgaagaaatacagtcaagtgcgaaaaaggatcttgatcaactaattaaaaaacaacgtaaaaaagtatctgatgctaggcatacagactcacctttttcagattgggtacaattggcaatagagtttctgaagtatatcggctccaaaatgctggttgctttatcacctgactatgaaactcgttcgcgtttaaatgatgttatccatgaaacttttgcgcgggttaaagaattgctgaagtcagaaccagattttccaaaagcgttgggacgttttgcggatgatcaggctgtgcgcattctgaccattcataaaagtaaagggttggaattcgactctgtcattatcatggcggttgaaaacgagattttctttggcaatcaagatgagaatcgttgcgcttttttcgttggtgtttcgcgagcgaaacgacgattgattctcacacatgccgatcatcgagaacgtcctgctaacgctggccgttggaatattagtcgaactgctcaatctgagtattttagttacgtcactccatttgtagcgggtaaaaatcttaagtaa

SEQ ID NO: 72160 - DNA, 1830 bp, Streptococcus suis 05HAS68
ttgacaatttgggaaaatataaaaaaggttgcgtatacccctgactcggaattagaacctattttaggaataaaccttcaaatttggattcagtactcagaagaagattcttatcaaaacatccagccacttatgatggatttaaatcctgataataattatattattcttgatttttcgtatatagtccctatttcgagacttcatgacttaaataccgaaataagcaatttttcagatgatttttcaaaatttgagtcatttatgaagaagagcatgagtaaattttttgagatgcagattaactcacggggatataatcctgatatacagaaattgacagaagaaaagtctgatttacttgaaatgaaagatattcataaacttattaaaataagagggattagagctaatcgagaagtatcaaataaagaaaataatcattcattatctaaaacatcaaatctattttataaatcaaataatggtgatgatattgacaatgctacaaaaaatttacttcaatctgcaattacagaggcagatgaagctttaaccaaggcatatagtggtgatggtgaagacgatggggttttcacctcgatctttgaaagagtaaaaaaatttggtggaaatgatagtgaatcagagttggaaattcattcatctctttctgagaaagacattttgagtaataatacaacactatactataggcatgacgatagtttattaccagaaacatacaatggtttgggatatttaaatctatatgggatgatttttgaaatagagacgttgatggcagatatcaaaaataatcctgctgatattaatttagtttatattgaggagccagagtcgcatacacatccacaattgcaatatgtttttatcaagaatattaaaggtttgctgaaggaacatgatgatgaactaaaagcaagtggatatactagtggtattcaaactttaattacaactcattcatcacacatagtgtctgattgcaactttgatgatttaatttattttaagcatgataatggcacagctatatcaaaggcttttaattcattgaaagaagaatatgaagatgataaacttgggtacagatttgttaagcagtatttgacactcaatagtagtgaactattttttgctgataaagtcatttgtattgaaggtgacacggaaagaattttactgccaacaatgatgcaaaaagtggatatagcaactccaatagaacaaggttcaaatataatgccattactttctcaaaacatttcaatcattgaaacaggtgctcattcacaagtgtttaggaaattttttgactttttagggataaaagtattgataattactgatattgatcctgtaaataaaaatgaaaagaatcgttttatcgcttgttcagcagtaaatgctacatctacgtcaaatacttctcttaaaagtttcttcaatatttcaggagatggaattttttcaacagtaactcaaaaaagttttgctgaaaaaataacaccagataatagaatccgtattgcatatcaaattcccgaagataacaatggttatcagcctgctagttttgaagattcctttatcggtttaaataaagaattcattattaaacaaaaagatggtcttattgaatatgaagctttaaaaaactttgatgacgatgaaatagaagatttctatacatttgctaggaataaagtgaacaaaaagtctgcctttgcatcaagtttattatactttgaagatgaagaaaatacttggaaagtacctaaatatatttcggagggattattatag

SEQ ID NO: 72161 - DNA, 1794 bp, Streptococcus suis 05HAS68
ttgattgaagaacctaaaaaatcaattgtatgtattacctatactaataatgctgttgcagaaattaaatcacgaataattaatgataatttatgggtatcaacaattcatgagtttatctggcatatcattggaaatttccaaaaagagattaaagaatgtcttgttgagttaataaatgatgattcacaaaagttatttgtttcaccaaaggatgtaattgaagaagaaagtatttcacttgattactttgatgatgtccgtgttgactatgctgaatggtactctatgagtataacagagcaaaataaagtccaaataagtcatgaccatattctaatagttgccgaaaaaatgttttcaaaatataagaagttatgtgatgttttagcggatactgcaaactatatttttgttgacgaatatcaagatacaagtccactaattgtgaaaatattattagagcatcttcaaaagagtactaagaaaaatgttgtaggcttttttggagattctatgcaagctatttatgattcaggggtaggagacttaaattcttataatttggcaaagatacaaaaaactcaaaatcgtcgtaatcctaaaaaagttattgatttagccaataaagttagaaatgatggtttagttcaaactccatccaacgatgatacggctcccaatatggacgatgggagtgtcattgctggaacagtgaaatttgtctacgggaacgatattaatcaacttgatgttcttagaaatagtaaactatataaagctttagaatttgatatagctaaaaaaacaaaagaattacgtctgacacataaacttaatgcagaaatggcaggtttctctaagttatttgaattatataatactgatttatttgtgaaattaattacaggtataaagaaaaaaatcaatgaaaataagatagctgataaaggaaaaacgtttgaagaactggtagaagaggctaaaatagctgtcggaaagggaggtccattaataattgatgtggttaattccatcccagaacttttggctttttacgatgaaattaagacgtgctcgtttgaagaagttagtaataagagtaaagttaataaagaatcgctgttagcttataaatttaatggattaagtagtagatatgaagcgggcacagatagggataggattcttaaaaggttagatttaatctatgagctattagagctgtataaaacaggtaagcataatgaattcttacgtattactaaatttaatataacttcatcagaagataaaattagtctatctaaagttatgacaaaaatctctgttgatgatattacaattggaaaagtcatagaacttgcagaggaaagtggattaatttcaaaggatgacttatttactaattttattgaaagtaggggacattatttatggtcacgacttaagataatgccatttcaagaatatgtaaatagtattgcttatctcagagaatatgtatctgttataacgcagcataaggttaaaggtagtgaatatgataatgttttagttttattagataatggaaaatggaatcaatataattttgatagcctatttggtaaaggttcagttaatgagaatgtccaaaaaagaactaagaagttattctatgttgcaattactagagcaatgaaaaatttaattgtttacatgccgagtaatgatagtcagattattcaaaaagcacaagattattttgaaccaattgatattattgatgttttgtctttagttgatgagtaa

SEQ ID NO: 72162 - DNA, 2073 bp, Listeria monocytogenes F6900; identical to SEQ ID NO: 72152

SEQ ID NO: 72163 - DNA, 1425 bp, Listeria monocytogenes F6900
ttgttgaagcaattgattggatgtgattctattttgataattgattcaaaaacaattattaaaccaaatctagagtttaaaattgaggccggtcctggtgcaggcaagacagaatggctaatagcccatataataaatgttgtacaaaactccgatatactattttcaacaagaaaagtagcatgcataacctataccaatactgctgttgaaactattctaagcagattgggtacatcattatctaatcgtgttgaagttacaactattcatagtttcttataccgatacgttgttaagccatacagttcattcatcccagaaaaataccgtgtaaatatttccgagttaaatggtcatgaagacccatttatttcttataagcatttaaaagaatggcttgctgatgattcgttcgataaattaaaacatccaagtactaagaagcaactactatataacgaacaaaactatgcattaagaaattggttattatcaatgaaatgtacattaacagaatcgtcagctcaatttcaatgtgagaattcaaaagcattctatgagggaaaaagattaatcagtaatgctaatttaaatattttgaatgcagaattaattaactataaaaaattatactgggcatctggatactttgaccatgaagacattttatttttcagccatatattaatagaacataatccttttattttaaaagtattatgcgcaaagtttccatatctttttattgacgaattccaagatacaaatcctattcaatcattttttgtaactaaatttcgtgaaagtggcggcatcgttggagttatcggagataaagctcaagcaatttacggttttcaaggatctgactcttcacaattcgaaaacttcccaataaaagaacattgttcctataaaatacttgataatcacagaagttcgactgatattgtaaactttttaaaagttatcagaactgatttagaacaaataaactgtgtgaaaacacaatctgataaagttatcattcatgttggttcaagatttgaatcatataattatttaaaaaagattgtagaaaatgaaaaccttgtttcactttcaagagacaatattacttcaaacgcaatgaaaactaaaattgaaggaaatagtttgaataaaaaaatactaaaaaattacagagaagtagatagcaataatgatagaaagagatccatagaagcatatatacaagcaatagagcttgcaaataatcaaaaatttaaagaagcaattaagattatagaaaatctatataagaaccaaaagaactcgaaaaaaaaatacgttaaaaaatttaattggtatgttgaaaaaaaactctatatacaaagaagcaacattgaaaatcttttacgacgttttaaaagaagtaactga

SEQ ID NO: 72164 - DNA, 2073 bp, Listeria monocytogenes J0161; identical to SEQ ID NO: 72152

SEQ ID NO: 72165 - DNA, 1734 bp, Listeria monocytogenes J0161
ttgataattgattcaaaaacaattattaaaccaaatctagagtttaaaattgaggccggtcctggtgcaggcaagacagaatggctaatagcccatataataaatgttgtacaaaactccgatatactattttcaacaagaaaagtagcatgcataacctataccaatactgctgttgaaactattctaagcagattgggtacatcattatctaatcgtgttgaagttacaactattcatagtttcttataccgatacgttgttaagccatacagttcattcatcccagaaaaataccgtgtaaatatttccgagttaaatggtcatgaagacccatttatttcttataagcatttaaaagaatggcttgctgatgattcgttcgataaattaaaacatccaagtactaagaagcaactactatataacgaacaaaactatgcattaagaaattggttattatcaatgaaatgtacattaacagaatcgtcagctcaatttcaatgtgagaattcaaaagcattctatgagggaaaaagattaatcagtaatgctaatttaaatattttgaatgcagaattaattaactataaaaaattatactgggcatctggatactttgaccatgaagacattttatttttcagccatatattaatagaacataatccttttattttaaaagtattatgcgcaaagtttccatatctttttattgacgaattccaagatacaaatcctattcaatcattttttgtaactaaatttcgtgaaagtggcggcatcgttggagttatcggagataaagctcaagcaatttacggttttcaaggatctgactcttcacaattcgaaaacttcccaataaaagaacattgttcctataaaatacttgataatcacagaagttcgactgatattgtaaactttttaaaagttatcagaactgatttagaacaaataaactgtgtgaaaacacaatctgataaagttatcattcatgttggttcaagatttgaatcatataattatttaaaaaagattgtagaaaatgaaaaccttgtttcactttcaagagacaatattacttcaaacgcaatgaaaactaaaattgaaggaaatagtttgaataaaaaaatactaaaaaattacagagaagtagatagcaataatgatagaaagagatccatagaagcatatatacaagcaatagagcttgcaaataatcaaaaatttaaagaagcaattaagattatagaaaatctatataagaaccaaaagaactcgaaaaaaaaatcgttaaaaaatttaattggtatgttgaaaaaaaactctatatacaaagaagcaacattgaaaatcttttacgacgttttaaaagaagtaactgaagaaaaaatccctggttttagaaaaggagcaatagaaaaattttataatataactaactatgtggatatagcgatatgcatgaatattgttgatgataatagcaaccacatcactatacacaaatctaaaggtgctgagtacaacaatgtttgcgttattgataatgataatttgctaaaaatgttgttaaatccagatttaactaatgaagaacaccgaattatttatgtagcgatgagcagagcgaaaaaaagactatttatccaactaaatgatttgacttcagcggatgaacaaaaattgaaaaaaatatataatgttgaaatagtacgactaaattaa

SEQ ID NO: 72166 - DNA, 2073 bp, Listeria monocytogenes J2818; identical to SEQ ID NO: 72152

SEQ ID NO: 72167 - DNA, 1767 bp, Listeria monocytogenes J2818; identical to SEQ ID NO: 72153

SEQ ID NO: 72168 - DNA, 1788 bp, Comamonas testosteroni KF-1
atgagggtttctcgggtcaggttgatcaatttcgccaatttctcggatgttgatgtcgagacgggggaaagtatcgtcatcgtgggagagaacaaggttggcaagagcaatttcattcgcggcctgcagttgatccttgatccgggcttgtctgagcgcgatcgacaactggggcttgaacatttctgggacggacttggcgaagacaaggttggtgcgaccattgaggtctctgtggatctaacggacttcacaaacgatccccgactgatggctcacctcaacgattgcgtgattgatcctggcccacccatggtggcccgactcacctaccgcttccagcctaaggcgggcctggggcgcgctccggaatcgttgaaggactatgagtatgtgatcttcggtggcgacgatcccgacatgcgtatcggcggcgcactccgccggatgttgccaatagatgttcaggtagccctgcgtgacgctgagaaggaccttgcgagctggcgcaattcgccattgaggccgctcattgaggatcttgccgcgtcgttggatgatgacgcccgtgaggagattcaggatcaggtcgaccaagcacagcgagagctggctggacacgaggaagtggtagcgacagcagaacggatcagcgaacggctgatcgccatcgctggggggcaacatgccgttccggtatcgctcggacttgcaccaactagagtcgacgcgttgctgcgcagcctgcggctgctgatcgacaacggcgtacgcggagtcggcgatgccagtttgggaaccgcgaacctgatcttcctggcgctgaagagtctcgaactggaccgcctcgtttccgatggagagcgcgaccacaccttcttcgtagtcgaggagcccgaagcgcacctgcacccgcacgtgcagcgtctaatctatcgttacttccttggcacgggggcggaagatggtgaggaacagccaccgcttacgacaatcctcacaacccactcgccacatatcgcaagcgttgcgccgatcagatctattgttctgctgcgccatgacacagcggaaggcaagactgtcgcggtctcgacagcaaacgcacctttcacgcagcgggatgaagaggatcttcaacgttacattgacgtcactcgcggcgagattttcttttctcggggggtgattctggtcgaaggcgacgccgagcgcttcatcgttcccgcgtttgccgaggtactcgatattcccctcgatatgcttggaatcactgtgtgctcggtgggggggactaacttcaccccgtatgtgaagctactgggccctgaaggactcaacattccccatgtgatcctgacggaccgggatccaaccaatggtaatcatccattggttcgcaggcggcttatcaatgtccttgacgtgattgagggcggtgtcgatcacgaaaacttggatgcggatgaagtgatcgagcttgccgagcagtacggatacttcgtcaacgagaacacgttggagcccgaactatttgcaggtggactggcgcaggacatgcaggaggtaattcgggaggaactgccgcgattaaggagagaaactctgaatgccttgcagcagtgggtggacgatcctgatcaggttgatgaagactggctgctcagattgatcgagaggatcggaaaggggaggtttgcgcaggcacttgcaccgtcggtgtcacaggacgtttgtccggcttacattcgttccgctctggagcatatccgtgacgccatcgcgtag

SEQ ID NO: 72169 - DNA, 1494 bp, Comamonas testosteroni KF-1
atgccgtatggacgcctggccggcctgcccatatctttcccactttcggtggccactcaacgagtcagtgatcggttgttgaagcaaactggagatgcgcttttcggccagaaccatccgtacaaagttattgacctcggacggcatcgccgttccgtgctcaatcgaaatagcgtcgcttggcgtagcgaggaggaactcgctgcctgggccgagacctacgaggccgctctgcgcgacgaggggctgattgactacgatgacatggttgtcttcggccaacgtttgatcgccgagcacgactgggtactacctctggttcaggcaaaattccccgtgctcgcggtggatgagtaccaggatttaggtgtagcactgcatcgcatcgtcaaacgccttgccttcgacgggggtgtccgacttttcgctgtcggggatgcggatcagtcgatatatggatttacgggggctgatggcgcgttgctcatggaattggcggctcgcagagacattgagcctgtccagcttcaattaaattaccgttctggtgcagggatcgtgactgcgtcagagatggcgcttggagaagcccgaggctatcaagcgagcgatcctgcgcgacaaacgaccatcgaatttgtcctgcgcccgggtggtacggcggaccaggctgcgcacgccgtcgcgcagatcattccggcggccttagcctccaagccgggacgaacactgggcgatatcgcgatcctatacaaagactatcgcgcaggcgatatcgtggctaaagctgtggcaaccggcggtctcgattacatccgtgtggataccgcagcaccttaccgcaaggttgccctaacaagttgggtagaagattgtgcggcgtggtgcgcgggtggctggcgtgttggacgcccacaattgcgtggactactcgaccgctatcgcgcatttcatcgggcgagcttggacgattcacaggccaagcgcgaagagcaagagctaaccgccttgctatgggagctgcgcgctgaccagcaacctgcgcgagaatttgttgcttcgttgcgcaacggtgtagtggatcatctgctggcggctgaattggcgctcgctgatcagaaagagcaactggatcgcatgacggcagcgctcgccgaaggcggtgcactggcttcgctagacatcactagtttgggcggtcgggacggttcgcccgatcacctgaatctgctgacactgcattccgcaaagggctgtgagtacgacgtcgtcatcatggttggactcgacctcggaaatctgccgtggcgcaatgaaactccagagaagttgcgcgaaagtcgccggctcttctatgtgggactcacacgtgctcgcgacgaggtccacatgctgtattcgggcttcgttgatggccgctatggccctatgcgctttgggcgctcgccattccttgatgagctggaggcgcgaatgcgtgccgctggcatttga

SEQ ID NO: 72170 - DNA, 1272 bp, Nodularia spumigena CCY9414
atgaaagtcaagcgcctaaaaatgcaatccttccgtggaatcggcgatttgacgttggattttaatcaaaatgaaccaacaatacttattggtattaacggtgtaggtaaatcgagtattattgagtgtctcgctattcttttgtcacgttttactagctctattcaacactctacgccttcaggaagactctttacagaagaagatattactaatggagagaaggaaacacataacgaggttaatatttcatttgattctgaagaaataacatggtctttgacaaaagtcaaaaaaggacgtaataaagatactagcagtaacctatcagctatgacaaaggttgctgaaaatataaaagaaaacttacatatatctcatatatttaatattcctattgtagtttattactcgacgaatcgtgcagttttagatattccattaaagattcggacaaagcattcatttgaacaaatagatgcctatgaaaatgccctgacaggaaacgcaattactggattaggaagtgagtttagaattttctttgaatggtttagaagacaagaagatttagagaatgaattgcgtctagaaaataatgctgcttatagggataagcaattagaagctgtgagacaagccatatcttcactgattccagatttttctaacttacgggtacggcgttctcccttaagaatgactttacaaaaacaaggcgaagaacttatagttaatcagctatctgatggtgagaaatgcttgctggcaatggtgggagatttagctagacgtttagcaattgctaatcctggtttacctgacccattgcaaggtagtggtattattttaattgatgaaattgaactgcatttacaccctaaatggcaaagaggaattattccagatttaacaagaacatttcctaattgtcaatttattgttactactcattccccccaagtaattagtgatgtgaaaccagaaggaatttatcttttagaaaaaacagatcaaggtgttatcgccaaacaaccagaaagttcctttgggagagatagcaatcgtattttagaagacttgatggatgttcctgaacgtccacaggaaattaaagacagtcttttagaactgtttagaatgattgatgccggtaatttggaaagtgctaggaatttacgtcaacagttagcgaatgaaattggaatagatgaaccagagtttgtgaaagcagatgtactcatccgacgcaaggaaattctcaatcgatga

SEQ ID NO: 72171 - DNA, 2325 bp, Nodularia spumigena CCY9414
atgacaacaactattgattttctcagccatctcaaccccagccaacgtcaagctgtcgaacattactgcggtcctttgttagttgttgctggcgcgggttcggggaaaacacgagcgctgacttatcgtattgctaatctgattctcaaacacggtgtatatcctgagcatatcctggctgttaccttcacgaacaaagccgcacgggaaatgaaggaacgcattcaaaggctgtttggtgaagatttggcgatgaaaaaacatggtcaaaaatttgatttgttgacagaataccagcaaatgcagttgcgatcgcaagtctacaaaaataccatcaaagacttgtggtgtggcacttttcacagtttattctctaaaattctccggtttgatatcgacaaataccaagacgaaaaaggcagacgttggactcgcaatttctcgatttttgacgaatccgatgtgatcagtctgatgaaagaaattgttaataagcagctaaatttagacgataaaaaatttgatgctcgttctgtgcgctacgccatcagtaacgccaaaaaccaaggcttttcaccccaggagttcgagcgcgaacagccgaattatcggggaagagtcatcgcccaagtttataattgctatcaggaaaagttagcagaaaataacgctctcgattttgatgatttaattctcgtccctaccagattatttcagcaaaatgaccaggttttagattattggcatcgcaagtttaaccatatcctggtagatgaatatcaagatactaaccgcacccagtatgatttaattcggctgttggtgactaatggcgaagaaagcaagagtgcatgggaatggcaaaatcgctctgtgtttgtggtgggtgatgcggatcagtcgatttacagtttccgaatggctgatgttaccatattattggaatttcagcaagactttggcgatggtttagctgatgatgatacccgctcgatggtgaagctagaggaaaattatcgctcttgtgagaatattttgcaagcagctaatgagttaattgaaaataatactcaacgcattgataaggttctcaaaccgacgcggggaagcggtgagcagatttattgtcataaagcagataatgaaattgaggaagctgagtttgtgattgggcaaattcgcaatttagcacagcaaaatcctgagttagactggggtagctttgccatactttatcgtactaacgcccaatcacgaccttttgaggaattgttagtcaggtatcaaattccttatacagtggtgggaggaatgaagttttacgatcgcaaagaaattaaagatatcatagcttatttacgagcgatcgctaatcctgctgatacagtcagtttattacgagttatcaatactccccggcgcggaattggtaaagccaccattgaaagcttagttaacgcctcctatgagttggggacacccctgtgggaaatactcagcgatgaaacatcagttaataccttagctggacgttcggctaaagctgtgaataactttgctaaaatgatcaacacctgcaaagcacaagccgcaagggttccagtttccgaacttttacaagaactgttaaatgagtctggttatattcaagacttgcaaaatcaaggtacagatgaagccgaagatcgaattcagaacgtccaagaactttacaacgccgtactgcaatttcaagaagaaagcgaagacgtttctctcacagcttttctgcaaagtagcgccctcagttcggatttagataatttaaaggacggacaaaaagctgtatctttaatgactctgcactcttccaaaggtctggaatttcccgtagtctttttggtgggtttggaacagggattatttcccaattaccgttctatcaataacccagagtccttagaagaggaacgccgtttgtgttatgtggggattactcgcgcccaagaacggttatatatatcacacgctcgtgaacgccgtttgtatggttcacgtgaaccggcgatgcgatcgcaatttctggacgaattaccagaagaactattaaatacgcggaataaaggtcgtcatacgcagacgaaaactgctgctaaggctggcggtaagccttatacaccccataattggcaagtaggcgatcgcgtcttacataaatcctttggtataggtgaaattacgcacgtcttcggacaagataataaggtgtctgtggcggtgaaatttgccagtttgggacagaaaattgttgaccccagaatagcgcagttgcaaagagttgactaa

SEQ ID NO: 72172 - DNA, 1758 bp, Streptococcus pneumoniae SP6-BS73
atggaatttaaaaaactagtaattgaaaattttcgtaattttagttctattgaggttgctttatcaaataaaaatgttatatttggaatgaatgattcagggaaaacaaaccttctatttgcaataagatacctcttggacagaactatacgaaataaaggttttattaaatcggattatcatagacatgatactagtagacctataaaaatacaacttgagcttgatttgtctgatagaaaaatggagggggatgaagaatcactaaaatcttcacattctcgtcttctaatttcaacggtagctggagcaagaaataactctagcttagatacattctttatctcattagaagcagtttataatgagaaagagttatttggaaatccggtattaagctggggctcaacactagataatttagtggaagttcctcaatatggtacaagaagtgacattgataaaatattccaaatagtttatgtaaatcccgctatagagttagattccttttttaagcgaaatagaaggatattgttctctgatgattctaaaactgatgaggatgtaaagcttgaggaagagattgagaataacattgaaaaattaaatgaaaatatttctaacttacatttgattactagtgttcaatcacagttgactgaagcctataaaagttatcgtaaagaaaatttagaaattaaaattcaatcagagatatctatttcaggatatttagacaatctcacaccatacattaactggaatgatgatactcacaattatccgacgtcaggagacggtcgtaaaaagcttttatcatatgctattaaccatttaatttcagagaaacaatacaacaagaaggtaattatttatttaattgaggagccagagaatagcttacatcgttccgttcaaatctctctttcaaagcaactttttgttcagaatatttatgaatacttttttctaacgactcattcagcagaagttctttatgaaatggataatactcagctcattaagataaccaatcaacaagatgcaacagggcaatcagtctattacacagttcctaatgaattttcaaacttaaagaaaaaattaaataaatcgttggctcagtcaatcttttatgataggattcttttggtcgaaggtccatcagaatattatctattttctgctatttttgaatatgtaagtcccaatttcgaggctgatggaaaatacttattacaagttgatggaataaattttaaaccttattcagagctatataaggcattagggattgatttttggattaaaactgataatgatttaaaagctagtcgtggagataaacatgtattttctcctattggcttaaataggtgtattgacttgcttgatcatagtgcgactcctatattagataattatcgtatagatttctcttcaaaagatgagagaaaacagaatataaagtctaaaaaagaagaattatatttgactaatcataatctagtattacaattaaatgcagatggaatctttatatcggaaattgatttagaaaatgatttagctcaggttttatccgatagcgagagaaatgaaatgagtaaattagattttgtgaattggttacaaagcagtaaacaatacaatatgctagaatatataagtaatcatcttactaaagagattgcgcttaagattgtggaatcaggatattttaaagttttggcggagtttttagactatgagtga

SEQ ID NO: 72173 - DNA, 1539 bp, Streptococcus pneumoniae SP6-BS73
atgagtgatattgctacacaggacaagaatgtcaaaaaagaattgttagaataccaaggaaatattttaattttagcgaacgcaggttcgggaaaaacaacttttttaactaaaaagctaaaaagtgattctaaacgattaaataattatcaaaaattagcagcaataacttttactcgaaatgcaacggaggaaataaagcaaaaattagttgatattccggacaacgttgttgtatcgaccatagattcgtttttagataaagaaataatccttccttttcttaatcagaaatacgaaattcaaacatctgtacagtttagctttcggatagaccataattttagcgactatagcactggaataaaacaaatattgcaggatggtattttcgggacttacgactttcctacttctaaacacggcaagaatttcaaatgtgaagttgctttagatattttgaagacaatagattctgcgtcagaatatataaaatataaatttaatactttgtatattgatgaatttcaagattgtgaccagtctatgaatgatttatttctgtatctaaaaaatgagttagggattcctttatttattgtaggagatgataagcaatctatttatcagtggagaggagcatcacccaaatatataaataatttatggaaaaacaaaaatgattttagaaaaaagagatttattgggaattttagaagtttgcctagaatagtggatttctctttagctctgactcctgaagtgactgtcgataatattagagaagagggttcaattctatatttagaacctaatcaggattatccaaaagaagatattattaagtaccttattgataatggtgatataaatttacaagaaaagaattattttttaattggaattaataaagatattgaagaaactgcgacacatttgaatgatattctttcaaataaagttgattacgttagaaaaaatccatttatagattgtactaacagtaattttttgcaatctatggctcaatattattttcttgaagacttttctgagtatgatgtattgaataatctttttcctgaatataacgatgaatttaggaaagaacttttaaaaaaattaaagaggcttcgtcaacgacctacacagtcacttattgaggaaatagcttcgtatttagatgtttcaattacaaattatgaagataagttagaaagtcaaatactgttggaaattttgagtaatttggataataaaaaaatgtttgatacaaatttaatgagtaataatttattaatgactactcatgcatcaaaaggtttggctgcagacactgtagtaatttttgtagaatatctaattgattggcgcacaggattgaaatttgaagatcattatgttgcaattactagagcaaaatcaaaagtcataattattgataatcgaacaatttatactagtgaaatcaatagattattaagtaacaacaatgggaatttttcttttgaagattttatagaaagaagatatatttga

SEQ ID NO: 72174 - DNA, 2091 bp, Bacillus cereus H3081.97
atgaaattaacaaaggttaaaatctgtaattttagatcctttcataaggaaagaacaattgatttagaagattttacatcaataattggctcgaatagtagtggtaaaacctcattttttcaagcattacttaaattatttggtgaaacgagtagagagagggaaatcttaaggtcagattttcacgttcctagccatatagatccaaacgctttaactgagaatcatttttttatagatgtgaccattgagtttcctgaagttataagtgaagatagtattgcaaaatcaactgtaccaccattttttggtaattttataattgaagagggaggtaaagcaccgtatataagaataagacaagaggctacatggcagaaaagtaatcagccagaaggaataatagaatcaaatgtgttctttgtaactattggtcatggtaatgagatacttgatgttcataagaaaatgataagtaaagcttacttatctcttattaagatgatttatatccctgctcttcgaaaccctaatgatcaattaaaaatggtctctggtacgttactttggcgccttataaacagaataaattttgaagatcagtttaaagaagacattagcgaccaaattggaagcatacatgagattattgataaacaaaaaggactttctaaactaaaagaaattatcagaaccgaatggaagaagtatcataatgaaagtagatatgtaaatgttgatttgaattttaatacaaataatattgaagatattttaaaaaagattgatgctaatttttcaccgactgaagtagggaaaaattatacggtggatgccttaggagacggactgcgctcattattttatttttcattagtaggctcactattgaaaacagaggaagttaccttgatggaaatttctgataatccatcgctagatattaatgaccgaacgtttagtaataccccaccattattaaccttaattgcggttgaggaaccagaaaatcatgtcgcaccacaccttctgggtaaaattgtaagtaatttaagagggatttcagaaggtggaaactctcaagttattttgtcttcacatagtgcatcaattataaaaagagtggatcctgttgaaattagacattttaggaattctaaagaagatttaggaactgtaataaataaaattctgttaccttctaaagaagctgatgagtataagtatgtaaaagaagcggttaaatcttatccggaaatatacttttcaagtctagttatcttaggggaaggtgacagtgaagaaataattattccaagaatattggaagattgtgatttggatatacatacacacgaaatatcaattgttcctttaggtggacgccatgttaatcatttttggaaattgcttacacaacttaaaattccatacataacgttgttggatcttgatatagaaagacatggtggtggttggggaagaattaagtatgttatagaccaaatgcttctcaatggaacgtcaacagaagaactttttcatttaaaggaagatcaaacatttgatttaaatacaattaaaggaatgtacaattgggatttaggtgaagaacatagaaaccttgatattttgagtaaatgggttaaattgctagaatcgcataatgttttttttagtgcaccgctagatattgatttcttaatgataaaggcttttaaggtgaattatttagaaacattaaatagtaatgaaggaccaagaattaaaattggtgaagttcaaaagaagatatcagaacttgaagaatcagatatgcaaactaaagaatacgaggacagaatatctcatgatgttgcatgtactttaaaagatatagctaaaattggaaagtattatgaagaaatcgataaagagttaatgatttggtacaattatttctttttaaatagaggaaaaccaacaacgcatattttagctttaaataatctagataagaaaacatttttggagaaattaccaacagtctttaatgaattaataaaagcaattaataaacagcttatagtagggggagaagaaagtgaataa

SEQ ID NO: 72175 - DNA, 1896 bp, Bacillus cereus H3081.97
gtgaataaatttctttcacccactgagtggtttcctgttgaaaatatggtttttgatgaaactactttagagctgataaaaagtaatcaaaatatgcttgtttcggctggacctggagctggtaaaacggaattacttgctcaaaaagcagcctatttattgcaaaccaatacatgtgaaaatccacaaaagattttagcactaagttataaggttgatgctgctaaaaatttagaaaaaagggttgaggagcgaattggtaaagagttatcaaagagatttgtatctaaaacatatgattctttcgcaaaaagcatattagaccagtttaaaaatctattacctcctttctatcaattagcaagtaagtacgaggttgcatcaaatgaagacatcacaaatgcatataacgctgttaaattaccaagtgattttaaattaaatgatttttataaatatacttatttaacggaatcaagattgccaattatagatacaccatatggtgacatagcaagaagtgtttggccaatttttctccggggaaatcaacatttatccccaaagttgaattttaaaatgattgcaaggttagcagaatttattgtaaagaacaatttactattacagaagtcattacaattaacatacagccatgtgtttttagatgaatttcaagatacgcctgctcatcattacgatttaattgaaacaagctttaaaaaccaacaagtcataacaacggctgttggagataaaaagcaaaggattatgttatgggcgggagcacttcagaatgtttttgatcgttttaaagcggattttagtgcggaagagaaggtattagttattaatcataggtcagctcctaaattaattgaattacaaaagcctatgataagagaacttgtaggagaagaaattgaaattaaacatagtgaaagatgggagagcggacaaggagaagttgaactttggcgttttggtaacgaatctgaagaggcgacttttatttgttcaaaaataaaagatttgatagaaaaaagatccatagcgatttctgatatttgcatattagttagacaacaaccagaaattttcgcaaaagagatattagcctattttaataaaaatggtattgatgtaagggttgaagatgaataccaaatattactaaaagaagagctgatcaacttatttatttcaatgataatgctttctcaaaagaaacaagccgcagatgaatggatttttataacagacacaataaaaaaaatacacggattttcaattatgacatccactaacaagatttatgaattagaaatgaaagtatctagttttatagaacaattaaataaggagttaacagatattaaggagtttaagaattttaaagtagtagtggaacatatttgtgactttataaatatagatttaattagactagtatattcgcattatacaaaagggtatattgaggacttaatagaaaaattttcaagattactttggaaagaatatgagcgttgtcatgaatgggtattggcaattgaaagatttatgggtgaacattctataccaataatgtctatacataaaagtaaaggtttagaatttaaaatagttatcttagttggattggaagataaagctttttggggcattaaacgggatcctggggcagaattgtgtacgttttttgtgggttcttcaagggctattgaaagtatgtattatactgttacagataaaagaaatggtaggattaacagtattaaaaatataaaaactttttataatttgctatcagaatctaaagtagttagaggatataattttagtattggaaaacataaagtagatgagtattttactactccttccaattcatag

SEQ ID NO: 72176 - DNA, 1989 bp, Clostridium butyricum 5521
atgaagagtccatatatatcaaaggttatcttaaagaattatagaaattttaaagattgtacagtaaatttatcacacaaaggagtaattattggggaaaataatgtaggaaaaactaattttattaaagcacttcaactaattttagatccttcattatcagaggaaacaaggtgtcttagtaaagaagacttttttgatggtttagaagatccatttgaaaataacttagaaataattattgaagtatttctaagtgattatgaggaaaatggtaatatagttgctcaattggatgatgcaacagtaaatgatgacggtgaaaaaaaattaaaaatcacatataaatattatcctattgaaagtgataatggcaatatagattatggatacacaatatttaaaggagacaacgaagagtacaagtttacttatgaagatagaaaatatttaaatataaaggttataaaagcaattagagatgtagaacgagaaattaataattcaagaaattcaccattgaacaggcttattaaaaattattgtatagaaaaaaatgaattaaagcagatagcagataatttatcagaaaatagtgctgatatattacaattagatgagattttagatatatcaaaaaacttaaataattctttttctaatattataggtttggataatgatctagaagtatcattaaaaacaatgaatattgatcctaataaaatacttaattcaatgaaaataatgttagcgaatagagaagcagaagatgtaagtctaggattaaataatcttttatatatatcattgatgttattatcaataaaagataatactataccaacatttctaaaaaaagatagatatgaaaaattgttgcaatgtgacggaagtgatattttatcaaaatcttatgaaaaaaataaaaaagaaaattattttttaaaagataatttgctagaagaaggcgagaaagagttatataaatttatggatgaaaatgatccgagtgatggaggcgtaactatacttgttatagaggaaccagaagcacatttacatccaatataccaaagattaatttataaagatgttattaaaaaaaatgataattcagttattttgacaacacattcaacccatataacagcaattgcagatataaaatcaattgtacatttacataaaagaaatagtggagagactgaaataaatacaactgccagtctagatcttagtgggccagaattattggatttagaaagatatgttgatataaaaagaggcgagatttatttaggaaaaggagtaatattagtagagggaattgcagaagaatttttgattcctaaatttgcggaaattatgggtaaatcattggacgaaatcggaataattgtatgcaatataaattgtactaattttaagccatatgtaaagcttcttatgcagcttgatattccatttacagtaattacagatggagatttttatattattaaagaaggagaagataaaaaacaatttcacgtacttgattctattagcgaagatgaatatgaaaagtgtggttacttgggaatagagaatatagaaactttagtaaaagatttgaggcttacaagtaagcaaataccagccgatataagtaaaaaagatgaattatttaatgaattgggactttttgtaggaaataatacattagaggtagatatgatgaattcagctgctgaaaatgaagaggcattaaaaaaaatttgtgaagtttttaatatgttaactgaagggggaacaaagcaacaaagtaattttaaaaatgaaatagaaaacgaaggatattggaaatgcttaaaaaaaatagaggggaatgggataggaaagggaaggtttgcacaaacttttactagtagagttatggaagaacacataccccaatatataaaggatgcaattgaatatatttatgataaagtaaggaagtattaa

SEQ ID NO: 72177 - DNA, 1803 bp, Clostridium butyricum 5521
atgagttattataaagataagttagaacagataaaaagggactcatatcaatatgatgcttataattcagaagatagtacagttgtaattgctggaccaggtagtggtaagacaacagttttaacgctaaaaattatgaaattattaaatgaaaaaattagaaaacctaggggtttagcctgtatgacgtttagtaaggaagcagcaagagaatttaaagatagactaattaaattgggctatactggcaggaaaaatgtatttttaggaactgtgcattcattttgcttaaaagaagttctagaaagatttgcacatttatatagttacgatattccattaccaataaaaataatttcagataaagataagaataaattgtttaatacaatagttgatgatttaaacttaggaaatgcagatataaaaataggggacatggataaggaaagaactttaaatatttcaggaattagtagtgtagaaatagagtcttatgatgtagctttaaaggtagctatagaatatgaaaaacggttatatgctaagggttatcttgattatgaagctgtagtaaaatttgcaactatattaattcagaatgaacaatatgtaagaaaaagtttaagtaagaggtttccttggattcttattgatgaataccaagatctgggaaggccattacatgaaatgatattagcattatttacaaatacaaatattaaaatatttgctgttggagacccggatcaatctatatatggatttacaggagctatacctgattatttgaatgaaatatatagcaaggatgatattatttcaatagagttaaaaaataattataggagtaatcaagatattatagatgcatctcagatgtttctaaaagaaaatagagaatataaagctaagactagattaagagaacaggctgattttaattttgttgtatgtaatattggaatagaagaacagtatatgcagtgtatacagaatgttattcctaaatatagaagtaagggtgtaacatttgaggatatagcagttattgtacaatataatagacatgcaaaggaattagcaagtatatgtaaagaagaaaatattccgtattatattgctaaacatgattatgatagaagcgattttataatatggatagagaaatgtgcagcatgggttactgataatacaacccaatcatttgaagaaatttttgatttttggaaaaacttaattaataggcattgtgttagtaaaataaatagtcaaaatagtatatttgagaaacgaaatttactaaaagttttgaaaagtagtaaggtttattctgataaattagaaaaatgggtaaagtttattattaatactttgggtataatagatttatttgataaatctattatatatccagaggaaattagcaatatagataaatttattaaagtaataaaagaaagcggatattctaatgaaaatataaaattattttcaaaaataggaaagcctgagaatcagataactataaccacacgacatagttcaaagggactagaatttgaggttgttattatattaggaatggaggaaggaaactttccagactatagatcagtaacacaacgacaaatagaagaggaagaaagaatatgttttgtatgtattagtagagctaaaaatgcatgtgtattggttagatcagaatattatgatattccaactaaaagaggattatggcataaaccaatggaagagtctagattttggactaaattatataatagatatattgacgaataa

SEQ ID NO: 72178 - DNA, 1740 bp, Clostridium perfringens C str. JGS1495
atgaaatttaagagcttagaaattaaaaactttagaaattttgaatgtataaatattaatttagataataaaaatgtaatatttggtatgaatgatattggaaaaactaattttttgtatgcaataagatttttattggataaagatgttagaaagaatagatttgttcaaactgattatcatagaaataatattgagaataatattagtataacattagagttagatatatcagatttcgatgaaagtgaagacactaaaaacttaatttctcaagcgggtgatgttagaagtagtaaaaatcatgaaaagttttatataagagtaattggagaatataatagtaaggaagcatttggagaaccaaaattgttttggggagatgatatagaaagtttgaaagatatgactaataatggatattcatttaaaatagataatatttttcaagttgtatatataaatccattaatagatttagataagatttttattaaaaataaaagaatattgatggatgaatcaaatagttctgagcatgataaaaatataatggaagaaatcaataatttaacaaaagagatgaatactaaaataagtagtatgagtatgattgataatttacaaaaaaatataacaaaggagtatttaggtttaagaaatgaagatattgaaattgaaatgaaatctgaaatggctataaaaggagtattttcagatatagtaccatatataaagaaaaaagatgatgataaatattatccaacatcaggagatggaagaagaaaaatattagcttattcaatattaaatttattaaacaataaaatatatgaggataaaataatagtttatttaatagaagagccagaaaatagtttacataggtcaatgcaaatagcactttcaaaacaactttttagtgaagatgggtataactattgttttatgtctactcattcatcagacatattatatgaacttgataaatcaaatcttattagaatatattctggtgaaaagatagaatgtaaatctcatatatataatataccaacagaatttaaaacaaacaaaaaaaagttaaataagcatttttgtaatgcattattttcagaaagagttctacttatagagggaccatcagagtatgttttatttgaaaaagttatgaatgagattaattcaaattatgaattagatggcggatatatattacaagtcaatggtacatattttaagacatattttgatgcatttaaagatttaaatataaaaataatagttaaaactgataatgatttaagagcttcaacagctaaaaattcagattcagaatatgagcttttagggataaatagatgtttaggattaataggagaagaaaaaaaacaaaatataaagatagcttttgaaaaaaaaggagctgcacataagaaaagtaaactaaaagaagaaaaaagaaaatgttttgaaaataataaaatatcaatagataaatttgaagaaaatagtatatttttatcagaaatagatttggaaaatgatttagctcaagtaataggagagaaaatacagtctattctaggctgtaaaaaaacaaaaatagtagatgtactacaatcaagtaaattatataagatggtagaattagttgatggattaaagaaagatgattgtgaaaaaatttatgaaagtagatattttaaatgtttaaaggagttgaataatgaaagataa

SEQ ID NO: 72179 - DNA, 1488 bp, Clostridium perfringens C str. JGS1495
atgaaagataatgaaataagagaagagattttaagttcagatgacaatatgataatactagctggcgcaggttctggaaaaacaacattgttgactaataaaataattgattatgttgaaaaaaccaaaactcattataaaatagctgcaataacttttactaataaagctacaaatgaaataaaattaaaattaaaaggaaagataaatggaaattttattgggaataatgatagttttgtagagcaggaaataataagaccttttttaaatgatgcatatggagaagactatagtaatgattttatagtaacctataaaactaacaaatttaatttttataatgaggggctaaaggtattaaaggataaaaatattttagctagttatgaagataataaaaagaattttaagtttgaattagctttaaatatattagaactttcaaaagttgcaaggcagtatattaaagccaaatatagtaggatttttattgatgagtatcaagactgcgataaagatatgcataatttgttcatgtatattaaagaactaggtgttaagttgtttatagttggagatactaagcaaagtatatattcttggagaggtgctaatccaaaattatttgaagaaatttatattggagataatgattttaaaaaatacgagttgtttattaattttagatgttcaaaaggaattcaaaattattcaaatataattcagtatagaaatattgataaatatcaagataacaatgaagacatagatgatgttattttactatcaaataattatgacataaatgatgcagttaatactttagatatagaagaaagtatagcaatattagtaagaagtaatgcagaagctgaaacaataaaaaatgaattgaatttacagggatataattttacatttgtacctaaaactcctttggatgaattgtctacaaataataaaaatatccttattgaacttgcaaagtattcaaaagataaagtttatactcattatgattttgtaagtactttacctggagatttttcaagaaaagaaatattatctataaaagaaataatacaaccattaaaattaaatttagaaaaagataagatagaggatatattaataaatttatttgcttttttaaatttatcattttttgaaacaaaagaaattgatagttttgttgagtcaataattaatactagatatgaaaatgcattcaatggagaagagtttattcacaaagttatgacaatacattcctcaaaaggtttagaatttgaacaagtagttatttgctctaaaaattataatctttttataggaaaggattcagaagaacattatgtagcaactacaagagctaaaaagaagctagtaatattattaaatgatacattgtatttaaagaaaataaaatgtatatgtagagatactggattgatattagaggatattgcaaaatttatagactga

SEQ ID NO: 72180 - DNA, 1926 bp, Salmonella enterica subsp. enterica serovar Virchow str. SL491
atgaaactgcacagtattcggatatcaaattttcaaagttttggtgctgaaccaatagaactgacactggaaaatattacctatctgattggccccaacgggtcaggcaagactgctgcactccaggctttgtgccgactgtttgcatttgatccatcattacgccgtattcagcgctcagacttccatgtcccgcacgatgaacaagaagcgcccgaagaaaggcagttatggattgaggcggacttcgtttttcccgagttggagggtgaagaagataactcaagcgttgctccccatttcagtcacatgcgccttgatgaccctgacggaattcctcgggtacggtatcgcctaagtgccactatgggcctagatggagatattgatgaagctttcgtgtatgtgcttgaagttggtccggacggctcacctataaatcctgaaacagttcctcgatctgaccgaaatcacatacaagtccactatctgccagccaggagagatcctactgaccacatagcatacggaacgagtgcgctgcttggccgcttgctacgtgccgtgaactgggaaaatgaacgagaaaaggtcaaagggttcaccgaccagattagtgagagcctggctgctaattcatcggttaatgcttttagctcccacctgaagaaaatatggggcaccctccataaaggcagctactttacagatcccaagattacttttgtggcatctgagatcgaggcgttgcttcgtcatttgtccgtatcattctcgcctggacatgatgacaatcttgtcgatttttctcgactcagtgacggtcagaagtcgatgctctatctatcgttggttctctcatctcaagctgttggtcgtgctgtccttgccggtgaggacgactcttttgaccctgaaaagttgcgtccgccagtctttactttaatagcccttgaggaaccagagaacagcctctcacctcactatttgggaagaattgttaacgctcttaactcaatgacgagtaacgaggatgctcaggccctagtcgctacgcatgctccgtcgatgttgcgacgtgtcgatccggaacatattcgatatcttcgacttactgaaacccggcaatcaagaattaagaaaatccaattacccgctaaaaccgatgaagcgcacaaatttgtacgtgaggctgtccaggcatttcctgagatctacttctctcgtttgattgtgttgggtgaaggggatagcgaagaaattgtattaccgcgccttttccaagcaaagggtgcgccagttgatgaatcagcggttacgattgctccgcttggaggtaggcatgtaaaccatttttggcgtctgttatccgaactgcaaatcccatttttgactcttctagatttagatgtgggcagatatcaagcgggctggggaagaataaagtatgtaaataaccaacttggtttgtatcaacctgaaaaggtactaccaactactttttctttatcagattggaatgatgacaaagtacctgttcgtacacatcatttctttgaaaacggcactaagagtgtatttttagagctggaaacacgtggtgtttttttctcatttccaatggatttagatttttcaatgcttcttgctttccctaatgcgtacggtgttcagcaggaggtttcagatgagtctacgattaaagccgttttgggtaagagccatcatggctcataccaatacagcggagacgagttaaatcttttctctacgtatcacaagctttttaaactgggtagtaagcccgctgcgcatatagatgctcttgctcaactgagcaacgaggaattgctggcgaacatgccaggatcatttggacgacttgcagatgccgtgatagccaagcttgcggagctgcccgagtga

SEQ ID NO: 72181 - DNA, 1662 bp, Salmonella enterica subsp. enterica serovar Virchow str. SL491
gtgattgctgtagatgcatggttgccttctgatgggctaacacttgaacccaatgctctgctggctgcgaaggaacaagcgcgctgtcttgcactgactgcggggccgggagcgggcaagacggaaatgcttgcacagcgagctgacttcctcctccgaaccggaacctgccgttatccgaagagaatactcgctatttctttcaaagttgacgccagcaaaaacttgaaggagcgaatccagcgacgctgtggacaagaattggcttcccgttttgatagctacacatttcatgcgtttgcaaagcgtattattgatcgcttccgagtagtgcttactggtaatgatgctctggatacggattattcgattggcgaaagaaaagtcacaagaaggcaaattacatttcatgatcttgtgccgctagcaattcaaattctcaaggcctctgttgtcgcaagaaatgccatacgccaaacttacagcgatgttttcttggatgaattccaagactgcacggatcagcaatatgaactcgttaaggtagctttccaaagtacaagcattcgtcttaccgctgtcggtgacaccaagcagaaaatcatgggatgggcaggagctttggacggaattttccaaacgttcgctaaggatttttcagccgtaccactaaacatgtaccgaaactttcgttcaaaaccacgcctgcttcggatgcagaacgagataattcgtgtgcttgatccagcttccgttatgccagatcaccaacttgctggtgaggagggagaggttttcgcgtggcaattcgagaatgcacagggggaagctgagtatttggccgatttgattgccgggtggataagaaatgaaaaggttccgttgtccgaaatcgccgtattagtgtccaaacaactagatctttatgccaaccacttgatgacggcattggaagttaggggaataccgtaccggaacgagcaggagatgcaggatattactgttgaacctgccgcgaggctcgttgttgactatttgtcctgcctctacggccagcgagagcccaaagcttgggttcggcttatgaatcaattgattccctttgctgatgatgaggtgcagtctagcgctaggcaaagcttccaacgcttcttcaaggagcagagaaaaatcatcaccatgaccgagctgttggatgagccgttttcgggatggtgggattctgtgtgtagctttctgaagaaaataggaatggagactcttgttgctctctcgcccgactatgagtcacatgctaggttaggtgaagttgtgagagataccaaagcgcgcattgaagaattgcttgaacttacccccgatttgcctcaagccttgactcgtttctctgatgatcaggctgtgcgtattctgactatccataagagcaaaggattggagttcgactcaacgataattatggccgttgagaacgaaatattctttggggatcaagatgctaatcggtgtgctttctttgttggtgtatcccgtgccaagcgtcggcttgttgttacatacgcaaaagagcgagataagcctgataattattcagggatatggcgaacgaatcgctctgctcagttagaatattttggatatacatctccttttgttaagtga

SEQ ID NO: 72182 - DNA, 2145 bp, Vibrio sp. AND4
atgaaggttgcacgaattgaaatttcaaatttcagattactaaaaagttttgccttagacttggaagacgagttatctttagttatagggaaaaacaatacgggtaagacttcaatattagcttgtttagataaacttgcagttcaatctgacaaaaaagcgattacctatgaggactttaatgttgatttaatgtcttctattgaggctgtgttgcttggtgaaaaagcgttaaaaagtgaagaggaatactcaccttttggcattcaactaaaactatttattaaatataccgaatcggatgacctctccaaaattagctctttaataatgagtttagaccctactgatgataacgtgctcctttctttcgagtataaaatagcttttgatagaatggttgaaatgaaatctgcttacaataaagaggcagaaaaattcgaacatagtcctcgcttatttttaaaagaaaacctctctgattactttggcacagttgtgaagaaaagcttgctgatgggtgatgagagccagtttattgatttaaataaagagagaattaacctcaaagacattttatctattcagttcatcaatgcaaaaagaagtgtaactaataagaaaaatgataagactctatcgaatcaaacatcaactttgtataaacaagtagatgaatctgacgagcaagtagaagcatcgaacgagtttaaaaaagaattacgtaaaacggataccaagctaagcggtatctatgagaatatgtttgaaggtgtcattgaaaaagttaacaggtttggtggtattagcccaacagataccactatcagagttgcatcgactttacaacatcgtgagttgttagatgggaacaccacagtcatgtatcagcaccaaagtcatgatcttcctgaacattacaatggcctagggtacatgaacttaatcagtatgatttttgaaattgagatgctgatgagtaggttaaggaaatcactcaaagagcaaccagcctcgataaatttactctttattgaagaacctgaagcacatacccacccacagatgcagtatgtattcattaaaaatattaaaacgctattgaaggaaaatcgcctgagacaagatggtaaggaaatacatttacaatcaattattaccacacactcctctcatatagtgtcagaaagtagttttaatgatatcaagtatttaagaaaaattccgcaatctaatcaggttcatgctaaaaacctgaaagatttagagttggagtacgcttctaaaaaagatcctataaaagatgcagagcttaaacagtcatatcgttttttgaagcaatatttaaccctaaatcgagctgagctgttttttgcagacaaagcgatttttatcgaaggtgatactgaacgaattattttgcctgcaatgatgaaaaaaattgatcaagcctgtgaagatagtgatgtgcagccactgttatctcaaaatatttcaatggtcgaggttggagctcactctcaaacatttgaaaaatttatagactttattggacttaagtcgctgatcattacagatatcgatagcaacaaagaagtgcccaaggatggtaatccaactcaaacagagagattaaagtgtcctccgaacgcagcaggagcatctcagacttcaaatgcttcgttagattttttctttggcacaaaagaattagccttctataagaatttggaattatctaaaaagagcttaagcaaatgtccagagcaaaaagtgtggaaacaagatccagaaggtctagttaaaattatctatcaagttgaagaaaatggttaccttgccagaagttttgaggacgcatttttccatattaataacgaacttctaaagattggccataatgcattcccatcattgacaaagaagtattatgacaagtatcaatctggcgatatagaagtttatgaatttgctgaaaaagccgtaaatagcaaaccgtctctagctattgaaattttattaaatagtaaaactgtaagttgtaaaaaaggtggttcagaagttgattcaatagaaattgagttttcaaactgggatgtgccattatatatcagggaagggctattatggctacaacagaattag

SEQ ID NO: 72183 - DNA, 1914 bp, Vibrio sp. AND4
atggctacaacagaattagatttagataaactctcaaaagaagctaaagaagtatttaaattaattaaagataaaaaacatttcttactcagtggtggtgctggtagtggaaaaacatactcattagtagaaatattgagagctgtaattaacgatactccttcagttaatattgcatgtattacttatactaatgctgctgtttctgaaattgaagatagactttcacatgataatcttcatgtgtcaactattcatgattttctatggaataacataaaaaactttcaatttgagatcaagcaaacattaattgaactgattaatgacccagaacaaacggtgattaacagttcagacaaaaaaatggttgatcagagcttttttgatgattgtgatattataaaatataaagaatatgtaaaaatagtgaatggaataatatcacatgatgaagtagttgttctcgctaccaaaatgttcgagaaatatgaaaggctatgctcaattgtaaaggacaagtacccatatatttttgtcgatgaatatcaggatacaaacccaatggtagttaaggttctccttgaatatatggaaaggtcaaataagcctaatgtagttggtttctttggtgatgcaatgcagtcaatatatgatggaagtgtcggcaatcttgatatatatactaagtcagagccaccgacggtatatgaagtaatcaaaaagcaaaatcgtcgaaaccctttacaggtaattaacttggcaaatctaatcagaacagatgagcttgtgcaagaaccttctgatgaccaatctgcccctaatatggataacaatggaaaggtaaaacaaggtgagattaagttcttgtattctactagtgataatttgaaaactgtccggcaacatctaggttgggactttaattgttccacgacagtaaaagaattgaacctaactcataacttaatagcagttcaagccaacttccctgagttgatgcgtatttatgacaaagataaaattcttgaatatatacgagataaagtaaggaagcccttagcagaaaacgagcccgagtacgattctacaggaaaaacacttgctcaagtattagagcatgtcggtaacccgaaccccacgccagcgcaaaacacttatattgataatcactatgagtgtttcgagcttgctaaatctcttccttttgatcaacttagcaagttgtatgtaaataaagatcagttacttgacgacaaaaaaaactatgtgggtgacgatagcaagccaaactctaatcgagatgaccttataaaccatttgtttaagattgaaaactgtattcgtctttacgagtccaaaaatcataatcggttcattaaggctacagattactcaatattatcagtgaatgataaagtaaatctacacaaggctattcaagctttccagattgatgaaggtatttcaatcggtaaagttattgatcttgctcatgaattgggactggttgttaaagatgataaggtggaaaagtttgctgcagatagatactacgtgtacaaacaagtttgcgacattaagtatcaagagtttcgtaacgtatttaactatcttgagggctttctcccattctctactcagcataaaacgaaaggttcagagttccctaacgtgttgattttattagataatggtaagtggaatcaatataattttaagtatttgtttgaacatgatggaaccgatagtgttaggcaaaggactgaaaaaatattttatgtatgctgtacccgtgcgaaagaaaagcttgctgtgttttttccaaatcctacccagaaaacagtcaaaactgctcttgaatggtttggtgaagataatgttgtgaacttggatgaatgcttttttgattag

SEQ ID NO: 72184 - DNA, 1983 bp, Oceanibulbus indolifex HEL-45
gtgcgtatcgaatccgtaaccctctccggcttccgctgttttggtcccgaccctataaccgtgccgatcgcatccgagatcacggctgtcgtcggtccgaacgcagcgggcaagaccgcgctgcttcatgccctgtcgaagctgttcggcgtgtcccgtgcgcagcgcaccgttgagcgatctgattttcatcttggggtagatgacgatcccgaagaccgagagcctaaggatcttttcatcgacgtgatgatcggattgccagagttggccgacggaacagcgacgccagaaacgatagcaccatcgtttcggcacatgcagattgcgagggcaggtgatgctccggtctgccgcctacgtcttgaagcgcgatgggaagatgacggcacggtcgaaggcgaggtctcccaagacttattctgggtggatacgctcgacgacgatccgggcgaggacaagtgccacccagtctcggctgcggatcgtggtttggttcaactttattatacgcccgccagccgggatgcggctgcccaaatcaaggcgactacaggtgcgctcgctgcccgtttacttcgggctatcgaatggtcatccgaaaccactgaggcggtcgaggaagcttctgaggatctggcggcagccttcgaggaggagtcggcaatcgcagctatcgtcgaagccctgcaaaagcgctggtcgagcctgcatgatgatattgtcgatacgaagccgcggctcagcttggtcagccgccgctttgaagaggtggtaagcaagatagccgtgatcttcgagcagggaccggacggccaggaacgcggcctagatgccctcagcgacgggcagcaatcactcttttattttgcgctggccgcagcagtgttcgatctggagcgcgaggtggtcgccggaacggtcgaaggcttccgagacgacacgctacgcattcctgcgcttacgctctttgcactggaagagccggaaaaccacctctcgccctatttcctcgcccggatcattcgccaagttcgctcattgaccgacacaagtggcgcacaggccatcgtcacaagtcattcgccggcggttctaagccgcgtcgatccgcgtgaggttcgctactgccgctgtgatccgaagacacgtgtttcaacggtcaaaaagatcaagatgccagcaggaatcgatgagacagccaaattcgtccgtggcgcaatgctggcctatcccgaactttacttcgctcggttcgtccttctggtcgaaggtgattccgagcggatcgttttgcctcgccttgccgaagcgctcgatctcctgatcgaccccgccttcgtcgcgattgttcccttgggcggtcggcatgtccaacatttctggcggcttttgaaacatctaggtattccgcacgcaacgctcttggatctcgatctgggtcgcaaaggcggcggctttgggcgggtcaagacggcaatcgaaaagctcgtcgaattcggcgcgccaaaggccgaactcttgagaatcgacaaaggcgtcctccctgatgccgaactcgcccagatgcatacttggcaagacgcggaggactgcaagaacctcgtggcgtgggtcaatagtcttaagccgcatggcgtgtttttctcggcaccgcttgatctcgatctcgccatgctcggtgcattccccgacgcatacaaggcaatcatccccaagagtggagggcctaaaatggctgccgataaggcggcagaggtcgtgctcgggacggcggggccaggaaacacgctctatacggggccgtttaaggactatccggcactgctgccagcctatcgctatcacttcctcaccaacagcaagccggcaacgcacctcgctgccctgacgcacatcaagaaaaaggacctggtcaagaaaatgccgaccgtattggccgaggtcctcagtcacgtcgcaaaatcattgcggcgggactag

SEQ ID NO: 72185 - DNA, 1905 bp, Oceanibulbus indolifex HEL-45
atggcggtgctctcgcgacgggctcggccggatgattggaagcccgtgggggtagacgcactcgaagcgaatgcgctcaaggtcgtgcgctcgacggacaaccggtctgtcatagccggcccaggcgcaggcaagacggagttgttggcgcagcgtgccgcctatctgcttcagacgggaaccgcacccgcgccaaggcgcatactcgcgatcagtttcaagcgagacgctgccacgaacctagcggcgcgtgtccggcagcggtgtcaccgccatcatgccggacgctttgactccttaacgttcgacgcgtttgccaaaggactaattgaccgtcttggacaggcgcttcctgatcgctggcgtccacgccccgactacgaagtcatcttccccaacgatcgggattaccgagaattcctgtatcggcaggtcggcacacctccagcatcagtgggcacctatgctgaccttcaaggtatcgcagtgaaaacatttgaacggcgtgatctggtcggatcaccgctaccgttggacggttggtcaaccccgacggtcggccagtgggcggcggatcgattttggcaaacatcactccatgaggggaagagaagcgtcctgtcattccccatgatcggccggctcgctgaactcctattgcgcgtcaatccgatggcgcgcgacgcacttcgcctgacctactcgcatctgtttatggatgagtttcaggatacgacacagattcaatatgatctgcttcgcacgatcttcttcggcaccgaaacgaccataactgccgtcggcgacaacaagcagcagatcatgcgttgggcgatggcgatggacgatccgttcgtcgcctttgatgccgatttcgctggcaaacggacaccgctctataataactatcgctcttcgccagagctggtgcgcattcagcatatccttgcacaagccatagacgctcgcgctgtagaaccaatctcaaagaccgcggttacgattgccggagatagttgcgcgatctgggatttctctacaccggaggtcgaggcggctcgcttggctgcattcgttgcgtccgagatgaagacacacgccctcggcccgcgtgattttgttatgctggttcgacagaaggctgcggactatgcggccgttcttgagccggccttcaatgcagctggtatcccgctgcgtaacgaggccggagccgttggggcggtagtgctgcaagagttgctggcggaagaagtgtctgaactggctgtcgttattttgcgcctcgccatgactaagcgcgctggtaggtattggactgaatgccaagaggcgcttgcgacgctgcacgggatcacgccagatgacgaggccgcggagtctagacttgcccatgagcttgacgcctacacgctcaagctttgcaaagcacatccgtctccgccgaagtcgaaggcggcggcgcgaattattattgacgacattatggcattcgtgggtaaagatcggctgattgcagttcaccccgcttatggtcagggaggctggctggagaaagtgttggatgccgctgccgtgcatttatcctcgtgttcagacagcggcggcgattggtcaatggcactcgacgcctatgagggcgttcacgcaataccactcatgacgatccataagagcaaagggctggaataccacagcgtcatcttcgtcggccttgacgatggcgcatggtggagttttgccaacgatcagatcgaggccacggctggtttcttcgtcgctttcactcgcgcgaagcaacgagtcgtctttacctactgcgctcgcagaggcgcccgaaccaagattgcgacgctctacagtttgctggaaaaggcgggcgtcaggacaatctcggtgacttga

SEQ ID NO: 72186 - DNA, 1767 bp, Bacteroides intestinalis DSM 17393
atgggaaatatattaatagataaaattaggatttcaggttttagggggttagatgattttgagatgagtttaactcctattacagtccttacaggtacaaataatacaggaaaaactactattttgaaagctttacagctatcattaggaagtcgttctttcttatctattgatgatttatatatatcaaaagaaaaaaatgctacagaaattataattgatataagatttgtaccaataaatgatgaagggaaaattctaaatgacttttctgaagaatgggaagaagtatttactagtgataatataagatttatagaagattttagctgtgtcccttttcgtactattatcagttataattcattaaaaagtagttttgatattgagcaaaaaattttagtagattggtatccatcagaaggagaaaaatggcagaatattattgctaaaaattcaagaattgatttctctaaaactccttttttttatattgaagcacaaagagatgttgtagatgatatgaaacttaaaacatcctatttaggtaagatgttatcggacgtagctaaagcttataacaagaaagatttagaagaattagaaaaactaatatctaccttaaaccagcaggctgtagaaaaaagtgatatattaagtactattcaagactcgctagaaggcattaattctgcaatggataaaagcgggacaggagtaacaatatctccctttacaaaaaaaataagagatttgaataaaggggtatctatacattatggagattctgacaatagtttcactatggattatcacggcatgggaacaagaagctggtcttctcttttaacatttaaggcttttattaagcataatgccgaacttgcccagaaagaaaatgaaccattttttcctattattgctatagaagaaccagaatcacatcttcatccaaatgcacagaaaaaattatatcgtcaaatgtatgaaatgccgggacagaaaataatatctacacattctccatatgttgcatgttctgctaacatagaaaacttgagaggattatataaaaatttgaacaatgtttcatgtggcattcttaatctgaacgaaatggatgatgatgataagagaaagttacgacaaaaagtcattaatacaagaggagaaattttattctccaaagcaattgttctttttgaaggtgaaacagaagaacaggctctcccaataatggcagagaaatattttggttgtcctgcttcagaattaggcattaattttattggtgttggtggggctggaagctatttccctttcttacagtttgctcaatcatttaatataccatggtatatttttagtgatggagaagatgaccctgtttctaaaatgacagctgcagtaaaaaagataagaaaagagctatttacaacaattgaaaatgagaaaaatatttttatcattgatcataaagaagattttgagaaatacataataaggttagattatctcaatgatataaaatcctacttgaagcagatagaactttctaaatgtgttaacgagcaacataaagaatcaaaagcaaaaggaattgattttttctgcacaaatagttacgtgttatcagaatcaaagaaaaataaaacaaaatgggctttgatatatgctcatgcaatatataattcattaaaacctataccattgttagtatctaatttgtttgacaaaatcaaaattgacctacattatgataaataa

SEQ ID NO: 72187 - DNA, 1848 bp, Bacteroides intestinalis DSM 17393
atgataaataaaatacaactaacaagcaagcaagctgctattgtttcttttcaacaaggtgcacttttagttttggctagtgccggcagtggaaaaacaagagttcttacagagagaattaaatatcttgtagattcaactaaacgtaaaatattagccattacatttaccaataaagcgtctgaggaaataaaagagcgtttaagtgatattgataatatagaagaacgtttatatattggaacattccactctttttgttgttatgttttagagaagcatggaaatatgattggataccaagaacttcctcaagtattctctgaaacagatgatcgattaaggataatagaagatgctatagttgaaactcctacattaaatcaatactttagcaatttagattctaaacaaagaaataagttcaaaacaaatgcattagatattatctccaaaataaaacgtgaagttattttagatgatgacttggagaaacggataaaggacaaaaatgcaataatgttatactacagttatagagatttaatggcttcgttaaatgctattgattttgatgatttgttatttttaacatataaattatttgttaatagtcccaaaactgctgctttgtacagaagaaactttgaatatatttgcatagatgaagctcaagacctcaacaaggctcagtatatggtactaaaagctttaacgggtagtgaacataaaaatattatgatggtgggagatcccaaacaatcaatttatggctttaatggttctagcagttccttcatgcaggactcttttgtagcagattatgcacctacaataatagaacttaatgataattttcgaagttcgagaagcattcttagcttagcgaataaaattgtgaatgctccatccgatttgaataatgtagctgtaaacggagtatgtgaaatacattcgtttaaagatgtgtgtgaagaagctgattggattgcatcaaaaataaaagaatatttacagaatgaacacttaaaagatatagaaggtaaattgacagagaaccgaataactattttagcacgaaatagatacttattacttccaattgaagaaaagctcatagaggaaaatataaactatttctataagaacaattcaaatggtttactttttgactctactagtggaaaaatatttaaccttgcattacaaatcaaggtaaaccctaaagactatttacattttgagcaactattagcattattaaatattgaagatgataaggtatattcatttaatgaattaggaaatagaatacaaaataagttatataaagacattgttaattcaatcgttctattaaaagattcaggtgataattttaataaaatgatagaccatttgttacaaaagatacaagaaaattcagattttaatatgattgatgagaatgaattgcatctagcatataatgatttgttggagatcaaaaagaattggcataattatgcaatctctacgaaaacaaaaaacattgcatcttttagaaatgccatagcattgggaaaaactattcaaagtaagaaagaaataggtattgcacttagcactattcatacaatgaaaggacaagaaaatgatattgtatttcttattggaatggatgatcaaacttttcctgattacagagctctacaaaaaggtggtttagaattagagcaagagaaaaacaatttatatgtagctataactagagctaaaagatatctttttattacttatcctttaagccgaaaaatgccatggggagatattaaaacaagaaaaatctcatctttattacaaatttaa

SEQ ID NO: 72188 - DNA, 1479 bp, Pedosphaera parvula Ellin514
atggacggcttcgcggatgcaattaaagaattggaagaactaaactatcccggtattgccgacccgaaattgaggattgccacattgcttcgaccaactgatgggctcaatcacagcgccgcgctgcagtatgaactgggcgttcaagcgggtaatacctcggcttctcaactccggttgccagaggaatacaacgggctcggttaccaaaacttaatctcgattgtttttcggttgatggcgttccgagattcctggatgcggaaaggtaaagctgcgaaaatgtcggtgctgcagaccgagaaaaaaacgctcttggcgccattgcacttggtgattgtagaagaacctgaagcacatctacaccctcaagtgcagcaggtctttgttcggaaggcatatgacattttgcgaacgcatcctgatcttgaagacaaaacgacgctacgaacacagcttttagtgagcacgcattcaagccatgtcgctcatgaatgcccattttcaagtcttcgttattttcgtcgtttggctgcgccaactgatggagtgccgacatcagcggtcattaacttgtctgaggtgtttggtccgaatgacaaaacagagaaatttgtcactcgatatattcaggctgttcattgcgacctattttttgccgatggtgcaattttggtggagggtgacgcagagcgaattctggtgccacactttatccggaagcatttccccaagctacaccgcagctatgtgactgtaatgcaagtcgggggcagccacgctcatcgattgcaaagcttaatcgaacacctcggtcttacaacactgattattactgacattgatactggcgaggctgggggacatcataagtcgatacctcccatgctgggggacggacaagtcacaaacaatgctactctcaagatgtggcatccccgagagaagttgttcgataaattaatagagctggacgaaaaggcgaaggtgaaaacctcagactttccacagttttcagttcgagttgcttatcagattcccgtctccgtgcaactggagccgacggcaacggtcgccgaggcgttgccctctacatttgaggacgcgcttgcatttgaaaacttagagctgtttagaaacactggtggtaatgtaattgaaggcggagatctagttgaaagattcaaggccattttgaatacaccgccggtgatcacggaactggcgaaggagatttctgaggctgttcgaaagaccaaaggtaaagcggaattcgctctcgacctcctactgattaaggaggacctagcgaaggtcaaggtcccgaaatacatagagaacggattagaatggcttgagtgccaactcagcgagaatgaacaactcgtcttgcagtccgcgaagacctctacatcagcaccggcagcctcagtggcgccgactgaggaagcattgtcaccagcaactgtcctagcatga

SEQ ID NO: 72189 - DNA, 1926 bp, Pedosphaera parvula Ellin514
atgatcacaaagacagaaagtctgaacgaaaccatcgacaatcatgccgatgtcgagatagatggttgcctcgatctcgataaaccgacgagcttcttcttgtttgcaggtgcaggttctggcaaaactcgctctctcgtgaaggctatcagaggactgcgcgaaaggagtggaattcggatgcgtttgcgtgggcaacaaatcgccgtgattacctacacgaatgcggcctgcgatgaaattactcgtcggcttgaatttgatccactcatttgcgtaaaaaccatccacagcttcgtttgggacctgattcagggatttaacacagacattaggaagtggctgaaggtcagtctcaccgaagagataaggactattcaagaagagcacacaaaagggagatcgggaacgaaagcggctgcggaccgagaacagaaaattgtcgcgcttcagaagcgcctcgaccttctcgatggccttagtggatttgtgtacagtcccaccggggaaaatcgcactcgaggctcacttaaccacgccgaagttatcaaaataggtgcggccttccttaaaacaaagccgctgatgcaggaacttctcatcagcaagtttccggttttgctcattgatgaaagtcaggacacgagcaagttgcttatggaagcttttttcgcagtacaagcagcacacgataactcattttgcctcggattaattggcgatactatgcaacgaatttactccgatgggaaggtggatttgggaagaaacttgccagccgactggaagaaaccctcgaaggtgataaatcaccgttgccctcatcgggtggtaaagctgatcaacaaaatccgctcttcagctgcgatcgatgaccagcaacaaaaagctcgcaccgaggccagtgaggggcatgttcgcttcttcatcgtgccgagcctcgatgtcaacaagagcgaatgcgaggaacaggtcagaaaacgaatggcggcaacaactggtgacaacgaatggcttcgcttggacggtgtgaaagtcttaacccttgagcatcacatggcggcccagcgcttgggattcgcagaaatgttcagacaactcgacggggtagctgactacaagactggccttcgagatggttcactcccactactgcgctttttctccgaaatagttttgcccttggtgaccgcaaaacgcgaggggaatgaattcgcagtggcggcgctgatgcgccagaactcgccacttcttagtagagaagccctgttcgaaattgggactaaccaagctgctcaagtgaaggccgcgaagactggcgtcgaggcgctcttggcgcttttcaccggaggtgcgcagcccacttttctcgccgtccttaattctatcgcggacaccaaacttttcacgattccagaaagtcttttgccatttgtatctgacaaggcggcttcagaaccaacctcaagcgagaccgaggaagccgatgaagaagagagcgccacgaaaactctagtggcagttcgggcctttctcgataccccttttcagcagattaagccgtacgccgattacgtgctcggcgattcatggttcgcgactcatcaaggagtaaaaggtctcgaattcccccgtgttcttgtaatcatggacgatgaaggtgctggtggatttctcttcggattcgaaaagctttttggagcaaaagagaagagctcaagcgatataaggaatgaacaagacggcaaggaaacatccgtggaccgcacgcgcagactgttttacgttacatgtagtcgtagtcaaaacagtctcgcattagttgcctactccgctaatgccaaaatggtgcaagcaacgctgatcgagcaaggctggttcgagcaacttgaaatcgaattgttatctttgccggcagtggcctga

SEQ ID NO: 72190 - DNA, 2100 bp, Enterococcus faecalis OG1RF
atggaaatttatataggagaaaagaccatgaaactcaaaaaaatgattcttaaaaattatcgttcaattggtgatgatgaacaagtaattgattttgaaaatttgactatgcttattggaaataatagcgtaggaaaaaccgctgctttatcagccctcaacaaattattttctgatgtcccgaatgagcgcgtattaaaacgttcagattttcacttaccaaagggtattcaacctgagaattttaaaaaacaagagttagtaattgaagcaatttttgaatttgatgagttactagatgatcaagctgaatctagccctgcaattccatttttttttgaaagttttatcgtagaaggtcctgattcattacctaaactacgtgttaggttagaggcaagttgggaagatggtagtacagttgatggtactattgaaagtaatatttatttcattacttgtccagaaacaagtgaagttacagatgataacaaaaaaaatgcatctagacacgatttgaataaaataagattaatctatgtacctgcagtaagagatccaggtaagcagttaaaaaatgtttctggtagcatgattcaccaagtaatgaatagcatcaattggaaggatgaaacaagagaaaacgtaaaagaacatatagataagataaatgaagatttttctgttgaaagcggagttaatattcttaaaaatgcaattcagaaagagtggtacgaatatcagtcagacacacgatatacgaaagctgatttaaaatttaatgctacaactattgatgcagcggtaaagaatactgaagtcttattttctccaacggagacgggtagagagtattccatcgatgaaatgggtgatgggatgaaatcattattttatatgtcgatagtagatagtattttagatgttgaagcaaaaataaatgaagaaatggttaatggagaagatttgtcttttacaaaagaacctcctgtattgactattgttgctgtagaggaaccagaaaatcatatttctcctcatatacttgggaaattagtaaataaactaagagatatatcaaaaaaaggaaatgcacaaactattattacatcgcactcaccagcaattgtaaaaagaatgaatccagaagaaatccgtcatttccgaatgaattatggaactttatcaacatcgattaagaaactgactttgcctgataacgagactaattcagatcaatacaagtacgtaaaggaggctgtaaaagcatatcctgaaatatattttgctaagttagtcatttttggggaaggtgatagtgaggaaatactactacctaaattttttgaagcagatggatctggtcttgatagttctggagtatccattgttcctttaggtggtcgtcacgtgaatcatttttggcggctagttgctgatttgggcattccttatatcactttattagatcttgatcgtgaacgtgaaggcggcggttggggcagaattaaatatgtaattaaacaacttttacagataggtataaacagagaagaacttctaaagctaaaaaacggtaaacttttagatgatgatagactcaatgagatgcattcttgggcagtaacgaatgttgataatatgaataacattatcactcgtctcgaaaatcataatgtatatttttcttcccctttagatatcgattttatgatgttggaaagttatggtcaggactacatttcaactatttcagatagagaagggccacgaataaagttaagcggcaccaacaaaaaagttgttgatttaaacgattcagaaaaagagttagatgaatttaaggaaagaattatccatgatatcggaaaaactttaaaaaacaatgatgctaccggaactacttacagcaaaacgcaaaaggaattaatgatttggtataattatttctttctaaatcggggcaagccaagtactcatattgccgttctttctcaaatatctgattccaagttagttgaacaatctccagaagttttgactcgaatgatgtctgctgcaaaaaaacttatttcagagcagagggaaaattatgagtaa

SEQ ID NO: 72191 - DNA, 1863 bp, Enterococcus faecalis OG1RF
atgagtaactatacggatatttcagaatggactcctgcttcaggtttatctttagaacctaatgctattaaagcagttaaaaaagaagaaaatattcttgttgttgcggggcctggagcaggaaaaacagagttacttgcccaaaaggctggctatctattttcaacaaatttatgtcccacaccaaaaaagattttggcaataagttttaaaaaagattccgcagaaaatttaaaagaacgcattgataaacggtatggtagaaaatatgggaatcgatttacttctctgacttatgatgctttcgccaaaaggatgttagatcaatttttcatggctttacccgaagaaagtagaccctctaaagattatagtatagggaacagtgaagtaattaaaactgctttttttgagtgtgggttccagaataaagaaaatatgcgagactatgaattgaacaagtattttgataatcttctagcatctgtttcatttcctatgaagaattctggcataattgaaaggacttggagcaaattattaaaaggaagcgagactgtttcccctactttgactttcaaaatgatttccttacttacgacttacatttttcaagcaaatgctttcttaactaaaagtctaagagaaacatactcacatgtctttcttgatgaatttcaagacacaactgatattcagtataatttagtgaaaacatgttttcagaattcaaaatcactcattactgctgtcggtgacaataagcaaaggataatggtttgggctggtgctagagagacagtttttcgagatttccaaaaagatttttcagcatcaaaaattgatttaatgatgaatcatcgatcagcacctagacttgtggaattacaaaaaatgatgtacgaagtattaagtgaagaccctgtaaatattaacacatctggaagatggcaggaagaagacggcgaaattgaattactattaacagataatgacattgaagaagctgaatatattgcaaaaaatatttctcgacagatacaaaatggaattgaaccaagagacatttgcattctggtgaagcatactccaaataattatgtaggaaaaataatcgagaaattacaagagtatgaaatacgtgcaagaattgagattgaatatcaagatttgttgaaagagtttatcactaaattgattattagctttattaaattatcgattaatcgtcaatctcctgatgaacgagaatatgtaatgggcacaataatgactttaaaagggattggagaaagtacttttgagactaggtacaatacagaacaaagaaatctatctagtactcttgatgaagtttgtgaaagactaaaatctgttgactctcgagttgatttgaaaaatattttttcaaatattttgagttattttgatgttcaaaaattaaaaactatgaatcctacttatacacaaggattattttttgatagactagttgagcgtattgaagaacttttatggaatgagtatgaacaagtttctaattgggacaaggccatcgaaaatttcgttggagagaattcagtttctattatgacgatacacaaaagtaaaggattagagtatgaagcaatttattttgttggtcttgaagatggagcgttttggaatttcagaaatcagcctgaagaagatcgtcgtgcttttttcgtagcaatatcgcgtgcgaaagaatttctaacttttagcttttgtaagcatagatcaggtacaaaatttccaaaccagaagcataatactatcaatgaattttttgagttgcttcaaaagcctgggaatgctaaagtgattgatttaactaattag

SEQ ID NO: 72192 - DNA, 2190 bp, Enterococcus faecium E1636
atgtttatatctactcttcaaattcgaaattttagaaattatgaatccgaaatctttcgattcgataatgagacaaatactattataggtgagaatgattcagggaaaaccaatgctcttactgcattgagaatcttattagatgatagttattactatagtagtaaaacactgaaagaatcagatttttttcatggaattcaaaatgggtggcaagggcattggattattatctctgcgacatttgaaggaatcagcgaagaagaatttgacaatgagatttgtgcttccatttctttaaattctgaaagtcaaacaatcttagaagaattgatttcaaatgcagataaaggtgtaggtagtatttctctatttattagacctaacaaagctattagaaagcaattatttgatatttccactgaattagactctcatcaatttaacgaatttagaaattctattcgtctatccgactatgaattttactacacatctaaatcaaatctaaatttctgtatcaatgaaaattatgataaattggtaggaagactcaatgacaatatagctagtaatcctgaagaagacgatgaagctcttttgggctcaagaattgacatgtcagatattttcaagcatatttcggttgtttatgttgacgctcttcgagatgttcttagagaaatgaaaaacaatcgaaacccagtcaaaagaatcatggaaacaattgaatcaaaaatatcatcagataatgttgagtcattaaaaacaattatacagcaattaaatgagactattaccagtgttcctgaaattaggaaaattggcgaaaatattaatcggcaactaaatagcataattggttcagtgtattctcctaatcttcttctttcctcaactatgtcagatgatatgggttctttagcaaaatttctttcaatgaagccagaacaaaatatcgacttagacttactagggttaggacatctaaatatgatttatttagctttgaaaatagtcgaatttgaagcgtgtcgttcaagagaactacttaatattatgttgattgaagaaccagaagctcatattcatcatcatattcaaaaaactctgttcgaaggattaaatcttcaaaaaaactatactcagattctcatgaccacacattctgtacatttagctgaagtgtctgaaatatctcggatgaatgtattaaaatcgtttaatggcaaatctatcgttatgaatccagcaaataatctgaactcatttgctaaagaaaagttaaaaaagaacaatctaaatctaataaacgcagtagagagatatttagatgttaaaagaaatggattgcttttttctaaaggtgttatcttagttgaaggagatgctgaagaaatacttattcctcaaatagtaaaaaaattatttggtataaacttagacgaacttggaataggtttgattaatgttggtagtacttcgtttgaatatatcgctagcttgtttgacgatgatagaatacagagaaagtgtgctattgtaactgatttagatgaacaggcaatcccatcagaacatcgattgtataaaagcactgcacaagagaaaggtcaagcaagaaaagaaaaattatcctccctttttaatgaaaacaattgggttaattgtttttatgctaatacaacatttgaaattgagtttttagatgtgaataaagaaaatattctaacttatgtcagtccaattatagatgacgcattcaaagataaaaaaacaataactgcttataaagaagaaatacaaagtgaacaatatttagaaagaaatttagcgatgttaaaactagccaatcatgttggtaaggggtggtttgcaattgagttaggtgaaaaaattgactttttaatcaaaattcctaagtatattcttaatgctattgcttttgcatgtcaggaaatagtagatctctcaatttataaaaaaattctactccatacaatcgacttgtacgaggaaactacagaattgtcagctttatcagctagtttaaaaacaagtgatacagctgatttgaatatagcaataatttctttattagagtactttggtaaagatgaggatgttgtgtatctaatcaatcagatagaaaattacacaaaaatactttatgctgaggtttcaaaatga

SEQ ID NO: 72193 - DNA, 1794 bp, Enterococcus faecium E1636; identical to SEQ ID NO: 71697

SEQ ID NO: 72194 - DNA, 2175 bp, Pseudomonas syringae pv. tomato T1
atgctggctctgcgaagatttctggtatccaaagcctccgcgtttcgccttcaggatctgacactttctcatttggtaaccatagaggcgattgggcaggcctgggaggctgcaggcgccatcccatcggccaatgactgggcagaatggttgccgacgctggatatctggatatcggcggagcaaggcgagctgcatcacatccgagatctaatacctaactttgcttggcgcggtggtttggtcgggatgcggttccggctcgagccggaggacatggaagacctctatgtggactaccgcaagcagagagaacgggtagagatactgaagaccgagattcagagactggctgccgaaggcgaggatccaccacatttacctctttggcctcaaagcctgcacgactacctcaatcgacgtctgggaaagatgttcaaggtgcgctggtatcgcctggatcccgcccagcttcaagacccagatccgagaactcgctctgccaatcggcaatcactctcggcaacttcagtggcattggagcgcaatccactaatcaatctcatccgtgtacatgagatcaatgctcagcgtgggttcggtgacagtgctgacgagggacatgacgatggcaagcaatctggtggtagaaagctttcggaacagcttcgtgcctactacaaccgtcaccttgatccaggagatagcccagatatttcggatttaggtgcgctcagagctatcgaagcagcacaagtggctttcgatacccgattaagcaccagcttcgaaccggcgctgaaggaagtcgctgggttgggatatcccaacaacagcgatccgagtattcgggtcgcgaccagactcgcgcccaccgacgggatgaatcacgaagcagccgtcctgtttgagctcgactccataggtggcgcacctggcgctcctccccttcggctgccagagacgtccaacggtctgggatatcaaaatctcatttcgatgattttccggctcatggcgtttcgagatgagtggctgaaaaaattcagaactgctgacgagcagagcgccgctggagttgagcccattcacctgatgctaattgaggagccggaagctcaccttcatgtacaagttcaacaggtgttcgtgaagcatgcctaccatgtgctctgcagagaccctttgcttgagcgtttcccaaacttgaaaagccaactgatggtgagcacgcactccagccatgtcgctcatgaagttgagtatcagaacctgcggtacttccggcgtctacctgctggcatggacggcgtacaggtgccggtttcaacggtatcaaacctctccaccgtattcggtaaaaagccccaaaccaaagatttcgtcacacggtatcttcgggcacagcacgccgatttgttttttgccgatgccgtaatccttgttgaaggcgccgccgagcgcatgatgcttccgcactttcttcgaaagcattttcctttccttgaccagtgctacatcaccattttagacatcggtggcagccatgcacatcggctgctccccctgatcgacgcattagggatcgtaacgttggtcatcaccgacctggacgctggcagcctgagatctgctcaaccagtccagcgagatgcgggtcaacagacgaacaaccctacgctacgtcattggacaaaagcaggtggcctgccccacagcgtggacgcattgctcgctttggcggatgacctgaaaacccagcagatcgaccagcttttcgcgatcagaattgcttatcaaacgccgatcaatatccacctgccactgaccggtgaacaggtcgagatgctgccaaacaccttcgaagacagcttggtacttagcaatgcctcacatttttcagccaagcaggtaaggcgaggtttgatgcgtgcgtttgctcgggccctgaacggagcagagagctcgaacaaccttgccagtcttttatttgagtctcttcgagacggtgacaaagccgagttcgctctacaggttctaggcgatccaggctttgccgaactcactatccctgaatacatccgggagggactgacttggcttcagtccaagctggagcgcaagcagcgcgaactgttagtcgttcctacagccatcacggaggtgacggcgtga

SEQ ID NO: 72195 - DNA, 1896 bp, Pseudomonas syringae pv. tomato T1
gtgagcacgacgaacgacggcctatccgaaatagttcaaagagcagagcctgatgcggccctcgatgccgatcaaatcattcagacctgcctgaaccttgatcgaccgaccagttttttcctgtatgccggcgcaggctcagggaagacgtattcactcgtagaagcagtacgcagcttcaaggaacgagaacgcgagagactcatttttgaaggccggcagattgcgatcatcacttacaccaatgcggcgtgtgacgagatcttacgtcgcctggagcatgaccctctagttatcgtttcgaccatccatgcttttgcttggcggatgatccaaggcttcaacgatgacatccgcgagtggctacgcgtcaagctgggcgaggatatagctgcactgcagagacagctggatcgttccagaggcgaaaacaagacaacccaaaccaacagagccagccgagccagaaaaatccgccggctcgaggaactcgaacaggtaactacatttacgtacagccctacaggcgaaaacaggggacgccaagcgctgaaccacagcgaagtcattcagatggccgcagcgttcatacagcagcagccgctgcgagatgtcatgaccgacctacacccggtactcctaatcgacgaaagccaagacacttatggcccgctgatggaagcgttcttgatcgttcaacaacagatccccgataggttctgcctaggactactgggcgacaccatgcagcggatctactccgacggcaaagcaaatctggaacgggctattccagaacactgggcgaaaccggagaaaaagatcaatcggcgatgcccgacgagggtgatcgatttgatcaacactatccgagccagcgctgacgatcattggcagatccctaaagagggagccgttgaaggcgcagtacgcatgttctgcacccgccaagtggctggccgaggctttgagctggaggaggaaatcgctcaccgcatggccgcatttactcaagacgcgcagtgggcagtgggtcagtcagggagaaagacactcattcttgagcacaagatggccggacgccgtatgggattcgagggagtctttacccccctccacgccgctgagcacctccgaaccggattgttagacggcagccttcctatcttgaaactcttcatggacgacgtgatgcccatttcggcgtcggcgcagcaggatagcttcagcctaatggaggccgtccggatgcgctcgcctctccttgagccgcgtcacatgaaggaagctcccgaccagcttgctttgatggaacaagtcagtaatgccacccaggagctcctcgctctattcgaggagaatgatcccctcatcgctgatgtggttcacgtgatcttgagcaccggccttttgaacgttcccgaccgcctgctggccgcgcaactgctcggagtcacagatgaagaaccgcccgaatcaatcgaccgagaaacgctcgaaatccacgcgtatcaggtggtgctgggacgccgtttctctgagatggctgccttcgccggttacacccagggcctgtcaccctttgacacccaccaaggcgtcaagggcttggagtttccaagggtcatggtgatattgaatgacgaggaggctgggggttttctattcagctacgaaaagcttctcggggtacaaccgccctcagcgaacgacctaaaaaatcagcgcgagggtaatgacgactcactggcacgcacccgccgattgctgtacgtaacatgcagtcgtgccgagcagagtctcgcaatcgtggtgtatacgcctcagcctgaagtggcaaagcaacgcgtgattgacgctggatggttgaaagctgacgagatcgagatcatctag

SEQ ID NO: 72196 - DNA, 1890 bp, Geobacillus sp. G11MC16
atgcacttatctaaattagttatcgagggtttccgatgtttcaatgaaaaagcagagatacctttaaataaaggactcacagtcattttaggggagaatggtagcgggaaatctgcaatcgttgatgcaattcggttaattttaaatgatgacgaatttggcaaatcaatggtttcagaaagagatttttggcactcatttggtgaaagtaaaaatgaatctagtacgagcttccgtatagatatagaattttctaaattgaaacctgttgaacaagttgcatacttaccttggttaaaaacagaagatttaagtacagcatctttacacctaaaagtgcaaaataaaactaatcaaaataaacattacaaaaaagagttatggggcggaaattcttcgagtagtagttttgagtgggatacatataaatctattcaatgtacatacttaccgcctttaagagatgctgaacaccgacttagagatgtaaggggatcaagattagctcgtttaattacaaaaatagaaccagaaaacagtgcaaaagaacgtttagtggaaacagttaaacaaaataatcaacaattgctaaaagacgaactaattgtaaaagcgaaaactaacattaaatcacgtttagtagagacattgggagaaaaacttgctcaagatataagtatttcattttcagatacacgatttgagagaataattgaaaatctaaaactattattttatccatttctggatgatagcacgtcaatagatgaatttagagaactatctgagaatagtttaggatataacaatttaatatatttggctacggttcttgctgaattagaggatgtaaatgaacaagagatatcttgtaaaatcttactcatcgaggaacctgaagctcaccttcatccacaacttcagacgaaacttcttgaatatattgagaaacaggcaaaacttaaaggtgttcaagtcatagttactacacattcccccacaatagcagcatcaatagatcttgataatatacttgttgttaataaaaccgaattaaatagaagtcctgtaatagtacctttaacaaatgtgggactaacaccgaaacaaaaattttttttacaaagatggatggacatcactaaatcaactttacttttcgcaagggggattattctagttgagggaattgcagaggcattagtaatcccagagttagcaaaaagggttttacacaaacatttagcttcaaaggatagaatatcagagtactcgttggaagaatatagcgtttcaataataaatatgggaggcatatattttgaatcattctttcagttatttataaatgctgaaaaaaggggagagggtatcccaattagatgcgccggaataactgactgtgatcctgataaggattcgactccgtataatggtaaagaatgtgattgtaagaatccagctttaaagctaaaaacaaaaataaataatagcaagtattgtcgtttatacagcaatttaaaaacttttgaatatgacttagctctagccgaggggaattttcctataatggccaatactcttcttgaaatcatagaaactgatggacctactaaaaaacaaataaaagaatacataagattatttccagatgctcccgttagtgaaaaagctaaaatggctaaatatttattagataaaatagatgattccaatatttgtggcaaaggggttttctctcaacaattggcttataaactcgcaaataaagaaattgaattctctgttcctgaatatattgaaaaagcaattttatgggcatgtaagcttgaaggtgatggggggaataaaggtggggaatcaaatactgttgaaaaatcaaacgaataa

SEQ ID NO: 72197 - DNA, 1848 bp, Geobacillus sp. G11MC16
gtggggaatcaaatactgttgaaaaatcaaacgaataagatggcactaatacaatctgttttgaaacataaagacatattaaatatttcatcacaacaagctgattttattttgcaaccattaaattatgattgttttcttagtgcctgtccgggaagtggaaagactcattcagttagtctaaaattcgcctatgaaattaataattggatttctagaacaagtggtatagcagttctgtcttttactaataatgctgcaaatgaaattaaaaatagagcaaataatattcttaaagaaaaacaagttggataccctcattttgtcggaacaattgatagttggatacatgcgtacatttttcatccctttgcaaatgaggttactggctatactggggaaaatgatgattacactcataaattaatacaagatggtaaccacggtccttggataggaaaatacaactataatggtatttctattttagattatacatttgataaaaatgatcaattaatttttatcagtaaaaaagtgaaaagtgacaataatccaaatattgtaaaagtgttaaaaaaaaacaagctgaaatttgctaaagatggcttcgttacttattcagatatagagtattgggcttttaagttattacagaaaagaggagacatactagatttaatcgcaaaaagattcccctttattattattgatgagtgtcaagatttatcagagattcaacttgagatttttgaattattaaaacatgcgggtgtttcaattcatttagtaggagatttagaccaagcaatttatgaatttagaaatgtatttcctgataaagtaagaaataaaatcaagttatggaggttacaccaattagaattaagtcttaactatagaagcgtccaacaaatttgtaatgttattacaaagttatctggaaaacaacaaattgttggtattagatctagtctcaataaaagttgtttactttgggtttatgataaaaaggatgatatgcataaagttcgagatgcttttatcaagttgttaaataaaagaaatataaatatcgatgatgcagtaatcattgctaggggttcttcattggtaaataaaataaagggttatgaacaaaatagtaaattagataaggtcaagaacagtatttcatttaagatagctactgcaatagcacattggcaatcagctgatgttttagataaacaatatgctatacaaacccttggaaatgtattagttgatttagcttatgatggtaaaggaattaaaagagaaaatattaaaacaccatttgcttatcaacccatggaatggcggttagcccttaaaacctgtctcgatagacttgttgaatctagtgaatttacaaaaaatgatgattctaaacagatatggaaggattggataaaaaacgttttaaaaaaggagtttgaacttttttggaatgaatttaaagaagtcacatgttcatttaataatgtatctacaagattaaaatctccgaataaacttactgacactcctatttcaaaaagcttattgttaggaaaatcaaatgctgattcaaaaatcaaagtagacactattcatagtgttaaaggagaaacttacaaagcagttttatttgtatctgcgccaactaaaaattctgagggaggatattttgaacactggcttcaaagagatacagaggcaaacagatttgcatttgttgcgtgttcaagacctgaagaacttttggtattagcgattccggaggatactgaagaaatacataatcttggattttatcaagataacataaaaaactattattcatag

SEQ ID NO: 72198 - DNA, 2427 bp, Yersinia kristensenii ATCC 33638
gtgtcaattctttctaattgtgcctcaagagcatcaaggttgaaggactcgggcttgcggcgtggcgctaagctgctacaggttggcgcatccctatacggattgagaggagccacaatgtcagcagcagacgccactacatcattatctgggcagatatcccttcggtttgttgagctttgccagttccgccgacttggtaaggtccagcttgagattgatcctaagactactattctcgtcggtgctaataatagcggcaaaacatcaattctggcagcgctgcgccacttcctcgcagatggctcgtcatttggtgctttcgacatcagtgtttctcaatggccaaaattgcgggaacttggaagagcttgggacgcattagaagaagacccatctacgtctggcgcatccgaaggtgaatgggaagagcaactcggaaccttactttcggcgatgccaacgctagatctatggttcgatgctaaggccggtatgttccactatgtctccccgttcttgtcaaaattcagttggaaggggggtggggtaggtgtccgattgcgtctggaacctgctacgaacattgaggagctgaagcagttggcttggaagtatcacctgacgagaatacctgtgaaggatatgggaaaggattcgcttgcgtggccgattgatcttcttgatttttggctgcgagaaccttctcaactcggccaggttcgggcctataagttagatgccgataacaaccctttggacggaataaagacctacgttagccaggtactggatgctgactctagcccaattgatcgtaagcacctgcagaaacttataaaagtagactttgtggctgcacagcgtggccttggtagtgaggaagctgattcccgatctgcttctggcccccatcgcataggtttattctccaaccagcttctcaaatttgctcgacagcacctaaatgtggctgcaacaggtcatgggcaccgagctgacctcataaaagctgttgctgaggcgcagcaggaactagataaaaagatccatgaggctataggaccttcggtagaagaggttaaagagcttgggtatccaggcttgcatgatccccaagagattcgtttccgaacgcgcatacagacagctgatttactcgaccatggaaccgctgttcaatacagcatgcagaaggattcgttagaagagcttctcccggaatattccattggtctcggttatcagaatttacaatcgcttagttaccaacttgtttctttcaaagctgctcgcctaaatcctgaaaagggcgctccagtacctgttcacctggttatgattgaggagcccgaggctcatttgcacgtccaggtacaacgtatatttcctggcaaggcacataagttaataagccctaacggtagcgatgagttaggacttaaaagccaattgattatcagtactcattctagccatctagcacatgctgagaattttgaccggctacgatatgttcgccgcattgctaagagtgatgaacaaaccatgcctaccactgaggtggtcaatcttgggcaagtttttggtgatgataaaacgacccgtcaattcgctgagcgttattttcgcgttcagcacacagatcttttattcgccaatgctgcaatctttgtcgagggggttgctgagcgtatgctgttgcctcttttcattgaaagagattttgcaatactcaacagtcgctatctgtccttccttgatattggtggtagccatgctcatcggctaaggtctctcgttgaaagactccgtattcctactgtaattattacagatatcgatcctgttgaagaaaaacttggtaaacctaaaaaaaatggtgaaccagctagaaccttggttgctgtggctaatacaggacagcccgggctgcaatgcggaaacccgactcttcgtggatggcatcctaagctgcaacagcttgaagatttcaagaatccgaaagatgagcatcttgtctggaacgaaattgccgaatgttctgtccgattcgcatggcaattgcctgtagccgaagccgatagtcagtggccgagtacttttgaggattcgcttatcctaagaaatattccttggtttaaggagttgatgaatgaaaaggtcgatgacgaaggcaagcaaataacgccgccgaaaggcgcgctgggctcagtagcaagacaggttgctgaaaatgataatattccagaactgctcgcggccctgcataaattaatgcatgggtcttttaataaaggagactttgccgcaagcatctttgaaaaggtcgctgcggaagagccgattgtctgtcctaaatatatcgtggatgcattggaatggctccagacacagcttgagccaagcaaggaggtgataccatga

SEQ ID NO: 72199 - DNA, 1812 bp, Yersinia kristensenii ATCC 33638
gtggaagttttacgtcgccttactggtgtgtccaagcatgagaaaggggggcaattagcacggtccctgaagatgtatgggcgttcgattagagttgtgacctacaccaagaatgctgtctctgtaatcaacggacgtcttggggacaataatttagtcagtgtgtctaccatccattcgttttgctgggaattgattaacgggtttaacgatgacattcgtgaggctcttattgcattaaaagaagcgcaacttgctagagacactgcagaggcggaagcaaaaccgagaggtataactccagctaaacaacgcgctctcgacgaaattatagatgaaatcgaaattctgcgagcgacagaagtattcatataccatcccgaccgtaatacgtatggtccgggtgctttaccacacaattacgtactggacgcgactgcatggttgcttcggaataaaccgacacttcaaagtattctcaaagatcgacatccaatcatacttattgatgagtcgcaggacacgatgaaaggtgtactggactcattgatgttacttgccgaaaagcgggagcgagatttgactcttggtttgctgggagatcatcgacaacgaatttatacagatggtcatgcggatcttccaagcattgttccggaaaactgggcaacgcctgagttacaaatgaatcatcgtagtcagcgacggatagtcacactgattaataaaatctgggaaactgaactggaaggcaggacgcaaccaacaaagggttcagcacaacatccccgaacggaaaaagctggtggaacggttcggctcttcttgggggatacatcacgaagtccagaagataaagtgcttagtgaacgctggtgcgctgagcgaatgtttgaaattagtggcttagcagattggaatcaagggcaatatcagttgcttgcgcttgagcataagcttgttgccactcgtggctcgtttcttgatgtttatgaggcaatggttctgttagatcctcatgcagcagcgccatctggcagtggtgataataaggggccttcatctgtacaaacattgcttaatgaactggcacacttggaagcctgtataagcaatgacgggattctaaatgagttcatggcaactgaggtttttagacgatatggcaggttagataatattcctcaagactatgaagcaagagccgcacgtactgacgaaatactcaaggcggtaaatatatttgcggcggcttgcgctcaaccagagtcaacggttgctgatgtgttagcgccagtcttgtgtgcaagcttgttcgagatagatcatcgccttcaggaggcttatgccgataagtcaccaacccccccagctcctggacgaggtgaggatgagtcaaaacaaacaagaaggcgccgtggatggtgtgcactgtttgctgctccatggaaacaacttaagtgctatcggaattaccttgctgggatttcagagcttgcaacacatcaggtagttaaaggctctgagttcaagcacgtcatggttgtaatggatgatgagcttgccggagggttcctcattaaatacgacaaggtttttggcggtatggagctaagtaaacgggacaaagataatgctgaagctggcaaagagacaaccatcgaccggactttacgattactgtacgtaacttgcagccgtgcgcaagaatcgctcgccttagtgctttggtcgtccgatccagctgcagcaatggctcgaatcgaggaaagtcagtggtttgcagaagacgaggtacaaatcatcccatag

SEQ ID NO: 72200 - DNA, 1992 bp, Marvinbryantia formatexigens DSM 14469
atgtatttaaaaaaacttattataaaaaattttagaatatttgatgaaatgggtatagaacttatttttaataagggcgtaaatgcaattattggagaaaacaattctggtaaatcttctgtaatagatgcgcttaggattgtttattcaactgtgacatatagaaaagacatattcttttcaaagtcggattttcatgtttgtgaagatggaacagtggtagactacactcaatttgatgtgtatttggaggatgtacctcgtagaatgacggaaatctggaatccacaaagtgagagtggcatgggaggggattttcatattaagtttgaaaaatatatcgctcccaatggaactgaaaaggttcggtcagtttattggggatttggaacagaaggaaatcaattatcttcagatacatttgaggcaacagatgtagttttcttgggggcactgcgagattcagaaagtgagatgaaaccttcaagaaacagtaaactggcacaattacttcgaaatttggttccagaagaagctgttagggaagaattagttcagattttgaataacgcaaataatgatttgttgaaaaaagaacagttaaaaaagacgagaaatacaataaatcaaaatcttgcaagaattgaacaggaatttttaaatcaacagattgatattggcttagtagaaccgaggtttgattcaattgcatcttccctacgcgcatgggttaagccaaaatggattctaataaataaggaagatgctgtttatgaaacggcacatacatattttcaaagtaatatggatctgaaaaaaatacaagatgatgcaaagggcatatattttgaaatctctattttggatagtgagactgaacttgacaagaaagtagcagatagaattagtgaaatagcgaataaatcttttgaactatatcagaatggcttgggatataataatttgttgtttatgtcagcagtacttggtgatatggcaattgagaggggtggagtttatcaaaatcttttgttagtcgaagaaccagaggcccatctgcatccgcaactacaggaattggtacatgattttttatcagatgcaaataaaaatgatggtaatatccagataatttatacatcacattctcctacgctggcttcaaaaatagatatagataatattaatttgttatatgagtatgggcataagaaatattgtttgcctttctcacaaacaaacctaacagaggagaataaaaaatatttacagaggtacttggatgtaacaaaatctcagatgttttttgcgcgaggaattttatttgtagaaggaatcagtgaagcaattttacttccggcaatggcgaaggcattgggcagaccttttgaaaagtatgcggtagaattggtcaatgtagatagtgttgcatttacaccatttgtaaatctcttatcatctgataaagttaagacctgtttttcaaaagtgtccgttattacggatgatgacagatgtgctaaaaagaatgaaaaagactatattgacaaaaattatgattatgatgatgtcagtagtgaagttgctacaaacctacaaaatggacaaccttcggatagatgtaatgatttgacaacattatgttctggtgcggggataaacatatttacggcaactaaaacattagagtatgcattatgctgtagtgaaaataatgtttattatatggtagaagcattgaaagtatgttatacggaattgggtccgaagttagaaacgaaggttagctcgttatctcaattaagtgaaaaagcagcatgtgtatggctgtttataagaaccagagataaatgcaaaggagcagttgcacaatacataagtcaagtaattagtgaccagcatgaattaagaaaaaaaggaaagaaaattaagaaagagtttgttatcccagattatttgaaaaatgcgatttatagtgtgacggagcaatag

SEQ ID NO: 72201 - DNA, 1767 bp, Marvinbryantia formatexigens DSM 14469
atggtagagaaaatgacggaagaacagaaagaatttttgaatgcagagggtaaggtggttataaatgcctgtccagggagtgggaagacgtatactgttgcacataaattactatcgtatgtggataattgggaggattaccacagcggtgttgcagtattatcatttacgaatgtggcaagtaatgaaatatatgaaaaagcacaatcaattcatggtagtttaggtaaactgggatatcctcattttattggaactgtggatagttttattgatgaatttattgtgttgcgttacggtcatttgcatactgttggtaaagtgcgtccaagaatagcactgtctgataactggaagataccatacaaatattggcggtcagaatgcaataagaatgggtgtgtagataatatagagcaattttattatggagttgataaaaaactttataaaggaaatgaacaggtaatttgtgaccgaagaaaagcgaagatgcttccatgccagcaatataagaagatgttgtcggacaggggaattgtttttcagaatgagacggcgttattcgcatatcaactattaaagaagtatccggaagtggcagctgctatagcggaaagatttccgataattattattgatgaagttcaagatacatcgataagtcagatggcagtttttgacttgttaagtgaatcgggaatgaaatcaatatttttggtgggagatccagatcagtcgatatatgaatggagaaacgcaaatccaaagtgtatgctccagaaattagaagatccaaattgggaaactatagaattgacggggaatttcagaagttcacagaatatctgtaatgttacttcgcttttttctgccagtttgcagggaaatggtagcaataatgcaataggtgaatggaaagacgaaaaggaaaagccggttttattgctgacaaagaaaaattcggaggatgaaattattaactactttcttgataagtgcagcaaaatggggatagagatattgcccaagaacgttgcggttttaaccagagggaggatatattctgatacagatatagcaggtttatggaaaagtaaagaaatagaattattcgctaaagcggcatatgaatggaagtgtggttcaagaaaaaaagcctaccaagaggcatcaaaggcatcatatagtatgattttcaatgaagatatagatgaatatgtgatgaaccagaatattcggaaatataccgatgatgatacatggaaggattatgtaatagatattttggtagatatgcctgatgatgaaacggaaattggagaatgggtaaaaagcttttcaacgtttttttactcagtatgtgctagatatggttatgaaatatcaatagataaaaaattaaaggatatttttaagataaagcagagtgataaaaagacaccgaatttcaaacaaataccgttaaggaaatattttgagaaaaaaacagaaggtaagtatacccgctcctcaattcatggagtaaaaggggaatcttacgatgctgtgttaatttatgttaaaagccgtacagggagtacaattactcccaaattacttatggaagggcctcttgatcaagaattaatgcgcttggcatatgtagcgatgacaagaccgagaagactgctcatgcttgctatgcttgataccaagggaataaagacttgtgagagattttcagaaaaattgtggaaatatgaagttttagaaggcggttcataa

SEQ ID NO: 72202 - DNA, 1719 bp, Vibrio albensis VL426
ttgaggatcgtcatgatttggctgtcggtaaattttgatgttttcataaagaatctcctgcgtttatggtacgagaaaattctacttttgacgtcagttaatttatggggtgattaccgagtcgatacaattgaagctcagagagggtttactgacccccattcagattcaggaaagactgttagtagtctgtcctcacaactcaacgagtattataagcgccatttaaatccgtctgagatgccagaagctgaagacttaggtgcgttagaggcaattgaaaacgcgcaaactgaattcgacaaacggttagataccgcttttgagaaaaccttgggagagattaaagagctagggtatccaggttttaccgatcctgatataaaactatcgagtcgattgaacccaatcgatactttagagcatgatgccgcagttgttttcgatgtcagaaagcagaactttggagacaatacattttctcttccagagcaatacaacggtttgggatacaaaaatttaatccatattatttttcagttgatcactttccgtgatcgttggcttcgagttgggaaaatagggaaaaagaggtcgaacgaagatattgctattgaaccaattcatctggttttggttgaagaaccagaggctcacctacatgcccaagtgcaacaagtttttgtacgtaaggcttacaaagttctcagagagtatggtcaggtgaaagagcaccttactacacagatggttattagtacccactctagttatgttgcttacgaagctggatttgaaacccttcgatatttcaaaagaaagccggcatctcaagaacaaccaacacctcaggctgaagtggtgaatctttcgactgtgttttcttcgcagacaaaaggaaaatctgatatgtcagccacgaacaagtttgtatcaaggtacttaaaaacaacgcattgtgatttattttttgcaaacgggattattctagttgaaggagctgcggagcgtatgctacttccacattttattgcccatcatcacaagaatttgcggcgaagttatatttctatattggaaattggtggtgctcatgcacaaagattgaaacctctcattgagctattaggtctaccaacactagtaattacagatactgatgcttgtagttcttcagggaataaagcacgtccgaaaagaggagcatctttatattttggtagcgagacactaaaaagttggtttaacttcagcgatgtaagtttggatgagttgcttgacttaccttctgaacgtaaagttcgagataatgtacgcgtatccttccaatgtggtattcatacaaagttctcgccaaaagcgagaaaatcaaaagaagttataccttatacatttgaagatgcagtagcactaacaaatatagagttatttaagaaattaagtaaatcatctggaatggtaaagaaaatgcatctagcgacaaaaatgcgaactctggatgcttgctgcaacgctatgtacaaagctctcgatggagagaaagcaaaaatggcattagacctacttttcgatgttgagccagaaaaactcttggtacctgaatacataaaagaaggtttggagtggttagagagtgaattagacactatgagtttagagtatgcatgggctccagaggcaaatacttctgaagacgtgaaggagtttgtggatgcgtga

SEQ ID NO: 72203 - DNA, 1863 bp, Vibrio albensis VL426
ttgtggatgcgtgattttaattgtttaaccggagtagatcgtgaaatctacgagtatctaaatcttgataatcctaggagttttcttttatttgcgggagcaggttcaggtaaaactaggtctttagtgaacgtgctacaagagatacgtgaaaaaaacttagcgcgcttgatccaaagtggtcagcgaataggtgtaatcacttatactaatgcagcttgtgacgaaatacagcatcgtttgtcttatgaccctctgtttcacgtatctactattcatagctttgtttgggagttgatcgagccattcactgaagatatcaaggggtggctaaagacaaaacttagtgccgatatcgatgatctagacttaatgatctcgaaagcgagagatatcaacggtaagaccactcaacaaaatatcaggaaaaaagaatctaaatctaaaaggttaaatgaactaactttggttaggaagttttcatattcaccaacaagcaataaagttgaaagaggcactgtttctcatgaggaagtgatacagataacagcgactttactaaacgaaagccatttactacaaaatatactaacgaatagatatccaatacttctaattgatgagagtcaggatactagaaaagagttaatggaggctttaattagaacacaaagcctgaaccgctcaaagttctctcttggattgtttggtgacctcatgcaaagaatctatagtggagggaaagatgatttagaaactgctcttcctgaagactggaagacaccatctaaaatagttaactatcgttcaccaaaaagaatcgtttcactaataaatagcattcgcaatgaagatgatggcaaaaaacaagaacctaaagctgaagccatacaaggaagagtcaggttgtttattgtcgattctgttagtgcaaataaatttgaggtggaggacaatgttagatacagaatgtcatcaattgcagatgatgcgctctggctggagccaaatcaaacaaaagttcttactctagagcatgcaatggctgcgaaccgaggtaacttcgacaagttctatatgccattatcgaaagtagatcatcttagggactcaatgttgaatggcactaactcttcacttagattcctttgcaatcaactcctaccgttgatctacgcagttaagacaagaaatgactttttgatagctagtattataaaaaaatattctgacgttattagtcctaacaatgttcagttttgtacagatccgatatcaacattaaaagaaacaaacgattcagttagtcgtgtcgcagctatggtagttgatggagatccttctattagcgaagtcttaaaattggtggataaaagcagtctactttacattcccgatgcactaaaagtacttcttgttgatgtcgatagagagtcaattgaaaatgaaatagagcctagtgaaacttcatttgcttgggaagtcgctttaaatgcccctttgagccatttgaataactattcttcatatattaatgagaagctggggttcggaacccatcagggtgttaaaggcttggaatttgatcgtgttttagcaattatggatgacgatgactctaatggctttttgtttaaatatgaaaagttgtttggagctagggcattaagtagcacagacattaagaaccaagccgaaggccgagactgcgtggtatcaagaacaagaaggcttttttacgttatatgtagcagggctcaaaaaagtttggctgtagttgcatacacgcaagacccagaagctgtgaggaataagagtttagcatctggttggtttaccgaagacgaaattgaaatgatgtag

SEQ ID NO: 72204 - DNA, 1992 bp, Vibrio albensis VL426
atgaaaataaaaaatgtacgaattaaaaactatcgtctcctcaaagatgtgtcattttccattgatgaaaaaacaacccttattgtcggacgtaacaataccgggaaaacttcatttgcggaggcttttcgcagttttctgaatcctgccggtccgaaggtgcgttatgaggatttcaaccaatcctgtcttacaggtttcgaagatgcgctaaatgctctgcaaggtggagctgaagatgatgttgttaggtccatgcttccaactatcgagctagagttactcattaattatcaagacaatgcggatgaatatggtgttctgggtgattttattatcgattttgacgaccagttatttgaaaccattattctgatttcttatcaattaaaagatggcaagatcagcgaatttttgggtgggctcgatagcgttaatagaaaacaatatttcgctgatcttaggtcgcggattgggttgcactacgaggctaacgtttacgcggttgagcctacaaacctgaacaacaaagctcggcttgagttttcgtcatttaaaaaattgctgctgtcgggtcttataaatgcgcaacgcggtttagatgacgaaacgcacaatgaacgtgatgtgcttggtaaatcgttaggtcatattttcaaaagtgcaagtagtgttggtgcgcctgaagcgtttaaggcgcaatcagcagaaatcaatactgtcgtcgaagaattgcaggaaatcgttgatactgattttcagcagaaagttcaagcattactaccaaccttaaatatttttggatatccgggtctgcacgatccaaatttaagtgctgcaaccgagcttaatgtgaaatcactgctggaaagtcacaccagagttttttatcaacgagatgatcattttacattgccagaaacctataacgggttgggaatgcggaatctaatctttatcctcttccgaatttatgaatattttcgtgagtttcaaagccatcaaacgccaccgaaagggcatgtaattttcatagaagagcctgaggcacatcttcatccgcaaatgcaggaagtatttattcggcagcttgagcaaattgtcgagcagttccagcgagagctaaatgaccagcaggtgtggcctgtacaatttatcgtgagtactcattcgtcgcatattgctaacgaagctgattttagcaaagtccgttacttcctatccaaaaatggaaacgagaccaaagttaaggatctgggcgttgctttccaaagtgaagaggcggctggcgacagagagtttttgcataaatacctgacgctcacaaaatgcgacctgtatttcgcggatcgagcgatccttgttgaaggggcgactgaaaggatattgttgcctcaaatgattaaaaaagttgatgttgctttaggtactaacttaaggcagaaatacctgtcagttgtcgaaattggtggcgcttacgcacaccacttctacaaattcatagatttccttgagcttaaaaccctttttattactgacctagacgctgttaattcgaaacagcatcatgccgctgtcatggtgagccaaggtgataggtcgagtaacgtcggcatttcaaaatggtatggcgaggatgggtattctgacttagcgaccattagagctaaagatccaggttctaaaattgtcggatgccggcgactcgcatttcagatagatgaagatattagtggcttatgcggccgtagctttgaagatgcttttatcttggtgaatagcgacttgttccaactcggtaacttaactggtgtgccgcttgagactgctgtctacgataaggcaaaagagatcggcaaaaagagtaaagctgactttgctattgaatattgtataagttctgcggattggctggttccaaagtatattcaggaagggtttgtgtggttagacgaagacccagatgtagctgttgcaggagtgcagccatga

SEQ ID NO: 72205 - DNA, 1857 bp, Vibrio albensis VL426
ttgtataagttctgcggattggctggttccaaagtatattcaggaagggtttgtgtggttagacgaagacccagatgtagctgttgcaggagtgcagccatgacaacactgagcccagcagcgcaggcatcagtggagacgctagaaagcttgcgaagttgtattgaacaagggcaatgtttcagattggaagctggggctggagcaggtaaaacatattcgttaattgagtcgctcaagtatgtaatctctttacgagcgaatgagtttgccatctcaggaaaacaggttgcatccatcacttacacaaacgtcgcgaaagacgagatcaaggctagaaccgataataatccagtcatttttgcggatacgattcatgcgttcagttggagtattttgcaaaactaccaggagcagttgagacaacttattcctacgcttggagcaaagtggcaagagagaattgcagaatcggcagggattagtcatcaaacggttaagtacgatttaggttttgcgtcgattaaagaacaagaaatttctctccatcatgacgacgttgtcgcgttaatggctcgcatgttggcgtttcccaaattccaaaaattactgaaaagcaaattcccaattatctttattgatgaatatcaagacacagatagcgcacttgccgagagtatcgtgcaaaacctgattgataatgactctggagttatggttggtctttttggcgatcactggcaaaaaatatacggctcgtctgcttgtgggttgattaggagtcctgcagggaaaatcatcgagattggcaaacgagccaattttcgttctgataaaaatattgttgaatgtctgaatcgcatgcgtccggaattacctcaagctgaatcagaccccagctccacgggaactataaaggtctaccactcaaatgattggcaaggtatgcggcaggcaggtggacattggaaagacgatcttcctgaggaagaaactagacgatttatccagcaaaccaaatcattaatggttgaacatggttgggatatgtcgttatctaaaaccaaaatactgttcttgacgaataacctgatagctaccgaacaaaaatttaagaatttggcggattgcttcaattattcagaagactatctgaaaaaaaatgacaaatacattgagttctttgttgatactgttgagttaacggcgcttgctttccagcaacgtaagtatggtgaattgcttcagattaaaaagaaaaaccgctcctacttaacgtcgcaagctgataaaactgcttggattgagaatttagagaagttaatgcgacttagagacacatctacaatcggtgatgttttagaccttttgataactacaaatgtgccaagagtacctgcaaaagtctcggattctgaagcccgctatcaaacactatctgtccgcgaccaagagtcattggcgccagatgaattgagatttgtcgagaaaatccggcgtcttcgcgctgtgccgtactttgaagtcataaatttggccgagtacatcaatgataaaacaccgttttcaaccaagcatggggtaaaaggtgccgagtttgataatgtgctagtagtttgtggccgtggttggaatcactacaactgggaccaaatgctcgaatggatggaagacggtgttccgcaaagaaatgccgaaacttttgaacgaaatagaaacttgttttatgtcagctgttcaagggcgaaacataatctaacccttctttttacgcagcgcctaactgataaatcacttactgcccttggtaaaatctttgggcatgaaaatatcaaaggctgtccatttaaggtttga

SEQ ID NO: 72206 - DNA, 2043 bp, Porphyromonas uenonis 60-3
atgtatataaaggaaatcaagatactaaacttccgaaacttcaaggaagctttgatacctttccatgaaggcgtgaatgttataatcggtcataataatacaggtaaaagcaacctacttcgtgcaatcgggttagtgcttggttataattatggtcataggttgggagtgagtgacttattttatgaaaccgatctagcagtgcttcaacagcagtcaccacggattcaaataactcttctccttcgtagaagtgcgggggaagccttggattctgcagaaatgggactcttctcaaatatgatgacagatcctgaattaagtgaggaagctgaattgagatacgagtttaaattgactgatgcagaagaagacaactataagtcagatgtagctaacgcaactacagctaaggaaatatggaaaattatagatcatgactacatcagactctatagaactagtcgcttaggaggtaatcaggcagcaggcatcagtatcaatgagactttgatgcagattgattttcagtttctcgatgccattcgcgatgtcagtcatgacctatacgccggttataatcctctccttagggatgtgctgaatttcttcattgattactcggttaagaatgattctacaaagacagaggacgagataaagggacaattaaaaactctgagagatggttttgtacaacagtctagtccactgatgcagactttacaagatagattgcagaatggcaaaaacgtgtttctgaagtacgcactcgatacaggcgcaacattcaacggagctgtacctgattttgatgggacggtgacggaaaatgagatgtttgcagtattaagaatgattatcaaatatgctgatggtatagaagtaccagcaacgtataatggtttaggctataacaatttaatctatatgtcgcttttgcttgcaagaatgcaggcggacagtagcatcacttacatgaaacgcaatgctaagatactctcattccttgctgtagaagaatgtgaagcacatctgcatccagctatgcaatataagttcctacagtttctacaggacaacaatgcaaatggacatgtacgtcagatattcataacctcccattctacccaaattgcctctgctgtgaagctggatgacttgatttgtctaacttcacctgcattagggcagattaatgttggatatccgcgtgacatttataaagaagataatgatgatgttgaatccaagcgatatgtccaaaggtttttagatgctaccaaagctgatatgttttttgccaacaaattgatattcgttgagggcattgcggaggagctgctactccctgtctttgctagatatttggacaagaaccttacagatgagcatgtgctggtgataaatatgggtggtcgctatttcaaacactttctaaagttgtttgatacaaacaatccacacaccatcaacaagaagattgtctgcttgacagacattgatccctgtaggaaaaagcatggatctgacgaggcttatgaagcctgctacccatatgagtacaatattgacgcagacaactacgactataagcatcatgcggatacagaggtgattcaatatgcagaccatcccaacattaggttttataggcaagatgtaacgtatggaaaaacactggagtatgacataatgcgtgagaatcctgattgtgaactgttattgactgactctgtttccaatttaaaggagataaaagctatgatggcggaagaggatgtgaacgagatgatgaataaaatgcgaactagtgaaactaattcccgtattaagacatccataggtgcatcggagtggacggatgaagagaaacgaaaagccttacttgcatcacgttatttgaactccgtttcaaaaggtagcaatgcgctggaactaaacgtggcgcttatggctaatctggagaaatctgcaacagatagaaaagagtttaatgttccccgatatattgttgacgcattaacatggctattatcataa

SEQ ID NO: 72207 - DNA, 1653 bp, Porphyromonas uenonis 60-3
atggctattatcataacatcagagcagaccatacctgtagacgaaccgtttaaggtgactgctgggcctggtgctggaaagacacattggttgataagccatatcaaaaatgtagtatcaaacagcaacaaacttgatgtggtgaggaaggtggcttgtatcacttataccaatgtgggtatcgacaccatcacttcacgtttgaatatgaggaatgacgtggttgaggtatgtaccatccatagttttttgtatgccaatatagtaaagccctatattcatctggtagctaaagaatttgggctggagttgagcaaacttgtggttatagatgactctaattttaagacagaaggaatagctatatcagtattgaagcttattaataagtcatgggtgaatgctagaagctatctgaaaggcttgaataatgccacgtggcattattcaaagcacgcatacaacgattataaaccaaggtacccaataaaggccggcaagtggttcgtgggcaatgattgctatatggggttcaaaagatggctatggagtagagggtatatgtcttttgatgatattttgtacttctcttacattctactttcgagatacccccatatatacaaattgataaaggctaggtatccatatattttcgtggatgagtttcaagatacaattccttttgtggttgacttccttacccagttaggcaataagggggtaattgtgggagtagttggcgataaagcacaatcaatctatgattttctcggtgctacagtgcagcaatttgacagttttactgttccagaaatgcaggagtatgagatacgagggaataggcgtagcacgaagcagataatagatttactgaatattgtcaggactgatttctcgcaagactggctgaatggattagaaggaatgatgccggaattgctagttggcgatatgcttaactgctaccaacagagtatagaaaagagtggaactgacgaaatacaatcactggcctttcaaaacgtacttgccaattcgatgcgtaagaagaacggagtgagagaagtcgaaaaaatattagagattgattttgacagcaatgcaggacgtcagatgattataaagacgttgataaaggccgtggaatatacaaaaatgaatgacttgcgaaatgcttggcatcaactagacatcatcaatcgcgatagaacaataaccattgtggctctaagacgtttgctagatggctataaggactataaagacggaagcctgatggatttctacaattttctagtgaatgatttacaactcaagataactaagataacaggcaaggcaatcaaggatttctacgtaaaccatacatacgctgatgctgtccttggagtgaagtatggtgattcaaatgacaagcataagactatccacaaatcaaaaggagaggagtttgataacgtctttgtcattcttgaaaaggaagaagacttggagttcctgttgtctccaaacctagatggcaacaatgttcatcgggtgtattatgtggctgctagtcgtgcaataaaacgcttgtttatctgtgtacccacattgagtgaagaaaactatatcaaactgaaggacatgccaataaatataccttcttag

SEQ ID NO: 72208 - DNA, 1926 bp, Xanthomonas fuscans subsp. aurantifolii str. ICPB 10535
atgcagctggcagtcgtcaggattagtaatttctggtccttcggtccagaaccagttgaagttaagctggattcgatgacttaccttctaggcccaaatggggcgggtaagaccgccgttctaacggctttggcgcgtatgttcggcaccacagggggcatgcgcgctgtgctcccttccgatttccatgtggcaatgggtgaagttccagcggaggggaaggccgcgagtctatggatcgagacagatttcacgtttcccgaggtcaaggagggcgagggcaccgcagctgttccgatcttcttctctcacatgcagctccaaagtgcgggcgaagttcccggggtgcgcattcgcctcacggctgagatggatgaaagcggagagatcgagcaacgcctagaatacgtgttggcagccgacgaggacggcgcgcctacgcagcttcgaggtatgcccaagctggatcggcaagccatccaggttcactatctcccggcccggcgtaacccggctgatcacatcgcatacagcgcagcctcactgctcggaagggccctccgagcggcagactggaccgctgagcgcaccaaggcaaacgatctatctgagcagctcggtgaggcagtcaccgaaaatgcgggcgttgcagcatttggtaaagcacttacagttgggtggggtaagcttcacaaggggaagttcttcgccgcccctagtatcgcttttggcacaggcgggctcgctgaggtgttgaagcaagtcagtgttcgcttctcgcccggtcacgaaacgccctcagtggatttcgagcgcctcagtgacgggcagcagtcattgctttacatctcgcttgtgttggcagcacatgcggttgatgtcgcggcgtttgccgacgacgagtcccctttcgaccgggcacggctgaggccggctgcgttcactttgttggcggttgaagagcctgaaaacagtctttcgccccagtatctaggccgcgtcatccaatcgctacgagacctcaaaaaagagtcaggagggcaagcgattgtggccacgcactcgcccgctatcttgcgcagagcgacccctgatctgatccgccatctgcggcttgatgctgatcgaaccacacaagtcagccgaattgttcttccggatgaggcgcaagaatctggaaagttcgttcggcaagcggttatggcctatccggaggtctacttcgccaagcttgtcgttctgggtgagggcgacagcgaagacatcgtgctgcatcgcatgcttggcgctatgggcatcgaggctgacgctgccagcgtctgcgtggctccgctcggcggtcgtcatatcaatcacttctggcggcttttatcgagcctgagtgtgccttatgtgacccttctggaccttgactacggacgctttggtggcggctgggggcgcatccgcactgctcatcgatatctacgttcttatccgaatggtcatgctattcgcaccatagctgagctgaaagtgatgtccggctggaaagcttcttgcctaacccctgagttcaaggcagagcgagaattccttatgcaggccggtgtcttctttgcatcgccaattgaccttgactacgcgatgatcatgaaattccctgaaacatacgggattgaccagtatgttcctacggacgaagaagagaagaaaagcattgcaaaagcggtcctgggtaagaatggaagtttcgaactgttcgagcccattgataagggctactttcgtgactatcaccgaattttcaagttgggcagcaaacccgcagcccacttacaagcgatgtccaagcttacggacgagcaactgttaaatggggcgcctaaatcgttgaaggatttgtgtaagcgcgtggtcgcgatgttggcggaagatgttgaatga

SEQ ID NO: 72209 - DNA, 1644 bp, Xanthomonas fuscans subsp. aurantifolii str. ICPB 10535
atgattacgccagctcagtggagtccagttgccatcgaaatgttagagcccggagcgaaggctgcgattacggcagttcatggcaacagcatggtcattgccaatcccggatcagggaagacggagcttttggctcagcgcgccgattttttgttcaggacgggcacgagccgttatcccaagaagatcttggccatctcgttcaagacagacgccgcgcacactcttcgtaggcgcgtcagggatcgatcgggctttaaccacgcccatcgcctcaatagcatgacattcgacgcatttgcacgtcggatcatcgcgatctaccggccgcttctaaagccgaaggaccggctggatcatgggttcaaagtcggcgtgacccgcgtcaatgccatccaagtagcgttcaaggagttggtgcctctggcgcaacaactcatcgagcagcatccgatgatcaagcgatccatcaacatggcttacagtcatgtgttcttggatgagttccaagactgcacaagcgcgcaatacaagctgatccacactttgttcaaggatacctccacctcgatcacagctgtgggagacgcgaagcaaaagatcatgggctgggccggggcgctcgatggggtgatggggaagtttgctgatgagttcgccgctgtgccgttgaagcttgtccaaaactggcggtctgctcctgccattcgtcgggtgcaaaaccgaatgatcatccagatggagccggtctcggctgtggcggagaacgatattgttggtgacgaggggagagtctatctggctcacttcgctgatgagcaggtagaggctgcgcgtattgcagaaaagatcgaggaatggattgccgaaggcatcgcaccgcacgagatcgccatcctccacattcgccaaagcgctatgttcaatcaagccatcgacggtgagttggatcgtcgtagcattccgcgtcgcaatgagcaggcgctacaagacctggtgtccgaacccgtcacagagtttgtcgtcaacctgttgcgcgttcttggtcgaaagcctgcgccaagcgcctacgcatcggttctgtatgctttgactgcacaggacgatgacgagcaaggcgactggatcaggctgcttagtgtcgctcgcgatcgtgtggctggggggctctctgctgatcacgcggagcttgccttcgagcagttgcaggaagtcatggctttgattccgattgcaacactgctgttgctctcttctgaatacgattccgggcgcgttgccgaaattttgggtcaggtctacgaggttctcgggaattttattcatcagcatcacgatctggaccaagccctggcaagatttctggatgaagggtcagtccgggtgatgacgatccacaaatgcaagggcatggagtttgagtgcgttgttttgccttgcacagagcgggagacttggtggggtgatcaaaacgataaccgaagcgcttacttcgtcggtgtgagtcgcgccaagcagaacctagtcgtgacttatgtggaccgaagaggtgctcccattggggctagcgcacagtgggatgtcatacgtcatccacaagaagaattcctaggttatgtcagagcggaagcgatcccgctctga

SEQ ID NO: 72210 - DNA, 1800 bp, Acidovorax delafieldii 2AN
atgaagctgacgcggatctacatcaacaacttccgcaacttccttgagctggatgtcgcgctggatgggagcgccgtcatcgtgggggagaaccgcgtcggcaagagcaacctgctctatgcgttgcggttgatcttcgatcccagcctgcccgacagtgctcgccagttgggccagggtgacttctgcgatgggttgggcgaacccttggaaggcgagaagatcacggtgttcgtggaactgaccgacttcgaggacgacctggatctgctggccctgctcacggactttcggctggatgatgctgcgaacactgttcgcctcacctatgagttccgcccaatcccgggcctcgacgggtttccgcaggcagacgaagactacgagttcatctgcttcgggggagaggctgagaccaagaagttcgggcacgacgtgcgccggcgcatcgccatggaccttctgcccgcgttgcgcgatgcggaaggagatctggccgcctggcggcgttcgcctctgcggcccttgctcgagcgtgcattcgccggagtgtcgggcgaggagctcaggggcgtgcgcgacgcggtccacgcggctaccgagcagctggcggagttcccggccgtccaaaccttggagaaggacctgcgggcactgttcacctcgatgagcggtccgaagcaggacatcgagccaagcctggggtttggcacaacggacgtcacccggctctttcgcaacctcaagctgttgatcgatggaggactgcggaccatcggagaggccagtctcggctccgcaaatgtggccttcctgaccctcaaggctttggaactgcgccagctcatgagtgagaaccggcgtgatcacacgctgctggctatcgaagagccggaggctcacctgcatccgcacctgcagcggtccgtctatcggcacctgttcgaagatctggccgctgcaccggcgggagagcagctgtcgttgctgttgacgacgcactcgccccacatcgcgagtgtcgcgccgcttcgctcgctggtactgctgcgcgaatccaaagacgaaagcacggtagggacttcggcggcgactattgaactgaccgaagacgaggaggacgacctcgctcgttacctggatgtcacgcgggcggagatgctgttcgcccgagggatcatcctggtcgaaggagacgccgagaagtttcttctgccggtcttcgcggcctcgctcgggcatgacctcgaccacctgggcatcacggtgtgttctgtgtccgggacgaacttcacgccgtatgccaagttcctgacggcgctcggcatcccgttttcgatcgtgacggattgggatccgcgcatcgatcgccaggcgttgggcttcaaccgttcctggaagctcgtgcagaccattgagtcggcccgaactggaaaagagcccacgcgtctgatccgagaactaaagtccatcgaggatgtgaatgtgttcgcggaacgctgcgaggagcatggagtcttcaccaacgtggaaacgctggaggttgatctgttccgagacgacgacttcaccacagcgatcctcgctgcgctgagggagcagccgtgggcggcgccacgtatggcgtggctggacgagtgggaagccgatcccagtacgctaaacgtcgagaactatctcaagatgatcgaggcgatcggaaaggggcggtttgcgcagcgcttggcttcgcgcgtcgagggtgtagcgccgccagcctatatcgccaacgccatcgcctacgtggtcggccgtgtctga

SEQ ID NO: 72211 - DNA, 1779 bp, Acidovorax delafieldii 2AN
gtgtctgatagagcggcctatctgcgcgccgccgcgcagcttcggggcaacgcggggcagtgggcggcgtatgagtcgcgcgggcactgcatcgtgctggcggggccaggcagcggcaagaccaagactctcacgaccaagatggcgcgcctgctcgcggaggatgtcgctgagccgcgcggcgtggcttgcattaccttcaacaatgagtgtgcccgagaactcgaggggcgccttgcggccctcggcgtggagcctgatggacgggtgttcatcggcaccgtgcactcgttctcgctgacgcagatcatcctgccctatgccaaggtggcgggattgggattgccggacgatttcggagtcgcaacgcgtgccgagcgccaggctgcgttgtcgaatgccgtgctccgcaccatggattacgccggcaacccgcaggactgggagtttcgactagccagctaccgccgttcaatcttgaaccgggacagcgtgcaatggcaagaaaccgacccagagctggctggcctggtcgaggcctatgaggcggaactacggcttcgcggactgatcgatttcgacgacatgcccttgctcgccgtgcgcgccctgcgcgagaagccgtggctgcaacgcgcgctgctggcgaagtacccggtccttgtcgtcgacgagtaccaggacctcggattggcgttgcaccgtatggtcatggggctgtgcttcagcgcgggcatgcgcctcttcgccgtgggggatgccgaccaatcgatctacggcttcaatggggctcagcctgaactgttgcggcgcctgtctgagcgtgaggatgtcgagaccgtgcgcttgcggctcaactatcgaagcggcacgcgaatcgtcgcagcatccagtgtagcgttgggcgaggagcggggctacgaggctgccgaaggggcgccgctgggaacggtattcgtacacgccgtgcagggcgcctatccacagcaggcacggcacctcattgccaacctcctgcagcgggccatggcgggtaagcccgggctccgctacagagatgtcgcggtactctatcccgctgcatggatcggcgattccgtcgcggatgccgcgcggcaagccggcatcccggtcgtgcgcaccgatgggaatgcactgtatccgcgggcgagccggctcatgcagtggctcgagctttgcgcccagtggtgttgcgggggatggcgagcaggcgacccgcggttctcacggcttgtcgccgaagggcgccggctcttcgccgagtcgatccgcggcgaggatcaggtgggggactttcatcgccgcttgatcgacggactctggaatgtccgagatccgagcctgccgctgcatgcctggctcgtgcgcctgaaggagcaactgatcgatccattggggttgggatgtgtgagcctgcgcgacgagctggagacgctggctgcatttgtcgcaaggacatccccggagggtgactgtccaggcatgctgttgggagaaatggcaggtgacggaggcggtctggaccgcctcaccttgtcgagcctccacagtgccaaaggacgggagttcgccgtcgtgttcttgttcggcatggatgccgggcgcctgccacgcaacgatgccggtagacagcaactcgcggaggcccgacggcttttctatgtgggttttacccgagcgaagtctgaagtgcacttgattcacacggtaggtcgcgcgtcccagtttgtcgacgaattggagcagcacttgcgatga

SEQ ID NO: 72212 - DNA, 2190 bp, Staphylococcus aureus A9765; identical to SEQ ID NO: 71982

SEQ ID NO: 72213 - DNA, 1728 bp, Staphylococcus aureus A9765
agatataacctttatgtaaatgcatgtcctgggagtgggaaaacaagggtacttacaaggaaaattgcttaccaagcaattaaacacgatggatcactaaaaagaataattgctatcacatacactaatagagctgctgaagaaattaaggaacgcctaagtttacttagtatagatgatgatattaatatttgggtggggacaatacatcagttttgtcttgaatttattatttatccttttaaaatgaatctctcaagagtatcaaaaggatttacaattattgatgattatactcaaagagcttacgtcagccaaattaataatatgctgaatttaaatctcaaaacgtatgaactgaacaaaattgatttgtcactttctcatgattttaaaattaatgaagttcagtatactcaagtttctgaaatgtatcacactatgttggaaaaaaataaagaaattgattttgatatgattttactagtagcgtataaaattttaactgtaaacagtaacgttgcacgtaatattgctagtaatataagggcgatttatgtggatgaatttcaagatactagagaattacaatacaatgtaatagctaaattacttcaaaacaaccctcaaattcagtcaatgtttgttggagatattgaccaagcaatttatggatcattagatggtatagctaaatcagttgaagaactagaaatgctaactagtcacacttttcaatcaaagacgctacatggctgttacaggtctaatcagagattagtagacttctactctaattttcagagttgtccttacgagattgaaagcagagggaataataaaaacgaccgtggttttataagttatgattgcaaagttactaaggaggatttacccaacataataaaaaatataataaaggaaaagattgaaagcggcattcatgaaaaagatatttgtgtacttgctcctcaacactatcctctgttttcactgggtgagtatttaaagaaagaattaccgtattgcaattttgatgctataaatatatcaccaattaaggtaaataatcatagtttatttttcaagttagcaattttgtactttactgaatcaggtgaaaatgttcgaagaagaaagctaattgcaaacgatattttaattatattaaaaaatgaatttggaatagaagttaaagattattttattgacttagatttattacagctaataaacagtgtgaaaagaatgtatagtggagacgacaacggtgttgatttatacaaatttgttaccaaacatatatttgttaatcttaatattgacgagaaaaattacccgtctatttttaagcactatctattttttattaacgaagtagaagatcggataaaaaataattcattatctagtagtgtatctagttttaagaagatgtttaaatctcgagatggtatcacacttactacagcacataaagttaaaggaaatgagtatgatactgttatcgctattaatcttctaaacgggaaaattcctcattggaatgaaatttttaatgtttctgataaaggaattagttcagcgagaaaactactatacgtaatttgttcaagagcaaaaaataatttatttcttttctcagaggtgggttattttacgagtaaaggagacttgctttatcccactcaattattagataaaatagaatttgattataatatttaa

SEQ ID NO: 72214 - DNA, 2091 bp, Ruminiclostridium thermocellum DSM 2360
gtgaactgtatgtatatttcaaaaattcagataaaaaactttagaaactttaaacagtttgaggcgcattttaataatggtataaatgttataattggccataataactctggaaagtctaatttgattaaggcattggctttaatatttgattcgaatacaaaaaaacacttggaaatcgatgacttcaataaatatatttctctcgaggatttaaaaaacgagccacctaaaatttctatagctattaccattacacagcaagaagatgaaaatttgatgtctgatgatttggttactataagcaattggttgaccaaattagaagagccatatgaggctttattgacatatgaatttatgttgccagttaaagaacatgaaagatataaaaagaaagttaataatttggaaaaagaagaggaaatttgggaagtaattaatagagatttcttacgtttatatacatataaaatatggggtggtgatccaattaataaaacagtggctgacagtgaatctctgcaaaaatttgattttcaatttttgaatgcaattcgagatgtagaaagagatatgtttacagggcgaaacactttactaaagagtgtattagatttttttatagattatgatataaaatctgataaagaaaaaacagaagatgaaaagttatcagagattagtgaaataaagcgtaaatttagtattgatgcaaataatttaattaaaagtctgcaaaaaaggatggaaaagggcaaaaaagaaattctttcctatgcatataatataggtgcttcctttgataattcttatccgaattttgatggaaatatatcagatgtacagctttattctgcattgagcctaattgttgagtacaaaacaggaattaagattccagtttctcataatggacttggatacaataatttgatttttatggctttgttattagcaaaaatgcagattaattcagatggaacatatctgggaagtaatgcaaaagtatttccaattttagttattgaagaacctgaggcgcatttacatccatctatgcaatatcagcttttaaaatttttaaatacaaatataaagcaaaataaggttagacaaatatttgtaaccactcattcaacacatatagcagcatcagtttctttagatcaaatgttatgtctatataaatataaaaatgatacacaaattgcttatccaggaaaagtatttcctgatgaaaaaagtaaaaaatatgtgcaaaggtttttggatgcaacaaagtcagatatgcttttttctgaaaaagttattttagtcgaaggaatagcagaacaactcctaataccgatttttgcgcgatacttggaatgtccattagaagaaaaacatgctaccgtaattaatgttggaggtagatactttaatcattttttatatttatttgatgaaaataatccatttgcaataaaaaggaaagtggcttgtttaacagatagagatccagaaagaaaagaaaaatctcaaagcagatataaaaaatgttatccttttgaatttaatcttcaacctgatacttatgattacagatacaatacgttattagataagtacgaagtgagagaaaatcataaaagaatttgccaaaatattgcatcttttaaacaagataaaaatagttcaacttttgaatatgacctaatattatcaaacccttctttagatatattagttacagagtcattgaaaaactctgaagagataaaaagtttaatgcaagcatataaaaatggtgagccacttgatgaattttataaattattacgtaataacccagaaaataaacgaattattgaatcaattgaaaaagcgaactctaaagaatggtcagaagatgaaaaaaagaaagcaattattgcttctagatatttaaattctgttgaaaaaggagaaaatgctttagaactagcttatgtccttaaagaaaacctagataaaaagggaacggaagattttcaagacttcaatgttcccacatatataattgaagctataaagtgggtgtgtcaagatgatgataataaattctga

SEQ ID NO: 72215 - DNA, 1740 bp, Ruminiclostridium thermocellum DSM 2360
atgataataaattctgatactagaataccaattgaaaaccattttagagtttctgcaggtccaggcgctggtaaaacacattggcttgtaaatcatataaaaaatgtgttgcaaaattcaacaaggttatctaatgcaaggaaaattgcatgcataacttatactaatatcgcagtagagacaatactaaaacgtttgggaacagcagctgatcaagttgaagtatcaacaattcatagttttttgtatagacatgtagtaaagccatattgttcgtttattgcctctgatgtaggtttgaatttggaaaagtttaatggtcacaatgatactattgttagtaattctagaataaaacattggttagaaaatcttccttgcaaagatcagttaaaaaagccttgtgaatgtaaccagcttttatattcgaaagtccataggaaagcactgattaagtggctcgaaacattatattatagctttgataatgataagttatacataactggagatagtaaaaaggcatattacgggaaattgcatttgactaatcaatgtttgaaaatactcgaatcagaattatttcaatataagaaattatattggaaagacggtatagttgaccataatgatattctatattttagttataagcttatagaaaaatatccttttataatacaaatactaagagctaaattcccatacttttttattgatgagtttcaggatacaaatcctatacaactttctttaataagaaaaataggccaaaaggagactatagtaggggttattggcgataaagcccaatctatatattcatttcaaggtgctagtatgacacaatttgaaaaattttatcttccaaatttaattgattatgttatggtagacaatcgtagaagtacaaatcaaattgtcgatgtattgaatttaattcggaaagatattcagcaaaataaatttcgcaaggtagaaggtgatttgccagttattttagttggtgatagaaataaagggtatgaaaaagcaaaagagttatgcaataatagtgaaatctgtactttaactagagacaatgcaactgcgaatagtatgaaaaaggaaattgatgaaaatatttcagataaaaatttatttcttgaactaaaaatcctagatagtaattcaaaaaggtgcaatgtagtttattcatgtatacaagcagttgaattagcaaataatggtaattacaaagaagctataaaaaagctagaatatttatttacagaaaggaatgataaacacgcagttaaaaagatggctttgagttgtttatgtttgttaataaataactataatagttttaaagataaaactttaatggatttttacagctttgttaaagataaaatctttacagatttatcaaagtttcggaaaggaaatattaaaactttttatgaaaaacatacataccaacagttggccgcatatgtaaatatagtagatgatattagttactttaaaactattcataaagcgaaaggtgatgaatttaataatgttttactcatattaaaagaaaaagatttagattttttattgaagcctaatcttcttaaaaatgaagaacataggatttattatgttgcaattagtagagctaaagagaaactatttatttgtgttgataatttaaatccgcaaaatattttaaagttaaatacactctttaatattgttattttaaattga

SEQ ID NO: 72216 - DNA, 2190 bp, Enterococcus faecium D344SRF; identical to SEQ ID NO: 72106

SEQ ID NO: 72217 - DNA, 987 bp, Enterococcus faecium D344SRF; identical to SEQ ID NO: 72107

SEQ ID NO: 72218 - DNA, 2004 bp, Leptotrichia goodfellowii F0264
atgtttttaaaaagtataaaaataaataattttagaaaatttagaaaagaagggaataaagtagaatttacaaattcaaaaaactatcaaacaaatgtaaatgtagcctcaaatacaactttaatagtaggtaaaaataactcaggaaaaacaactattataaatgcacttgaaaaattaataaataaaaatataaatgtttctgattttaattttcattatttaaaagaaatattagaaaaaggaaaaattgagattcctagtatagaatttaatattattattggattagaagaagaaacagaaaataaggagataaaaaataatgataatttgaataatttgcttccatttatgactttaaaagatttaaaagataaagaaatagaaattactataaaatatgaaatagaagaagaagaaatatttaaagaagaaattaaaaaaataaaaaaaattagaaataaagaatcaagattcttaaaatttttgaaaattttggaagaagcaagatacagattcaaatattatcgtgaagataaaacagaagtggaaaattttgatttaggtaaattaatagaaataaaaacaataaaagcaaataatatcgaaggagaaaaatctttgcaggtagcttttagtaaaataataaaatatcgttataaagagttaatagaaaataatgaagaaaaagagaatatagaaaaaaaatttcaagaaataaataataatttaacagaacaaataaatgaaaagcacggtaaaattttaaataaagcattaaataaaattttttcaaaaaaaaacttagaagtttccttgaaagctgatttatcttttgataatttaataaattacttattaaaatatgaatatgttgatgaagacttatttattcctgaaaatcaatttggattaggatatacaaatttaatgatgattgtggcaaatttaattgattatatggagaaatatccagaaacttcttttaatagtaaaataaatttgatatgtatagaagaacctgaaacttatatgcatccacaaatgcaggagatgtttataaaatatataaatgacgtaataagcgaattattgaaaagtcacaaaaaaaatataaatagtcaattaataatttctacacattcttcccatatattgaatagtaagatacaatttggaggaagttttgatagtattaattatataatttctttagataaaaaaattgaagttattccattaaaagatgaattaatatctttttcaggtagaagagaagatgaggattttaaatttataaaaaaacatataaagtttaaagtatctgatttatttttttcagatgcagtaattttagtggaaggaattacagaatataatttattaccttactatgttgataaagatgaaaatttgaaaaagtattacataagtctatttaatataaatggagattatgctttagtttataaaaaattactaaaattgttaaaaatccctgttttaatttttacagatttagatatagagagaatagaagatgaaaagaaatctttttctcaaatagaaagtttggaaaataaaacaacaaccaatcccacgttgacaaaatttaataatagtaaaaatatttctaatttgccagaatatttaagtgaagaaaatataagtatttattttcaaagaaaaataaatgaatattatccaactagttttgaagaagctttaatattaacaaattttaataatccattattaaatacagtattaagagaaataaaaccccaaatatatgaagaaatagtaaagagtaagtttgagaataacaaacataactcttataaatggcaaaaaaaactcaaaaatgaaaaaagtgagttttccaataaaatattatataatttaattattacagataataatgatttaaaacttccaaattatatggaagacggtttaaaagatttactaaaaagattagaaaaaaatgggagaaagtaa

SEQ ID NO: 72219 - DNA, 1989 bp, Leptotrichia goodfellowii F0264
atgctaaaaaatatttcaaaagaaaatataaaacaggaaaaagaaattttgaaaaatttattttcaaatatagataattatcagagtacgttatttaatgctggagctggagccggaaaaacatacgctttgattgagtgcttaaaatatataataaaaaaatatgaaaaagaattaaaaattcataatagaaagataatttgtataacttatacaaatgttgcagcaaaagaaataaaagaaagattaggaaatacagaattaataaaagtatccaccattcatgaaagaatttgggaattgataaaaatatatcaaaaagaattagtagaaattcatttggaaaacataaaaattgaaatcaaaaaaattgaagaaaaaattgaaattaaaaaagaatatagagataaaatattagaaataaaaggtaatttttattcaaacgagaatttaaaatcaaaagaatataggaagaaaatggaacaacttggaattccagatggtctattgaaaaatgtgaataattttaaaatattagctaagaatataataaaagtagaaaattataaactttgtattcaaaaaatagaaaaaaatgaatataaagaaattacatatgatcctttgtataatagtgatagattgtataagatgagaattagtcatgacactttgttaaaatatggttatttaattattgaaaaatattctttgttaagaaaattaataatagatcaatatccctatatatttattgatgaatatcaagatactgatgaaaaaatagtgaaaataatgaatttattagatatagaatcaaaaagaattaataatccagtatttataggatattttggagattatgtacaaaatatttatgaaaatggcgtggggagaatagaaaatgaccatttagaattaaaaaaaataaataagatatataatagaagatcgtattcagaaattatagaagtagcaaataaaataagaaatgatgaagtcaatcaaaaatcaatatatacagatagttttggtgggaatgttgaattttataaaggtagcaaagaaaagttagaggaatttttaagaaaaaataaaagaatatacaacacaacaaaaaataaaccacttcattgccttttattaacaaatagaatgatagcatcttttgcaggatttgaaaaattatatgaatttttttctaaaagtgaatactatagtggtgttaactataatcaattgaatacagaatttttaagtaatgaggcagaaaaaatgggtgagataccacgcttattatatagaataatgagatttaaaaataaaattgaaaattcgagtacatttttgaaggaaattataataattaaagaattgcacgaaagaaatatagtgcaattaagagaattaataaatctattttctcttcaaaaagtggaaacttttttagaatatatagacttaatttgtaaaatatatgacgaaacaaataataatgactataaagtaataataggaaaaatatttgatattaaagaaatttctgcacaaggaataagaagttatttattagaaagtctgtatcctaatttagaagataaaacagaaaaaataattgaaatagatgatatactgaaagaaaatataaatgaatatgaaaactggtttgattatatagaagataatataaaaagtgatattatttatcatacttatcatggaacaaagggtcttgagtttgaaaatgtcatagtagtaatggaaaataattttggaagagataaggattattttaaaagattttttaaatattataataaaagggataagttagatgaaaatgatagagaaaaatttgaaaaagctagaaatttgctgtatgtttctgtaactagagcaataaaaaatttgaaaattttttatgtagatgatatatccgaatttgaagatgaaataaaaaaaatttttggagaaattaaaattttttaa

SEQ ID NO: 72220 - DNA, 1698 bp, Vibrio cholerae RC27; identical to SEQ ID NO: 71760

SEQ ID NO: 72221 - DNA, 1377 bp, Vibrio cholerae RC27; identical to SEQ ID NO: 71761

SEQ ID NO: 72222 - DNA, 2307 bp, Vibrio mimicus VM223
atgccagacatcccccctgagaccgaagtatccaaaggtattaagcttcgatttgtcgaacttagtaatttccgtcggctaggaaaagtgcagctgaacattgatgaaaaaaccacaattttggttggcgccaataatagtggaaaaacatctattcttgcggcgctacgacatttccttgctgatgggtctccctttagtgctttcgacatcagtatttccaaatggtcaaagctgcgagcccttggcaaagtttgggaagatctgactgaagaccctttaactgttaccgaaccagaagaaaagtggaaagagcaactccagatactgctagaaaccatgccagtattggacctctggtttgatgcagatgtcggaatgtatcactatgttgctccatttctatccaaatttagctggaaaggtggcgctgttggtattcgccttcgactggagccggtcaccaatattgaagagctcaagcaattagcatggacttactgctctgcacgttcaccagttaaagatatgggacaagattcattagcgtggcccatagacctacttgatttttttctgcgtgagccattgaagcttgggcgcgttcgtgcatacaaattagacaccgataacaacccgattacaggactggtatcctatgaaactcagacacttgatgtccaaacaagtccgattgaccgaaagcatctatcgagattgattcgtgttgatttcatcccagctcagcgtggattcggaagtgaagaaactgagtcgcggccatcatccgctcttcaacgagttggcatgttttcaaaccagctaatcaagtttgctcaacaacacttaaacgttgctagctccggacatagccagcgtgtagaccttattaaggcagtggcaattgctcagaaagagttagacagtaagattcaagaagccatagccgattcagttcaggaagtgcaagagcttggctatccagggttacatgaccctcaagagattcgttttcgtacacgtatccaaactgctgaccttctcgatcacagtactgcggtccagtacagtatgcagaaggattcaatagaagaactcctaccagaatattctattggacttggttaccagaatctccaatctctcagctaccaactagtttcatttagatctgcacgacttaagcctgaaaaaggctcccctgtccccgtacacatagtaatgattgaggagcctgaagcccacttacatgttcaggtgcagcgtatatttccaagcaaagcacataaactaattagtccgactgagaaagaagcttcaagcctaaatagccaattgatcataagcactcattcaagtcatctagctcattcggagaattttgaccggctcagatatgttcgccgtgtggctaagagcgatacgattccaatgccgacgacagaagttgtcaatctagccgaagtctttggtgatgataaaaaaacacgccaattcgctgagcgttacttccgtgttcaacatacggaccttttgtttgctaacgcagctatttttgtggaaggagtcgcggagcgaatgttggtgccacttttcatagagcgttatttcaatgaactgaacagtcgttacatttcctttgttgatataggtggaagccatgcccatcgactcaaacctctcatcgaaaagctccggatccctacagtaataattacagatatcgatccttgcgaagaaaaggaaggcaagcctaagaaaaatggtgacccgaccaagaaactagtcgctgttgcaaacaccgggcaacccgaacttcagtgtggtaaccctaccttacgtggctggcatccgaaactgcaaaaacttgatgatttcaaaaccccgactgaaggtcagttggtatggaatgaaatcgaagattgccatgtatatttcgcttggcagttacctatagccaaagctaacaattgttggcccagcacatttgaggattcactggttcttacgaatgtctcttggttcaaagggttgatggatgagaaattcgatgaaaatggagtagagattgaagttcccaaaggggctcttggctctgttgcaaaaaaggcggtagaaaccgaagattttcaacagctacttagtgaactgcactctctgatgcacagctcttttaataaaggcgacttctctgccagcatctttgaattagtatcttcaggcgaggatattgaatgtccggggtacattgccaatgcattaacttggttgcagaagcaacttgaaccaagcggagtgatggaatga

SEQ ID NO: 72223 - DNA, 1956 bp, Vibrio mimicus VM223
atgagcaaacaaagtatcatcactgacaacgacagagatacgggagtagtcgaagaaatttgcggctaccttactgaagttcctcctcgcagctactttcttttcgctggagctggttctgggaagacgagaactctcgtagaggtcttgcggcggattactggagtcgtaaaacacgaaaaaggggagctccttgcaagaaacttgcgtttgtatgggcgttcaattcgagtgatcacatacacgaaaaacgcggttggggtcattaacgggcgcctaggggagaatgacctagtaaaggtatctacgatacacgcattttgctgggagctcattagtggattcaacgatgatatcaaggcggctcttattgcaatcaaagaagctcagcttgaaaaggaaactgaggaagcacttgcaaaaccaaagggcatcactcctgctaaacaacgggatttggatgagataagagaagatatcgagggatttagaaacacagacctatttatctaccacccggatcgtatgacatatggtccaggagcgcttgcccacaatcatgtgcttgacgtaacagcatggcttttaaaaaaccgaccaaccttaacgaggatcctaaaagatcaacatccaattgtgctgattgatgaatctcaggacacaatgaaaggtatgctggatgccttattgactattgcagaaccgagaggaagtggtctaactataggacttctaggagatcaccgacagcgaatatatatggatgggcatgccgatcttccgagtttagttcctgatagctgggcgatgccagagctgaaaatgaatcatcgtagccaacgcagaattgttgacctaattaatacaatttgggaagcgaagctagaaggacgaacccaacctgctaatggaataaggcagcattcaagaaccgagaaagctggcggttttgtacgaatttatataggtgatacaaagatatctccagaagataaagctatcggtgaacgttggtgtgcagatcagatgtgtagcgcaagtggcgttgaggcttggtcaaaaggagaatttcaactgctcgcacttgagcataagcttgttgctacgcgtggatcttttcttgatatatttaatgcaatggttctactagatccaaatgcggcagcacccagtggcagtggagagaataaaggtccggctattgtgcaagccttattgaacgaaattatcgatttagaggggtgtatcaatcccaatgggacaattgatgagtttaaagtcactgaggtttttaggcgctatgactgtcttgatgggataccggaagatacagtagagcgagcaaagcgtgttgaagaaatacttagagcaattgaaactttcgccgcagcttgtgcaagtcctcttgcgaccgtgggagaggtgctcgaaccaatcttgagtgccaaattgtttaacgttgatactcgcttagctgttgggtatgcagacaaatcacctccaccttctgtgccagcgagaggtgaagaagaatccaaacaagataggttgcgtcgcggattgtgtgcactattttcagccccttggaatcaattaaaaaaatactgcaactatctatctggcaattcagttttagctactcaccaagtagtaaaaggttcagaatttccacatgtgatggttgtcatggatgataagttggctggtggcaaccttttttgttacgacaagatttttggtggtgttaatctaagcaaaagcgacagcgaaaacataaataaaggcaaagaaacaaccattgatcgaacactacgtttactttacgtaacatgtagtagggctgaagagtctctcgctcttgtgctttggtcatcagatccaacatcagccctagaaagagtaaataatagtggttggtttgttgacaaggaagttgaagcgataccatccccctaa

SEQ ID NO: 72224 - DNA, 2409 bp, Acidovorax avenae subsp. avenae ATCC 19860
gtgaagctacaggcctatcggctacaaaactatcgcaggctgcgtgacgtcgtcatcgaactcgatgatgagatatctatctttgtcggcgccaacaacagcgggaagacgtctgctgtccaagggctgtattcgatgctccgtggcgatgccaagaaattcgaaatctttgattttagtgcggcgctatgggctgaaatcgacgcaatcggagtgtcgaacccaggggatgaggaggcgccaaagaagttgccatgcatcctcttggatctttggttccgcgtcgatgaagatgatctcgccactgcgatgccgctgcttccgagtactgagtgggacggcaagtgtgttggaatccgtgtggcgttcgagcctcgtgatgatcacgagctagtcggtcggttccatgatttgcatcagaaggctaacaacgcggcgattgcgatggctgccaaacgtaaagccgctggttcctctggagccgacgtggagacaggtcatggggtcgagggatcggcagaggtcagcgaatacaagccttggccggaaagcctgacgaagtacctcacaaaagaacttagcaaggagtacacctttcgttactacgtacttgatgagcgggccttcgacggttgtctgcccgtagacgccaactacgagccactccccttaggaaaagagcccggcggcgcggccattctcaagtcgctagtcaaggtggactttctacgggcgcagcggcaccttgatgatccggatgctggcagttccgaccgcgccgaaagcctttcgcggcgcctaagtcggttctaccaccgtaatcttgagaagcgtggcgacgaccacgctgctctcgaagcacttgatacctcggagagggagttgaacttccacctgaaggaggttttcagtgatactctcaagcgcctagctaagctcggttatccaggagttaataaccccgagatcgttattcgggctgcattggatccgaccactgtcatggggcaaaacgccaaggttcactatatggttccaggcgctgcaaccgctcatcttcctgacagctataatggtcttgggttcaagaacttggtctacatggtggttgaattgctcgatctgcacgagcagtggaaagctgacgaagacaagcgggctccgctacatttgctctttattgaagagcctgaagcccacttgcatgcgcagattcagcaggtatttatcagaaatgttttgcgtttgcttgaggatgccaacgaccattcgacgtttttccatacgcaactcgtcatcaccacgcattccccgcacatactttacgagcgtggcttctcgtccatccggtacttccgccgcgtcagcgaccagttggatcatcaaacgaacgtacgaaatctgtccctcttcaagacgagcgataccgacgctccaggacgcgagttcctgcaacggtatttgaagctgacacactgtgacctatttttttccgatgcggtcatcctggtggaaggcaacgtcgagcgtttgctcttgcctgcgatgattgagttggctgccaagcgcctgcgttcctctgccctgaccattctcgaagtcggaggcgcgttcgcgcaccgcttccaggaacttatcgccttcattgggctcacgacattggtcgtgacagaccttgacagtgtgatagtcaaggcggatgacgagaacgccgccgcacaaaccatcggcgctggcgacaccgtggacgatgacgacgacttgaaaccattcgaggtcgaggacgacgacgcaacacaaccaagcggaaagaagaagtccaagaagcgcggcagcacctgtcacgcgcacgtggatggtgctgtaacgtccaaccagaccctcatcagctggattccaaggaagcgctccgtagccgagctctgggaagttacagcggagcagaagacgttgtcgctggcagaagggtccagtgcagcggtccgcgtggcctatcagacaaaggtctcggtgacggtgggttcggtgactgcgcagctctgcggccgtacgcttgaggaggcctttggccttgagaacgccgattggtgtcaggctgaggcgaaccgggccgtcggcctcaagctgaagtgcgcaccgaacagtcccgaggaactggctgaaaagttgcatgacagggtggtcggcaagaacttcgacaagacccgatttgcgctggaggtcctcgcaagtgggccgctcaatggctggaaggttcccacgtacatcgccgaaggtttggcctggcttgaggcgaaagtggcccatgagcttgaggcggatgcggccatcgccagcgaggttgcgacaatcgagccgaatgcggccggtactatctctgttattgctggcgcggagcagacagcatga

SEQ ID NO: 72225 - DNA, 1938 bp, Acidovorax avenae subsp. avenae ATCC 19860
atgagcaggcgagtcgatagcccggataccgatgcggatcgcgagatccacgcctgcattgcggcaatgcctccgcagcccttcgttgttcgtgcaggcgcaggttctggcaagaccacctctctcatcaaggcgctggactgggtggtgtctgagcacggcgccagcatgcgggcaaagaagcagaaggtcgcctgtatcacctacacagacctcgctgcgaatgaaatgctggcggacgtcaactccaatccgttggctcatgtttcgactatccatagcttctattgggccattgccaagacgtttcaggccgatatcaagatctggctgaataacgaaatccgcaggcggatttctgaactggaagaagattctaaaaactacagttcgcgcgttcggcaggccacgcgagacaggaaccaggcggatcaagatcgctatgcccgaaacttggaagccctgggcagcgtcaagacgttcaattacggcgtcggcagtgactatgcgaagggcatacttggccacgaagacatccttcagttcgctgatttcctactccagaatcgcccactgttccgacgtgtcgtagcgctgaattacccgtttgtgttcattgacgagagtcaggacacattcccgagcgtggtcaagtccttcagggaagttgaggcccagatgcggggtaaattctgcctcggtttttttggtgacccgatgcagtcgatcttcatgagaggcgctggggacatcgcgcgcgaagaccattggcgagccattacaaagccggagaacttccgctgcgccaagcagatcctggacgtcgccaatgccgtgcgcgcgcatggcgacggcatgaagcaagtccgcgggctgcacgaaaagatcgatggtgagctcaagctcgtggagggctcggccagaatgttcgtcttgccgaacacgttgaaccgaaatgaggctctggcaagggtccgagaatggagtgcggcagcgaacaacgacgagggatggactaccccagatcttgcggtcaagatccttgttatcgtgcaccgaatggccgcaagccggctgggttttggcggcatctactcggctctgaacgacaagacgtcggatgccatgaagcaggggatgcaggacggtaccggctggcccgttcggcccttcctcagtttcgcgctgccaatagttgcagcgatgagcgccggcaacgagttcgccgcgatgaatctgctccgggaattcagccctcgcctaaagcctggcacgctgaccggccggcgtgttgcgggcgttttgcgtgagctgcgcacagccgttttgagactagtcgctatgctggatgaggccggaaccactgttggggacatagccatccatctccgcgactcaggcctattcgattttgacgagcgttatgagcgggtgcttggtttcgtccaggacattagtgacgttgctcaagaagcagaagccgccgatacagcccctgtcgagggacggtccttggacgcggcgatggtcaagttcttacggtgcgcagcacaagagcttcgcccatacgaacgatacgtctctgaagactcaccctttgctacgcagcatggcgtgaagggcgctgagttcgaccgcgttgttgtggtgatggacgaggacgagagcgactatcgaacgtacaactacgagcgggtctttgccaacgctgatgcccgtgctgcagatcgtgcacaagcccagaatggtgatgaaaacacttggagccgaacgctgcggttgttgtatgtctgttgtactcgcgccaagcgaggactggtgctgactttttttgttgccgacccggcgaccgccgtagaaaacgttgtgtcgagcgggattctgccgaggagcgcggtcttcacgcaggatgcgctggctgcccaagccattcggtag

SEQ ID NO: 72226 - DNA, 1971 bp, Peptoniphilus lacrimalis 315-B
atgcgattatcgaagataaagattaaaaactacagattgcttattgatgccgaattggatatcgatgcaaaaacaacccttattgttggcaggaataatacggccaagacttcctgtagtaactgtatcaacaccgtgctacaaggaaacgatttttcatataatgattatcctatatctaagcgagaaaacctctacaacctgttttttcagttcatggagaaaaaattgagttatgaagatctctgcagaggaatagaacctatttctatagagtttgtagttgattattcattggatgatcaagatacaaaattgggggcattatcacctttcattattgacgttgatgtggataccactacagcgttaattcgtgcggagtatcagttgaaaattgacgaaagtaaactgcgggaactgtttaaggatagttgctatagtaatgataaatttgcgcccaaagcagaggaaatgcacgctaagcttgcaagcaatttttcgaggttgtttggcttaattatctatgcggttaatccaaagaatttagaagattggcaagttaaaagtcatagagaacttaaagaccttttcccttattatccgattcctgcagaacgcatacttggagaagatggtactcaaaagaacgagtcccttagttcgttgattgcggactatttcagcttgaacgaggaagatttgacacctgatatagcagagaaagtcaaggaactccgtgcagtagttgatggtgcaaacaaaaatgtgcaaaaagaaagcgatcgaatactcagtgacttggtcagcaaggcagttggttttggatatcctaatgttgaagaattgcagcttggtgttactactgagttaaaaattgacgatcaaataaaaaaccagacacggctttcatatagctctggtgccagtgacgaaagcctgcccagctcccataacggattggggtacaagaatttgattaaaatggaatttctcttggctgcgtttgcacgagatgttgagaaaaagggagacgcctgcattccattgttgttcattgaagaacctgagtcacatatgcatcctcaaatgcagcatgcgtttgcggagcatttagaaaaattcctcgataaaattacaactgttcatattcagacgtttttaactactcactctgcacatatagcgaatactatggatttctctaaaatccggtatgcgaaaaagtctaaatctggagttgtttataagaaccttgatatttttgcgagagaaaatgctgacaacatggatttcatcaagaaataccttacccttagcagatgcgatttgttctttgcagataagatcatttttgttgagggtgcttcggagcggttgctgctaccggacatgatagagaaatgcgagaaagaaaaactgtttgattcagaaaaatataaactgcccgcacagtattatgctttgatcgaaattggaggagcatacgcatacaaattcataccttttgcagacttccttggactcccttgcttaatccttacggatatagattctatgatagatggcagaacaaaggctgttgtcagcaaaggtaagactacctccaatgcaacaataaaatggtggatgcgcaaaattaagggtattccgcagaatagtaaagataagatttaccttgcggatatcaccgctgcaacagatgcagaaaagactttgaggaaatgtcatattgaatatcaaacttcggaaaatgggatatgtggcagatctttggaagaagccatcatgaatgtgaatcgtagtcattatgggttcacagaacctgttgccgaagaagatttggagtttactgagaaaagcaagacggactttgcactcaatctgatttgcaacaatcctaattattctattcctcaatatattaaaaatggtttaacatggcttaatcggcaacgagttcttgaatga

SEQ ID NO: 72227 - DNA, 1746 bp, Peptoniphilus lacrimalis 315-B
ttgtctaagaattatgagtatttaaattataacatagctaaggcggaagcggataaagtcgacgaacaaataatttctgcactcaaggctgggcgtagcttccgcgtggaggcaggcgctggttctggaaaaacctactcactaaaccgtgtaatcgaatggattcaagcaaataagtggaatgattatcgccgaaaaaagcagaatgtaatatgtattacatatacaaatgcagctgttgatgtgatttcgcagcgcttatcccaagattcatttattcttccgtcgacaatccattcatttgcttggaatgcaatcaagcagtatcaaagtacccttattagcattatcgagaatgatgcgtcattaacaacgacggaaacggacttcagcaaggtgttagagattcgttatactttaggacaccgttatgtatcccaaggagttcattacttgcaccataatgatgttttgaaacttttttgtactatgctggataatgcaaaatttcgccgtgttttctctgacaattatccgttgattttaattgatgaataccaagattcctacaaaccgattatcacacgttttataaacttttttattgcagaaggaataggcccacaatttggctttttcggagatgcatggcaaactatttaccaaactaacaacgcttgcggtgcgatagagcacagcaagcttcaggaaattaaaaagggttcaaactttagatcagctcccagaattgtgaagcttttaaatgatattcgcccagatttaccacaacaatctgcaatagataattttgaaggtgaagtagttgttgtgacttgcgatgatttttctggagaacgtcgaacagaacggacattcaaagacgatctccccgcagaagaactgaaatccagactgttccagctttcagaacacatcaagaaaaacgtgtcaaaggatgaaaatatcaaaattttgatgattactcataaggttcttgccacacagcaaggatatgagcgtctattagccattattgatgatggactccgagataaacaagatccatttttgctattcttcatgaataccgttgaaccgatatatgaagcactcagcacatcaaatatgcaacttctgtttgatacgcttggaatcagacgatatcctatcacgaaaaaagctgataagatgaaatggaaagagtttgagtcgcagctaaagaaagctcgtaatggcagagccattgatgttatcaacactatcgtagagacaaagttagtgcctattccatcattggttgatggatactaccatctatattttgatgcccctgatacaatctatggattggatgcaacaatccagaatgttttagatttagattacagtcaatttaaggcggccattgaatttctgtaccctgaatcagagttttcgacagaacatggtgttaagggcgaagaatacgataatgttgtcttcgttatcagtaagggatggaaccaatatcaatttgagacttatgcacctatgataactgggaaagttccaataccagtaggtaaagaggcatcatatgaacgaaatagaaatttgttttatgtatgctgctcaagaccaaagaaaagattatttttatttgtttcaatacctcttaattccacttttagaaattttctaatcgatatagttggattagaaaatatttatacatttaatgaatatttagataataaagccaaataa

SEQ ID NO: 72228 - DNA, 2010 bp, Bacillus cellulosilyticus DSM 2522
atgaacgaactaagcgctccatacatttcaagggtaaaaattaaaaatttcagaaattataaagatgttgacgtagttctgagtcataaacaggtaatcattggggaaaacaacgtcggaaaaacaaactttctaagagcaattcaaatcattttagatccgaagctgtctgatgaggatcgttatttaaatgaatctgatttcttcgatggattagttgatccaatgaaaaatggtgatgaaattgaaataataatagaaatcaaaggatttgaacacaataaatctcttttatctatgttagccgatgcaacgataagagctagcgaaccagtaataagacttacataccattactttcctgtaactaatataaacgggaaatatgaatatgagtacactatatttcaaggagaaaagacagaagttgcatttaatcattcacatagaaagtatctaaatttaaaagttataaatgctatacgtgatgttgaagctgagttgaaaaatattcgtagatcccccattaatcaattattaaagcaatataaaattgataaagacgaactggttgaaatctccaataaactaaaacaacaaagtaatgatattctgactattgatgaattagttgatctccaaactcaaataaataagagattctcaaatgttttgggcaaccaaccttattcaaagattgcattagaaactgtagacgttgatccaaatcgaatacttaacaccttgaaattaatgatcggcatagaaaaacaacgacctactagtgaaacgagtctgggcttaaataatattttgtacatttccttaattctgttatctttggaagataagacaatcccttcactaatcaaaaaggatacatacgatgagcttattttagaaaatgaaagtgacattttaacactgtgctatgaaaaaacggaaaaagaaaactattctctaaaacaagatctgaatgaacagaatttaattgatttatacagttttatggatactaatcattcttcgaccgaggggttcactattccagctatcgaagaacctgaagctcatttgcaccctacttttcaaagaattatttacaaggatgtaatgaagaaaaacacatctgttttaatgactacgcattctccatatattacatctgttgctccattagattcaattgtccatttacgagcgacaaaccaaggaaccgtagtccattcaaccgcaactatagaattaacagatggtgaacggagagacctagaaagatatattgatgtgaaaaagggtgaaatatactttggtaaaggtgtcattttggttgaaggaattgctgaagaatatttaattcctgcttttgctgatttattagaaaaaccattggacttaaaagggattatatgttgtaacattaattcaacaaattttaaaccatttgtaaaattccttgatttattaggcataccgtatgtcgctctcactgacggagatttttatattgaagtcaaagatgatgacgataatgaacccacaagaaaatttcatataatgtccgaaggttctaatcaacaatatgggtatcttgggaacgaacgaattagtagcttgttaattgatctacaaaagttgaatgagtcaaaaatacctgattcctttcaagaacaagataaatttttttctaaattaggattctttatcggcaggtacacaatggaagtcgatattatggatacctgctctgcaagtgaagatggaaagaaagttatttttgacatatttaatgagttgacatcaggtggttcaaggcaacaaactaatttcagaaaagagttcgaggagagaaaatactgggattgtctgaaaaagatagagagcagtaataatggaattggaaaggggagattttcccaacgtctttcaaccagttgtagggttgaacatattccttcgtatattgatgatgctataacagatatttacgctagagttgatgaggtttaa

SEQ ID NO: 72229 - DNA, 1800 bp, Bacillus cellulosilyticus DSM 2522
atgattccatatgaaaaaaaacttgagcaaataaaaaaagatgaatctcagtatgcagcttacaattcaaatgtcagtacagtcgttaaagcaggtccaggaagcggaaaaacaaccgttttaactttaaaaattatgaaacttttgtacgaaaaaataaaacctccaaggggtttagcttgtatcacttacaataaagaagcagtaaaagagtttactaatagattgtatgatttaggttataagaaaagacagaacgtttttttaggaactgtacatgcattttgtattgcagaagttattagtccctatattcatttatacgaatacgatgtccctcttccattaacaattatttcagaaaaagatagaaaacaaatttatgataatattgtttctgaattagattatgatcctaaaaaaattagaattgaggatatggacaaagaacgaactctaagtattgatggaattagttctgttgctctagaaccttttgaagtggcattgagaattgctaaagagtatgaaattcgtcttcgttcaaagggtatggttgatttcattgaaattgtaaaaatggctacattgttaattcaaaatcattattatgttagaaaatgcttagaggcaaagtttccttggattttaattgatgaataccaagacttaggtaaacccttgcatgaaatggttttagccctttttcataagacaaatattaaaatatttgcagtcggagatcctgatcaatccatatatagctttaatggagccataccagattatctaaacgaactatatcgacacccgaatatattgccaatcgaactctttaccaattataggagtcatcaagatattattgacgcttcacttgtagggttaaaccaggaaggacgaaaatatatatcgggtaaagattttaaaagtgaagctgaatttcattttgtaacatgtgaagaagaactagatgatcagtataatgatgtcgttaacagcattatacccgaatgcatagaaaagggtattccactagaagagatttgtatattagttcaaggtggtaaagaaattaaggcaataggaaatttattagcaaaaacaaatattccattttatgtatcgaagtttgattttaaacgtagcgatgttgtgatgtggttagaatcctgtgcagcttgggtaatcaataatgaaaacgagtccttctctaaactttttgatttttgggtaagtttgtacaacaggcatattaaagttctaacactcacccagttaatgcaagaaagaaaaaaagtctataagatgctcgctgaaagtcgaactttcactaataaccttgaagagtggttgaattttgtaattgaggaactaaaattgaattccgttctagagagctctaaggtttaccctgatgaacttgataatttaacattattatttcgagaaattaaagatcagaaccagtctaactacgatttagaaaaatttgcaaatttagggaaagcagttaaccaggttactgtctcaacaagacacagctcaaaaggtttagaatttgaagtggtgatcatgcttggaatggaagatggtacttttccttattatttgaatgtgaatgacccaaaaaaactaagtgaagatcggagagtattttttgtttgtgtatctagggctaaaagaatatgttatttattacgttcaaaaaaatatacccgaatgacttggaatggtcaaaggacgttctatccaaaaccatcaattttttggaaggaattgtatcagagtgtaaagtag

SEQ ID NO: 72230 - DNA, 1938 bp, Micromonospora sp. L5
atgaagatcacgagattgcggctgagcaattttcagtccttcggtccggaaccgacggctatcgatctcgacggtctgacgtatgttctcggccctaacggctccggcaagacggccgccctcgaagcactgtcgcggctgttcagtccgctggctgccgagcgcaagatccgccttgaggactttcatgtgccagtcgaccaacgcgcgagcgaggtgcagagcggagagccgacactgtggctggaggtcgacgttgagtgtccggaggcgggagccgatggccagcacgcttccgttccaccgaacttttcgcacatggcgatcgatacagcggatggggtcccgcgcatccgtgtgcgcctgacagcctcgcttgccccggacggtgtcatcgacgagaagatcgagtacgtcttggaggcggatgaggccggtgagccggcccgctgcgcggacatgtcgcgctacgaccgcggacatattgaagtgcactatctgcctgctcgtcgcgacccggccgatcacatcgcgtacacgacggcctcactcatcgggcgcagtctgcgagccgccgactggacgacggagcgcaagacactgagcgacctgactgctcagatcaccgcatcgctcgctaccaacaccgcggtagccggcataggcgttcagttgaccaacgagtggctcggcctccatcgtggcacctacttcaaggaaccttcgatcgccttcgggcgaggcgagttggagggagtgctgcgccagctcaccgtgacgttctcgccctcgcacgacggggcgccgctgccctttgagcggctgagcgacggacagaagtccttgctttacatctcactcgtacttgcctggcagtccctggccagacgggtactcaacggcgaggagacgtctctcgacgcggaccgcctgcgtcctccggtgcacacagtcatcgctctcgaggaacccgagaacagcctcgcgccgcagtatctcggtcggatcatccgtcaactgcgcggggcctgctcgcacggggacgtccaatcgctcatcgccacgcatgcgcccacactgctgcgacgagtcgatccccactcgatctgctttctgcggctgaacgccgcccgggaaactaccgtccaccgcatcgtcctacccgatgacgacgaatcggccgccaagtacgtgcgggaggctgtccaggcctaccccgagctctacttctcccgctacgtcgtgctcggcgagggcgacagcgagcaggtggtcttgccccgagtcctggcggccgccggcattgccgaggatgacgcatccgtgtcggtggtcccgctgggcggccggcacgtcaatcacttctggcgactcctcaacgagttgcagatcccttacgccacactgctcgacctcgacagcggccgttatcacggcgggtggggccgggtgcgcaatgccctgaaacagatcaacaaagttcggccaggaacctacacggaagcacagctcagcaagcttcctaagtgggatgatgaccaggacttcccgacactcgtcgaccccggattcaaagacgggcacggccccatcgaggcactggagcagcaaggcgtcttcttctcccacccggtcgacctcgacctgatgatgctggcggcataccccgacgcctacggcgtcgatccgaaggcgccggatgagaaaacgatcgtggctgtgctcgggaagagccacgtgaacgaaacccgccttcccgacaacgtcctcgaacttttcgacgactaccacggcaagttcgacctcggcagcaagcctgccacccacctagccgctcttgccgacctgagtgacgaggagctgctccaagagctccccgacgcgctcgatcgactggtggagcacgtgcgcgcgagtcttgccgggctgccggaatga

SEQ ID NO: 72231 - DNA, 1662 bp, Micromonospora sp. L5
atgatcccacccgatcagtggcacccagttgacggcctgaccctcgaaccgaatgcgatgaaggccgccacgatgtcgaacgagaacgtggttgtcgccgccgggccaggagcggggaagactgagctgctcgcccagcgagcggacttcttgctgcgtaccgggcagtgcccctacccgcgccggatcctggcggtctcgttcaaggtcgacgccgcccgcaatttgcgcgagcgagtccgccgtcggtccggctcacagctcgcggccaggttcgacagcttcaccttccacgccttcgccaagcgccttatcgacaacttccgacccgcgcttacgggtcagaacgctctcaacccggactaccggatcgatcctgacacccgtatagctcgcgagcagatcacttttgctgacctggtgccgctagcgctggagatcgtcgaagccaacgcttatgcccgcggaggcatccgccagacataccgccacgtcttcctcgacgagtttcaggactgcaccacccagcagtatcgactgatcaaggcagcgttcggccagtcaccagccctcctgacagccgtcggtgacaccaaacagcggatcatggtctgggctggcgcgctagacggtgtactgcagaccttcgccgaggacttctccgccaggccgcttccgctctatcagaacttccgctcggcccctcgcctgcgaaggatgcagaaccggatgatcgcacaaatggaccccgaagcagtcagccccgcccaggacctggccggagatgacggcatcatcgaggtgctccactttgacaccgagcacgacgaggcgcaggccgtcgcggacctcatcgaaggctggctcaaggaaagcgtagcgccgagcgagatcgccatcctcgtacgtcagcagccgcacttggtcgcagcagcactcggtagcgagctcagaggccgcggcattccattccgcaacgagcaagagagccaggacctcgccgcagagccagcagctgcactcgtgttcaacttcatccgggtcgtcgccgacgacaggcagcccgacgcctacgccgaactgatgaggattgccaaccgcttgagcgcctccgaggaggaggcgtcacggttcgacagccaattgaagcggatgctcggcacggcccgagctgccgtccgcgatcccgccttcgaggctgagaagcccggagcatggagccctctcgtccatgagttcctccaactggtgtcacgacccgtgctgaccgccctgttgcccgggtaccagcagggcaaacggctcgatgacgtcatcgagcaggcgctcgaggctttcggcagggagctcgtggttgacggaaacgccgttcaagcgctcagacggctttcggaggtggaggcaatccgcttcttgaccattcacaagtgcaagggcttggaattcgagaaagtcgtggtcctcggagtggaggagcaactcttctggggcagtaacctcactacgatcatgtccgagtttttcgtcgcgatatcccgcgcgaagcaccatctcgtgctgacacacgctagttatcgcaaacgaccagaaggaaccgcgacgagatgggatgagtggcggattccacgccgagagctcttgaggttctcgcaggaggactag

SEQ ID NO: 72232 - DNA, 1914 bp, Lysinibacillus fusiformis ZC1
ttgggtataaacgtaaaagaagttaggttgaggaatttcaggtcatataaatttgcggatatcaaaatgccttttagcggtgttttgattggttctaataatgttgggaaaacttccatgttatacgcattacaagtagtatttgaacgaggaataagagtaagtggagaagacatatacattgaagatggcgagacgcttacaaatgaaaaaaaagcatatatagatatattgatagagcctagtaatgattcaaatgaaactcctaacgaatttaatgatacttggtttgaactttttggagaattacgaagtgaaaatccagaaactctggatcaatttgtagctattaggactattattaaattcaatatactaaaaggagaatatgatattgaaagaaaggcattaatacaatggccgaattcagaggaagttgaaaattattcagattataatagaaatagaattactgataggcttttacagtcaattccagtattttatttagatgctaaaagagatatttctacagaaatgaaagataaatattcttattggggcaaattagttagagacgttgatttaactaattcgagcttgacacaattagaaagttctttaaatgatattaacgaacaaattatcgatgaaagtccagtattggaacacttatctaaaaaccttaataaaatttcgcagacagttgatactaaagattcgaaaataataataaatccagtatcaaggaaaatacgggacttaaatagaggaatggatatcacatttaaagaccaaaaatctgaaggttttcccatttcgaatcatgggatgggaacacgtagctggataacatttttaacattagtggcctatatagaatggaaaattcagaaaatgaaagaggataatattccgtatcatccgattattctattagaagaaccagaagctcatttacatccacaggctcaaaggaaaatttataagcaaatacaaaaaattgatgggcaaaaaattgtaagttcacattccccaattattgtggctcaagcagaacttgaaaatattatacatgtgtcaaaattagaaggcgtttcccaagtgaattatataaacctacaaaacttattcggggaagaaatcagaaaaattcaacaagaaatatttaaaagtagaggagatatcttatttgcaaatgcaataatcttatgtgaaggggaaacggaagagcaggctctacctgtattctttaaagaattttttgggaatgaatactttgaatatggaattaacattattagtgttggaggaaaagggaaatataagccgtttcttcaagtggctaaagatttaaagattgactattatattttaagtgatggtgaaacagagactataaaaaaagttaccaaggatatagggaaaacctttggtactgaaaaaggtattgaagaatatagtaatgttaagtttttgccgaatgaatgtgatttcgaaatgtatctattaagtgaaggatatgataatgaattaattaaagctgtagaagatctatttggagaatcatatatatcttcttttatttctaaaaggaacggcaaacttcaaaaaagagaaaaaacgcaagatatttgtggtgagtgtaatcaacatatatttgtggatttaattagagattataatggggaagaaggttttcaaaaggctttgttagattgtattcatgataacaaaacttcatattcttcaattattgctgacattataattcaagaaagtgagggagacaaaaaagttcctaagataattagagaattatttgaggatataaataaaaatatgggtattttaaaaaatgagggagggatagtggatgttcccgttgacggagaaacaactagagatagttaa

SEQ ID NO: 72233 - DNA, 1878 bp, Lysinibacillus fusiformis ZC1
atgttcccgttgacggagaaacaactagagatagttaatcatatagacggttcattattagttactgcaggtcctggaagtggtaaaactagggtattaactgaacggattattcaattattgaatttaaataaaaaaagaatacttgcactaacatttagtaataaggctgcagaagaaataactgaaagactgaaattaggtgtagaagaagatcgtttcgaaaatgtatttgtcggcaccattcatagcttttgtttagatgtagtaatgaaccgtgggaatctaataggtttgccttcaggactaactctttttgaaaatgatgcagatcgtattgaaattttaaagagggtttttgctgaaatgccagatataggggagtttatggatgaaaatagggataaaagaaatctactgaagaattgtttaaataaaattagtaaacttaaacaagcatatatttctccagaggttttatcggattcccagatagaaagcgatatactatttgccagaatatacgaagcatacaataacatgatgttagctcaaaaagcgctggattttgatgatatacttttctattcatatagaatatttactgaaagacctcaaatagctaagtcttatacaagactttataaatatatttttgttgatgaggcacaagatttaaatgaagcacaatataaaataataagagcactttgtaaggacttctctaatctaatgatggtcggggatccagctcaatctatctatggatttaatggttcagatagttcatatatgacagaaaatttcaaatcagagtttaatccggttgaatataatttggttgaaaattttagatcaacgaagaaaattattgatgctgctaaaaaaattcaagtaaattcaaaaagcagtgtagtttatcctttagaaggagaacttagtatcattcctttagaaaatgaagaagaggaagccgaatggataaaagacaaagttaatgaattgttgataaatggaaatgagtggattgaaggggctgttgaactagaaaaaataggtattatagctagaaatagatatatctttaattcaattgaagaaaatttcaagaaaaatgatatagcatataattacggttctagctctaggagtgtagaaagtgagtcagcagaaatgaaaatttttgaagctggtttacgtgtgataattaatccttatgataatgtacatttcaatcaaataattaatttattacattataaatgtgatgttaagaataatcgatttttagatactatgttagaaattgatgtagacatggtcacgaatgtagataaggaaatttttaaagcagtaaagaattcatggggaattttgatagaagacgaagaaggctttactaaagcattaacggaaatttcaaatgttctattttctcaaacccaaagtggggatttagatgaaggttctcaatatttaataaataaagatattgaaatgtggagagagcattggattagatattgcggtcaaacagtagtgggccaaagatctttttcccattttagaaatcaagtggcactgggtagaacccaaatgcataattcaaaaggaatttccttattaacggtacatatgtcgaaaggtttagaatacgatatagtattcttagtaggtatgtgtgaaggaacattcccagattatagagcaacgaacgaacaatcttataatgaagagttgaataatatgtttgttgcattaacaagggccaagaggatttgttatttgacatatcctaaatataaattaatgccttggggcaagctgaagtatcagtctccatcaagattcttaaaaataattagtgatgaatattaa

SEQ ID NO: 72234 - DNA, 1947 bp, Geobacillus thermoglucosidasius C56-YS93
gtgtacatttctaagttgtatattaagaattttaagtgttttagcgaatttgagatagaatttaatgaaggtttaaatgtcattattggtagcaacaactcgggaaaaacaacgataataaaagcaattgaatacattttcaacagatctgtatcgaagacaccatctattgacgattttaataaagaacttgacgatttagacaatccccctgaaattataatatctgctaccttaagatcctcacataatgacaccttagaagataaagcgattgtagcaagttggcttacaaaattagaatcaccttgggaagcaacccttacttataaatactttctaccagaatccaattggaaagaatataaaggtgccataaaagaggcacaaaatgataaagaaagatgggagatacttgagaatttcttaaagaagtatgtatctagaatttatggtggaaaaattgaaaataaaataagggctgaaacggagtatttagaaaaaattcattgcgagactttagatgcactaagagatgtagagagcaagatgtttacaggacgaaatccacttcttaaacagcttttaacacattttaaagataatgaacctaacaatgaaaagagttctgattctctaataagttctaaacaagagtttcaaaagtattctaataaagttgttgaaaatatagttagtcgtctgaacagaaaagaaattcttcgctttgcccaaaatactggtgcagcaattgggggagaaccagacatcgatggtcgattagaagaagctgatgtactttcaattctacgtctaattatccgaaatgaaacaggtattgaaattcctatcattaacaatggtctgggttataataacctcatttatatgtcattaattttggcgaaattcaaaatgattacatctaaggaatatggcgaaaatgcaaaaacatttccaatactgttaatagaggaaccagaagctcatctacatcccgctttacaatataattttctaaagttcttaaaagaagaaatcgataaacagacgttgagtcgtcaaatttttattaccacccattcaactcaaataacatcagcagttggattagatccgattatttgccttgagagagataacaaacaacaagtgcaagcaaagtatccaggtagagtgttttcgaacagtcctgaggaccaaaaatctaaaggatatgtagaacgttttcttgatgcaacgaaatcggctatgttgtttgcaaaatctgttttattcgttgaaggtatggctgaattgattttatttcctgtattagcagaatcagtaggatgcgatttagaacggaatcatgtagcaattgttcgtgcagatgctttgacattttcccattttataaaaatgtttggagcaggaattagtccagatcgtaagagatatgcattacaaaagagagtagcctgtgtaattgatactgatccatgcagaaagctgaagaaagaggagaaagggaaaaaaagaacttggacgtcttgctatccatttgaattggaacaagatcctgacaattatgaatacaaaaccttttctggagctcttacaaatctagagcaaagaacgaatggctgtgttaatgttgaagttttttacaataaaacaggtaaaggaaaaacatttgaatatgatttggcatgggagaactacttaaatccaattttgtttcaggatattaagttagatgattttgagtctttagataatagtgattggttaccagaagacaaagagagagcaagatatgctgcatcatatttaaagtatgcagatagaaggaaaggtgagttagctcttgaaatagctcatagattgaaaaatgataaatctgctaagttaattctgccaagtcatattaagtctgcttttaattgggtatgttataaggaatga

SEQ ID NO: 72235 - DNA, 1809 bp, Geobacillus thermoglucosidasius C56-YS93
atgttccaaagtgatgctattactattgattctgaatatttaatggacaagaaggacttacataaacattttaagataattgcaggtccaggagcaggaaagactcattggcttgtaaaacatattagaaatgttttacaaaactccgagcgacttggaaaggtgtcaaaaattgcatgtattacatatactacagttggttctgaagagattatcgagagattaggaacggatattcaaagagttgaggtttcaactattcatagttttttgtataaaaatattgtaaaaccctactgctacttattacgtaattcagacgggactacattagtaaatgtagatgagatggatggacatgaggagaataaagtgtccaatgggaggctaatggaatggaaaaaagccaataaccttttctacatgaaggatgacagccaaattaaagaatgtttagaggcgctggaatggtatttgaaggaagatgaaattgtcttacgagttcgcagaaatgttaataaaaaaatagatggatattatattagcaaggatcatttactttcttataagaagttgtgctggaaaagaggaattatccatcacgaagatgttctgtatttttcttataaaatattaaaagagttccctatcatattagattgtttatctgctaaatatccgttcatattcttggatgaatttcaggataccaatccaattcaaacggagattattaagtggttagcgtataaaggttctgtagtaggaataataggagatccagctcaatcaatatttaaattccaaggagcatccagaaatgattttatagcgttttctcttccgaaccaactaaactttaaaataacgcaaaatagaagaagtagcccaagtatcgttaaaatacttaactttatacgaaaacatgattctttacaacaaacgcccattagggaagggaaaagttatcctgttatgtttatggaatataatgatgacaatattatggagttaataacaattttccatagagaaagagaaaacaaaaacctcaacaatgattattgcgtgttagccagatataatgattcggtgaaaattttaagagatgtaaaaacattgaatgtatgggacgctctttctgaaacagattcgtcaaagagggataggttcattagaaatattatattggcaagacagtttgcaaaagaaggacgttatgaagtggctgtaaaacaaatgatgaaagtttttacaaccgatcggaatagatcattaaaatcccctttccgtcctgggcaaaccataacgtctatgcaaaaaagaagcctggcggttagtttattagagtatgtaatgaattatccaaatagcattgagaatatctcactatataactattacaatgatttatccttattcttaagtaaagcaggttataaaataacgaattatggaaaaggaaaggctaaagactttgctgaaacaacaataatgtcagatttaattaatgaccttaaaatgcctgaagaaaaaacaagcacaatcagaactattcataaggcaaaaggggcagagtttgagtcagttcttgtattattagataatatcgaattattagaattattgcttaatccagatattaatagtaatgaagatgacatcagaatattgtatgttgctttaagtcgtgccgaggactttttatttattgctactccgcctttgacagcaacccaaaggcatcaacttgaagaattagggatgaaaatggtatcaaaaacggttcgtgaggaacagttgacttag

SEQ ID NO: 72236 - DNA, 1710 bp, Shewanella baltica OS678; identical to SEQ ID NO: 71778

SEQ ID NO: 72237 - DNA, 1455 bp, Shewanella baltica OS678; identical to SEQ ID NO: 71793

SEQ ID NO: 72238 - DNA, 1920 bp, Shewanella baltica OS678; identical to SEQ ID NO: 71794

SEQ ID NO: 72239 - DNA, 1671 bp, Shewanella baltica OS678; identical to SEQ ID NO: 71795

SEQ ID NO: 72240 - DNA, 1854 bp, Granulicella tundricola MP5ACTX9
atggaggtcttccttggagacgttgtgtacctctctcaattgaccattcggaacttccgaaaactcgaacgggtcgacgtttcgttccaatccggcctgaatattctcgtcggcccgaacaacgtgggtaagacagccgttatcgacgcgcttcgcgctctcctaggcggacatgacgaaccactgccgcggctttcgagtgacgacctgtttcggtcgaagaccggagaggtggcaacagctattgaattcgggtatgtcttctccggtctcgatcttgacgatgaggccgacttcttgccatcgctcattgcgaccggaccagggaagtcgttagaggctcacttccacatccgctacagcgatccggaaaagtcctctggacggctccgggtgaagcgctggagtggcgctctcgaagaaaacagtctaaacagcgaaatgacggaaaacctgcgtggggtgtatcttccgcctcttcgggacgtagcgcttggattacgtccaagccgatccagccagttggcccggctgattcacatccttgccgatgaagccggtcagtccggcatcgaaaaagctcttgaaaagctcgatacagatctaaaatctcacccgcccattatcgacatccaattggcgattactgggcatcacgagaagatgctcggagcgcaactcgcacaagtgttggaagtggggcttagcgcgagtgatttccagaggttttcatcacggctctcattgatggtcgattcgtttgatgttgagcaaaacggccttggattcaacaatcttatttttatgacggttgtactgagcgagcttgcgcgaaatcctgaaataacctatcgcggtcttattgtggaagaacctgaagcccacctgcatccgcacttgcagagcattttgttgcagtatctcgagaaggttaagtctctgaagaaaagccagaagtcggcgacggagaacttaggcgagaaagagcctccggccgagtccgtagccgaagaagaagtcggcgatgagatcgagggggcggttcaagtgttcgtcacgagccattcgccacactttgcgagcatcgcaaaactatcttctctggtgtgcctggtagaaggggacactggaacgaagagttttttacctaggtccgttgtcttcgacaagggcaaacgcgagaagcttgaacgatatctagatgtgacgcgtgccgagctgttcttcgccaaacggatcatttttgtcgagggtgccgctgaactcatgctcgtaagtgttatggcacagaagtgtggctacaatctccgtgattatgcggtcagcctgataagcgttgaaggtctcaacttcgattgcttcttgcctctgttcggggaagatagcattcgcgttccggtagcggtcatcacagatgcggatcctttcactatggtcggtgaggagtctgttccggtgtatcccggagcgaatgatgccattgagatttcagcgaacgccaaagttctattgcagagtacagaccaattcatcggggtgttccatggccagaagacgttggagtacgacttggcactctttgaaagcaaccgtacgctcatgttgaaggcattgaaggtgctgcatccggggatcggcgcaactttggataaggaagtggcggctgcaaagggggacgccgcaaaagccaaggtgctgttcagtgggatgttcgaaaggagcagcaataatgtgcagaagggaagattcgggcaagttttggcgcaagagctgctcgacgctaagaacgattgcgctgtccctccctacatcaaaaaagctatcgagcatgtttgttgcggcaagaaggcctag

SEQ ID NO: 72241 - DNA, 1725 bp, Granulicella tundricola MP5ACTX9
atgaatgagccatctcttgagcagaaagcgatcattctggagaagcttcgtcccctctgcgtcattgcctgcgcagggagcggtaagacgttcaccgcagtgcggcgaatggacacgatctgttcttttcttccgcagcgacgagacaacgtagctctattgtccttttcgaatgtcgctgtggacctgtttgggaaaacctatcgggatgacatcgttacgatgaagcgcactcgttcgtcacaagtctgtatcgagacgttcgatggattcctgacgtcaaagattctgcgaccgcatgcaaaccgcgtgatgaagtgcgctagcttaccatttctcttgtctggcacagagagcttcctttccaaccccagataccagttcaggccgaaaggtcagcagtttccgatcaaagttgatacggttgaggcatttctccatgacggacgtacggtatttttcggacggtatcaaaaggcgcaggtggaacttgagcgagcattacagactgttgaagccctgggagctctcggagcttacacgcataatcttgggcgctattgggcctatcgtgtgctgcgagaagagccacgcattctgaaggcattggccagaaagttctcacagatcgtcatcgatgaagcgcaggacgttgggtcgagtcacatcgcgattgttgaactccttgcagaagctggctcgcaggtaacgctgatcggcgatcccaaccaagcgatctacgagttttgcggggctgatggaaactaccttaagcgctatgccttacgcaaaggtgtgctcaagaaagaactcaccatcaatcgacgttcggtgcctcgtatcgttgccgtggcgaattctctctccaagcgcgatgactcagcctttcggagcactcccgcctctcacaatggggcatactttgtccggtacgataaaggcgaggagtcgcaggttatcgaagccttcgagaaggccgtgttggccgcaggccttgacctatcccgttcagcaatcgtctgccgagcgaacgaaagaaagaaacggctccgtaacttcggtagcgaggtagggcaaggagtgacgaagcaattcgcagcggcggcgatggctcgcgattctgcgggggactaccaacaagcattccggctgactgcgagagcagtggtgatgctgctcaagtctccgcccgatcatctgtgctcgcgcatgcttgatgtctctcgatatccggagtatcgaagtttgcgcaggattgtgtgggggtttacccgtcaacccgaaagcggcttgccaagtgcgacactaaaaaccgcgtccgagtggcatccagctcttcttgtacgagtgaaggcgctactccagaaattgaacaaggagtacggcttttcagaaatgccgaacatagggatgaagctggcgaagaagcagcttccagacctcccgatggttcagacaaatcaacagaaaatcatcgtcgatgctcgattgcgagttgagacggtacacggcgtcaagggggagagtctcgacgcagtcctgtacatggcggagcgcgcccatctgaaggcgctgctcgacggaacaggatcagagactggccgcatcggctatgtcgcagttacgcgggcacgcgatctcttttggcttggtatcttgactgcagacgcaactcttcaccagaaagaacttgtagctcattcgttcatcgaggtgtcggcttag

SEQ ID NO: 72242 - DNA, 2085 bp, Afipia sp. 1NLS2
atgaagctgagcggcatttcgatacgtaatttccgacgccttgagagtgtcacgatcgatatcgaagacaaggaaacgatcttcgtcggaccgaacaacagcggaaagacatcggcaacggcaatttttcgcacattccttggcgaacgcgactttaagattcatgatttcgcggttgcccggatggccgattttgacgccttcggggcgtccgacgaggcgatggcgctgccggaaatttctctcgatctctggtttacgatcgatcccaacaccatcgccttcgggcgcgttttcacgttgctcccgaagctgtctgacttcactagagttggcattcggctatcgtatggggttgaagatcagaaaaagctccgcgaccagtattccgcagcctatcctgccgatcagaaaggcaatcgaacaaagaccctttcacagtatctcgctaccgacaacaatctgagcagccattcggctatccgatacgcctcgcttgaggaaaagactgtcgaaggcggcggcttcgatgtgctgctcaatcctcttgagcccgatgaaggccgccggcttcttaagcatctcgtcagggtcgattttgtcgatgcacaacgtaatatcaacgatgacgacagcagccggagcaaccggctctcttcggcgtttgcgtcatactaccggaagaacctggaacagacagatcatgctgccgaggctcatcgcgtcatcgatgagaacaacaagctgctcaccgagcattacgccaaacagttcgatccgctgatcagtctgattaagcacctcggtgtaccgtcgatcaatgatcgggaactgcgcatcatctcgtcgctcagtccggaaaccgccctacgcggcaacaccgagttgctctacgtcgatcccggtcgagcccatgagcttcccgaactctacaatggcctagggttcaagaacctcatctatatggccattcaagcacggcacttccattcgcaatggcttctcacggctgaaaatcggccgctctgccacctcattttcatcgaggagcccgaagtccatctccatgcgcaagtccagcagaccttcatcgcgaacgtgtggagcgttattgatcagtcggcaaaagcatcggggcaaccgggtctcgtcccgcagctggtggtgacgacgcattcgtcccacattttggatgcggtcgattttgagaaggtccgctatttccagcgctgccatctgagcggcgaagtcgccaatggcgggattcgcaatgcctccgatgtccgtagcctgcgggcattccagcccgaggcggaggtcattgacgatatcctcgtgtcaccggcggaatcgctcacgttcctgaagcgttatctccgcctcacgcattgcgacctgttcttcgccgatgccgccatcttggtagaaggcgccgtcgagaaattgctcatgccgtcgatgatcgaggcatcggcagcccgactacgtgcgacctatctcacggtcctggaagtcggtggggctttcgctcatcgttttgaaggcctgttggcattcctgcgtattccatatttggtcgtgactgacctcgattccgttgccccgaccggatatccaagcgcttgccgtgccgatgtgcccgatgcccgcacctcgaatgcgacgttgaagaagctctgtgtccagacaacgatcggcggcctcgtgggaatgcctgcggctgacaagatcaacgaagcgaaagatcgctgcattgccttccagaatgatgtcgtcgtcgctgacggcgccgcgcagcaatcgatgcgccccagaacgcttgaggaggctatcgcatatgaaaatttcgcgcttctgcgggcaggcactcttaccattggtgtcgagattcccgattcgcttcccgaagcgtatcaagccatctatgatcggatacggtcagacaatttcaaaaagaccgacttcgcgatgagcttgctggccggcaccacggcttggaaggtgccgctctatataagcgaggggctgagctggcttgagacgcgtctatgtggcgcggcacccgatgccggaacaggagcctga

SEQ ID NO: 72243 - DNA, 1836 bp, Afipia sp. 1NLS2
atgacgacatgggtcgaaagtgaggctgatgcaaaggtacgcgcttgccttgatggccatcgtagcttcgctctgattgccggtgccggttcgggcaagactcgctccttggtggaggcgctgggtcgcgtgcgcgatcgggagggccgcgggctacggcagaatggccagcgcattgcctgcatcacattcacgaagcgtgcagttgaggtgatcaagtcgaggttgggtttcgacgacctctatcttgtatcgactttgcacggttttctctgggaacaaatcggtcggttcccagatgatatccgagacgcgctgcgacttggccggctgcctgccctgatcgaaaaggagcgggccaaggacaatggcggcaacagccgtgcggcgcgggatgcgcgagccaaagccgagcggctggagcaggaactcatggggctcgcagaggtcggggattttcaatatggggatgtccggttcagcgactatctcaaaggccgcctgagccatgacgacatcatcgcgatcgcgtcttacctgttcgcccacaatttaaccttccggcgcattacgggcctcagatttccctacatttttgtcgacgaggcgcaggatacgttcgaaggcatcgtcacgggactaaacctcgttagcgtaggggaggggctaccgatcgttggctatttcggagacccgtggcagcaaatctatgacgaaagcgctggttcgttcgccccacccgaaggtgccgagacaatcacgaagactgagaattttcgctgctccgaaagcgtgatccggcccctcaacgcatatcgcggtgacgtcgagcaatacgccgcgggcgacaataagggtcgcgaaggcagcgtcgagtttcggctcgtccagtccgaagcgcctgaactttccagaaaccgatattccgacgcgcagatcgagcgcgctctggtgcggatggatgcagcagttgcagaatggggctggcaagatcgcgatgacgtgatcaagctcttcctcgttcgacaaatgatagccaggcggatggggtttgctgacctcaatcgccttttcaacggaccatacgcgtcgtcgcgcgccgaagatgattttgaagcgggcgagcattttctgctcgtgccgctgacgacaaccattttgccgttgatcgccgcccatgagagcggagatagccgcaagatcatcgatatcctgcggcgggatagcccggcgtttgcggcggatgggccgaatgcgccgaacacgctgaaaatgatgatcgacatgtccaatgccctggttgggcagctggctgacctctggaacactggtccgctaggcgatatcctccggttttgtcaggacagacagatcatccgcgtatccgaaaaattgcgagaacatctcggtcgcgcgcctcgtgccgaagaatatgatgcggaagctcacgggctcgataaaggcgactggcttgccgatgctttcttccaaatggacgtgggacagatagccccctatgcctccttcatttcgcggaatacggcattcagcacgcaacatggcgtaaagggcgaacagtacaccaaggttctggtcgtttatgacgatgttgaggcgaactggaacaactacagcttcaccaaaatcctcacccccgcgactgcgggcgagcccaccgacggacagcgggagcgtggacgcaagcttgcttacgtgtctttctcacgagccctagatgacctccgtgtgttgctgttcacgccgacccctgaagcagctcgcgccgaattgctcgaaagacagctactccagcctgaacagatttccgttgtgtga

SEQ ID NO: 72244 - DNA, 837 bp, delta proteobacterium NaphS2
gtgaaaactcttcacgcatcaactgttataagcctccaggattttcagcccaaaaacacttcggatcaagagggagaagataacagaagcgagactctgaaattccttaaacagtacttgaaactcacacattgtgatctgttttttgcagatgctgctgttcttgttgagggtattgctgaaaagctcctactcccaaaaatgattgaaaaggaagcaaaggagcttgaattctgttatttgaccgttctcgaagtcggtggagcatacgctcaccgttttgccgacctctttaagtttatcgggataccctaccttattataacggattgtgattctatcgatcccaatgactccagaaaatcatgcagggcagatacaccaggtgctaagacatctaacgcctgccttaagtttttctatgataagaatattactgttgaacagctaaaaaataagaaagatgcagaccagattcttgcagatagctgttgttatctaaccttccaaaaaccagtaactgtagatggatatcaggtaaatgaaaaaatgcatggtagaaccttcgaggaagcttttatctacgaaaatctgaccctgtttaaagacggaaaagttacgacttctataacagtcgaaggcgattacgataaagattatgagcagatttataacttggtaaaatcggccaattttaaaaaagcggaattcgcattagacattgtttttttggaagaggattgggaagtacctcattacatcaaggtcggattaaattggctcaagtcaaagatgggaaatcagcttgaaacaattcaggaggcacccatctcatga

SEQ ID NO: 72245 - DNA, 1845 bp, delta proteobacterium NaphS2
atgagctcaaatctaatcccaaccaaagcggatacagagatcaaagagtgtattgacgaaaaccgtagcttttccgttatttcaggcgcaggttctggaaaaactcaatccttattaacagctctttcttacatacgcgattcaaaagctgatgaactcaggaaaaaagatcaaaagatactatgcatcacatacacaaaccgtgcggttggcgtaatattcagtcgtctcaatttcgatgaaattttttatgtttcaacccttcacagctttttatggactgtcattaataggttttcgacagatataagaaaaaccctcattgaccatcacattccagctcaaatcgctaagaaacgggaagacgataatggaggaaacagtaagaaagctgttgccgcaagggaaaagattgcctccctgcaagaggatataaaatttcttcaagagatatcagatttctcatacagtgataattcaacattcagtaactatagcgaagggcagctcagtcatgatgacattatagccatagccggacatctaatcaccaataacgcgatccttcaaaaaataatggctcaaaaatatccctatgtttttgtagacgaggcacaggatacttttcccgaaattgtaacggcacttaatacactatgttctggaagcaacttgcctattgttggatattttggtgatcctgttcagcaaatttacgataaacgggctggaaatttttcagggccagaagggttcaaattaataaagaaggaagaaaattttaggtgttcaaaagctgtagttaatctcctgaatgcatttagaacggacattcaacaagtttctgctggcgaagtatcaaagcttgaagggagtgtggagataaggcttgttgctgcagagcagccggaaggcccaagaaagcgatacacggacgaacaaattgacagagtttctagcaaatttaacgaaactcttaaaatctggggccttcatgagaatgaggaaaccaaatatttgttcttagttagacaaatgattgctaaacgtcttggatttgaaacactccaaaaattatttaccggcttatacgcttcaacacgcgctcaagaagactatgagtctggtgatcactttttgttaaaaccatttcttaaagtgatatcccctttgctgattgcgcacaaggcaaataatcaaaaggaagtcttggatatcctgagaaattcaagcccgacattcaatccaaaaggcaaaaatgctacaaaatcacttcgaaaaatgaggaatttggctagaagccttattgaggaactattggaaaaatggtcaaacaataccctccaagagattttattatattgtcaggaaaacgaaatcattgaggtctcagaacgactttctcagcaccttgaaagatcaccgcgtaatgaagaatacaacaaggatttacatgaaatagataaggaagaatggctagttgatgatttttttaaaatgcgtaccggtgaaatcgagccatatgtcgaatttataaatgaacacacaccatacagcactcaacacggtgtgaaaggcgaagaatataaaaacgttgttgtcgtttatgacgatattgaagcagcatggaacctatatagcttcacaaaaatgcttgtaccagagatagccggaaatccaacagaaggacagctcgacagatcaaccaggcttgcttacgtttccttttcaagagctgttgaaaacctacgcattctgctatttactgctgatcctgaaggcactaaaaatattctaatagaaaaatcattgtttcatgaagaccaagttatcataagccaatag

SEQ ID NO: 72246 - DNA, 1713 bp, Escherichia coli NC101
ttgaagagagagtttaagttggaaatatcatcactaaagcttaaaggttttagaaactttaaagatgcattcatcaattttaattataataccctcatcatcggttccaatgatataggcaaaagtaatatgctgcattctttaaggatattattagataaaagcctttcagaatctgaaattgaaccagatgaacttgatttccatttggaaaatggaacgccatgtgaagaaattgagattatagtccattttaaagatattaatgaagatgcagtgctttcaattcttaaaggaaatgtcagtgattcaggtgaatcattcattaaatattctgctataaaatcagatctcagctataaactattcattggaagttccttagaatcattacaagaaataaactctcggtactatcttaaattcgttaatctaaaatatattcaatcacaacgagatttagaaaagtttatccgtaaggaaaaaagacaattactaaaaatagcacaacaatctttgactccaggtgaaagagtagaagatgatgatttgttgagagagataagttcagatttacaagtaataaatgataagatatcgcaacttatatacgttgaaagagccacaaaggatgtcaatgacgagataaaaaaacttgcacatcattactcagaatattctgtacaacttgatactggggtaattggtataaatgagtttattgatagcctacaacttggagccaattcgaatggctccagcgtcatgcttgggggagacggtagaaataatcaaatattattagctctatggaaagcgaagagtatcagagaacatgatattgataacgaagttatcttttatgttatcgaagaacctgaagcacatttacaccctcaccaacaaagaaaattggccgattatttgacaactgaacttccggggcaaacgatcatttcatcccattccccccaaatagctgtaaattttgaacctggctcagtaataagattgcttgaccgggccgggcatactgtagctgctagcgaaggatgttcaagatatattacagatggttgggaaggaatgagctaccgaatgagtatattaccagcagagtcatttttttcaaatggtgtattcttagtcgagggaccgtcagaaattttattttaccaatctttggcaaaaagtttaaatatcgacttggattattggaatatttcaatagtttcagttgatgggatagcatttaaaatatacgtggctatacttaatgcgttagaaattccatgggtaatgagaaccgataacgatatatcaaaaataaaagataagtggcaatatgctggtataaatcgatgtttaagtatagtaggtatcgataactttgagcatagtgatgttgaaatagcacctatggataccgtaaccaatggtgaatggctgaaagtttctaaaataataaatgaacatggagtatatttatcaaaaatcgatttggaaactgacttggtagaagagttaaatacaccagtactaaatgctttagataagaaaagtaaccaaagtgcaataaagtatttacagaagaaaaaagcattaagaatgcgtgaacttcttaaaataataagaaaagaccttcacaaactaaatgcaggtaatttagtaaaaccattaaaccatcttgtaaaactgattaaaggtgaatga

SEQ ID NO: 72247 - DNA, 1626 bp, Escherichia coli NC101
atgagcgtcttttcaccaacgcatcagcaaacattggctattgattacactggcagtatggtaataacagcatgcccggggagtggtaagactacggttataaaggaaaaaattagaaatattaccgcctctctccctgaccataaaggagttattgcaattacattcacaaggaaagcaagttcagaactggaacgtagatgcaagtctgaaggacacgatgtaaaacatagtttttttggtacaattgatagcttttgtttaaaggaactaattattccatttctttcaaggttatggggaggtacgccaacagaatgtaaagtgctaaagagattggatccgccatatagctatttcatagaaaacaatttttctggcacgccatcaatcattaatatcaatgaagattctggatataagaaattatacgataatggaatattgtggatgggctcattctccgccttagcactgaaaatattaaatgaatcatctgcggcaaaacgatatattaaagcgagatacagtcatatatttatagatgaatatcaagattcatctttatcccagcatcaactatttctaaaaataaacgaacttggtttgtactccattgctgttggtgatgtttggcaatcaatatatgagtttaggggaggaaattcgaaacttcttttagagttagtcagtaaaacagaagtttttaaacattttgagataaacttcaatcacaggtgccacccttcaataagcaattacgcctcaagattacttaacccaagttataatctgttaccaacagatgatataagagtatttaggagacgacttagtggaaatcttaaagataatgcagttacgatttcctcttggatttcagattggttagaaagtggtgaatgggagttagaaaaggcaaatcaaatagcaattttagcaagaaaagaaaaatcgttaacacgattttgttctggattaaacttaaacttcaggctttatattgatacaccactagataaaattggtactgagtgttcagatctgtacaaagatcttttagcgtataaatatggatcaataaatacagttcaagagtttattaacaaggtttttgatggggttataattaatgataatattaagttcttcttgaggaagaaaataaaagaaattaaaaccgaattaaaatatgaagatttaatacataagtttcatgatatcgccgatattttagggataaattcgacagaacatactgatgaggctgtgataaaaacaatttctaacgaggttttagtcaagcagttcaagccattagatgataatgagttacaagtaatgactcttcataaatctaaaggattagaattcaaagtagtatttcatctagatttagatgaatggtctttcccatatagaaaacccggcagcgaagataaatacacacctctatatcctacccttcaacaagagcttaaccttcattacgttggcataactagagctgagaattgtatcgtgcttattaattcctctcttagagaaaattcaggtggagaatttaaaaaatcagatgaatcatatttttttaaattaccacaattgaatggtctatataattaa

SEQ ID NO: 72248 - DNA, 1968 bp, Lactobacillus iners LEAF 2053A-b
atggagtttaatgatggattaaatgtaatcattggagctaacaattcaggaaaaactggtcttatacatgctattaggttacttagttcaccatctgatattaatattaatgattttaataaaaataatcttatcaattataaagagaaatatattgatgaagcaccttctataaggatagaatatgatatacagcacgaaatttttgaagaagatactacagatgagagcattttaaaaattttaccatttttaggcatggaaaagatggcggaaagccgtataagcactgaaaaagacacaaaatataatatttatgcaactatacaggcaacattttgcttagatagtaaatttactgaggaatataaaaaagaggttcaagacataagtaattttgatgactactttttaatgcttaacagatatataaatgatcattatttatggatatatacaaatggtaaaaccgaaactaatattgattcaaaattggctaaaaaaatctttgatatacaatatattaatgcggaaagaacaggtactgatgttgctatagaaataaaaaaagatatcagttctttattaaaagatagcgaaaaaaagagagagtatgacgcacttatttcagaacttaatgataaattaaaagaacttcttgaaccatctattactaagatgtcaaatttatttaactacgaaaaaaatgagataggcttagaaaaaggcaatatttccataacttcccaaataaactcaaaactatccgcagaggattcctatataacagaggtaaaggatactaaatttaattataacttgccattagtatataatggcttgggatataataatctagttaatatatatatgtctattaaattgtcagatgtgaaaaaagggaaagattttaaaattttgtgtcttgaagagccagaggcacatttacatccagcaatgcaatacaaattgttcaaatttattagtaacttaaataaaagcaacaaattgaatcagcaggtttttgtaactacgcactcaagtaatataactgcggtgtctggtttagattcaatgtatataattcagtatgatagacaaggagaggtttcagattgttttcaacagagcttgaagcgccaattaacggataaagacgacagcacttttaaatcagatgctaaaaatcatttaaataaatttttagatgttactcgttctgatatgctgttcgcagacaaaataatactagttgaaggtattgctgaaaaaatactcttgccgatattcatggaaaaactaggttatccatatgaagatgaccatatatcaattgtagaaataggtggaaagcattttgaatattttatagaattatttaatggtaacccagtaaaaaagaaaattctttgtattaccgacaacgattttaaatggtttaatgatgatggagaaaattgtttgttcaaagaatacttagaatatgaagctccacatcttaaaaagttaataagccgttataagtttaatgaatttaaaatagtcactcaaataaaaggtggaagcacatttgaagacgagttatttatagaaaactttaaaaatgaagatattgtatcatccctatttgggttaccactaagtaatacaatgaaagaattttgcaaaaacaatggattttctataaatgattggattaaaaataaagaattaattgatggcaggagtattaaattaatatcgaagtacctggattgttataagaaaaaaatagaattagatccagagaatcaagagttttatgaaaaattgattttttctaagttgttcttacactatgccagcaataaaaaaggtgatgtagcattaagtttaatcacagataaaaatttttttgatgacaaagatataagcaaacttatcgtaccggggtatattatggaggggttggaatggttaaatcaataa

SEQ ID NO: 72249 - DNA, 1929 bp, Lactobacillus iners LEAF 2053A-b
atggttaaatcaataacttcaggagatatacttacaaaaaatgaattattgaatcatattaagatttatgcaggaccaggagccggtaaaactcattttattgtagaaaatataaagaatataatatcgacaaataaattaattactaattcagaaaacagaaagattttatgtataacttatacaaataaagctgtagatgaaatagctaacagacttcaaggatttaatgagtatattgaaattaatacaatacacggatttattattgaaaatattattaaaccatttcaaactgatctaataaacataatgaaaaatgattttaatataaaagtgtgcaatggaagtactattagttcacaagtggagggattgtcattattacatggtatagataaggaaaccatatataaatacattaacatagaaaaaaatacttcggattcctattcatatagtaaaatgaaaatgagtgaagtacaagtagatgtggataaatttataaatggtataagattaaataaagatttgaaatctagtttaactaatccaaagaatttttctgtggaagatattgttcctttaaaaaaatatatttggtctgaagtgagaaagcttacacatgatgaaattttgtatttcggatatcgaattattcaaacgaatccaatagctttatatacgttgcgagttaagtttccttttatttttgtagacgaatttcaagataccaatcctatacaaacagaaataataaaacttataggcagtaaatctacaaaaattataatagttggagatgttgcccaatctatttatagttttcaaggagctaaggtttctgattttttagagtttaatataaataatgaagttgaagagtactctattgatagtaatcgtagatcaacagaaaacattgtaaatttttgtaattttattagatgttcagacaaaaatatttttcaatcaagtataaggaaatataaagatgacaaaacaattattgaaaaaataagcataaaattcttactgggtagaagtgatgaagtaaaaagaacactttattctattttaaacgataatggagttatactggctcgtagttgggtagatgcatttaaatttattcagaatatagaagaaaatcaatctgttattctgaaaaaaatttataacagttattataacacaccaattatgattagagatgaaataataaaacataataatgtgatgtgggttaaagcttttaaaattatatttaacttgtgggaaggttataataataaatcttttggtgatattatattaacactgcaaaagtattttcaaatatctccatctaagatagaaataaatcatatatattcaatatacgaatttctaaaagaattatttatagatgtaagctctgacacattaacagtggatataattgaaaaatttaatagtttaatttttcagaagaagaatactattttaaaaaaattgtttggaatcaatgatataggaatttatattttttcagaatatgacaaagaagatttgaaacaaaatgtaaagtgtctaaaatggaatacgtcatattgtctatttaatgaggttttttgtgagaatagtaaatatatgacagttcatcaatctaaaggattagaatgggataaagtaattgtaagcttaaatcccaactcatttgataaaagagaaggagttgatttgaataaaatgtttacttctcctgtattagttaatgaaacagcgttagatgaatttacacgcttattttatgtagcctgtagtcgtgcaaaaaatgaactttacattcatttagaagacgaatctttgcagtcagttattagaagtagtttagaaaactttcaagaaaaaagtggtatagatattaattatgagtttatacaataa

SEQ ID NO: 72250 - DNA, 2259 bp, Streptococcus vestibularis F0396
atgtatttaaaaagtttatcaataaaaaattatagaaaatatggcgaaaaagaacaaaccatcaacttcgctcatagtaaatggccagaaaagacagatgatgaaagtgaatcaaaaaaaatagatataacagaacagtatatatcaaaaagttcatcattaattgtaggaaaaaataattctggtaaaagtacaatagtaaaattattaaatactctccaaaataccaagtcaggtagtcgaaatatttttaagtatacagattttaatttaaaaatgttgtcagattggtatcaagagaatattgagagtaaatctgaagaagagataaaaaaacttgataagtttccgtttctggagtttcaactagtattaggaattgatgatgaaaatgatttgatttcaagtttcgaagatatattagtagtaagtggtataaaaacagtagaaactcaagaaaaccaagatattgcggaagtaactatagatattaagtatgaagtggcggatgagagatcttttagagaagagcttattaaactaaaaaatagtaattcagaaacagataatcagcaagataaaaatatcgtttataaaaaagagattcaatatcgacaatttttaggtttatttagcagtaattattttgtattaaatttttatcctataggaagagaggagcctactaaagaattttctctatcttcattactaaaggttgaaacaatagaggcaaatacggttaaaaatgacaagacactttcgcaagcttacaataaaatagtctcaacttatataaaaaataatgatataactacaattgataaattagttggtgatattaattatcaagtgaaggatatggttgataccaatatcaagaatattcttcagagtgcagtatcaagcattgaatcaactaagaatttaaagatgaatttacatccagatgtaactttagagaagatttttgcaaatagtattatctatgagtatcaagagggaaataataatatacctgaaagccagtttggtatgggctatacaaatttgatggttattattgcaaagattgttgattacattgaattatacagcaagaaagatattaatggttcagtaaatattctctgtattgaggagccagagtcatttatgcatccacagatgcaagagctatttataaagaatatttcaaaagcaatcgctaccttattaggtaaaaaacagcagctagatacatttcaaattattattacgactcactcaacacatattttgaacagtaagattcaatcaggaaatacacttaataatattagttatctaggtcaagcaggagcaaataatattataaaaaacataagtgatgacgcaatagtatctggaagagatattgacaaaaaagcttatgaatatatcaagaaatatttaaggctagaggtatcagatattttctttgctgatgcagtcattttagttgagggtgtttcagaagaaacctatttaagatatgaaattgataagcatccaatattgaaaaatcatcatattaaagtttatagaattgatggagcttatgctcaccagtttattagtttattagatttgttagaaatcaaaacggttatttttacagatttggatctaaaaagatctgaagatgaaaagaaaattgaaataaagagtaaagtttttgaagatcctagtgattttgatattattccttcaaatattgatgatttagaaggaaaatatggagaaatgggaagttctttgaccactaatggtactttacagtattttataaaaacagaattaaatgatgaaaatgctaaatttggtgaaattaatagcaagataattgacatgctaactgataaagaagaattgattgttgagtataaaaatatttccgtatattctcaaggtaaaatcaaccgatactatgctactagctttgaggaagcaattattttaacaaatgctaaaaacagtgaaggtagccataaaaataaacaatcactaattaaacttctacaatttgttcatccaaagaagaaatattttggagatattgatgaatcttcagaaatagcagataagtcttatatgtatcaagctcaattatctgatgggaaatcaaagttttctactggaattatatatttatctttaactgatgatgagtttaaccttaaacaacctaagtatattgaatcaggtttgaaattgctttgtgattattttgaggagtaa

SEQ ID NO: 72251 - DNA, 957 bp, Streptococcus vestibularis F0396
atggcatttacaattaatccagaaaataaacaattagagattgatattcagcaagaaattaatgaatgtttagataattttgagagcttttgttttgatgctggtgctggtgccggaaaaacctatgcacttcaaaaatcaattgagcatattttaaagtcggagggggaaattttaaagttaagtaatcaaaaaatcttgtgtattacttatactaatgctgcaaaaaatgagattcttgatcgacttggaaaaaattcttcggtggtagtatctaccattcatgaatttctttgggggtttattgcgattcagcaagaactactgactgaagaacataaaaataaaataaaaggtgaactcgaaaaaattgaacaaaaaataaatggaaattctctttctagcaatgtggaacagaatgaatttcgagagcgtatctgtgatgaagattttctaaaagtattttatagtgtatctagtagtcctgctaaaactttcaaagaagtgattaaaggttttgatgaatactttagtccatatctaagtagtgttaagagctttagagattttgttaaggatattaataaaaagtataagcttggaattacactgaaggagattgaagataaaaaatctaaaaaagttatttataatcctgttcagaacagagataaacttgaaaattatgttattagccatgatacattattgctttactgtgagaatatcattacgagtcagaatttattaaagagattattttcagatagatatccatatgtattagttgatgagtatcaggatacggatgaaaaagttgtcaatattattgatagtataagagagtactcaaattctaagcagaactttgtggtaggttttttggagactccttacaaaatatttacggttcaggagtgggtgttctgccaaataaagaagaatataagagtatag

SEQ ID NO: 72252 - DNA, 1989 bp, Clostridium butyricum E4 str. BoNT E BL5262; identical to SEQ ID NO: 72176

SEQ ID NO: 72253 - DNA, 1803 bp, Clostridium butyricum E4 str. BoNT E BL5262; identical to SEQ ID NO: 72177

SEQ ID NO: 72254 - DNA, 1962 bp, Escherichia coli 2362-75
atgaaaatagagaagataaagctacagaattttcgttgtttcgggcatgaggtggtcgagctaaattttgaggaagaactgacaatacttgtcggcggaaacggctccggaaagacggcagtgctgcaagctgtgtccaggttgtttggtacaacatcagcgcagcgatcggtacagcgtcgagattttcacatacctattgaccggcaggagctgcagtctggcgacagtctgtttgtcgaagcggtacttgccttccctgaactggaagagcaagacgcttctcctcttgatgccgttccggagttctttaatcagatggcggcttccggtgagggagagccccttaaggcccggatacgactacaagcaacatggacggatgacggtacgccggagggagcaattgaggaggatatacgctggataagagccctggatgataattttgaatgggatgactgttccagggttcaggctgtagagcgctcttcaatccagtttatttacttaccggcaaatcgtgatgcgacgactcaagtgaccgcccttctaaaagggcggttatggcaggctgccaaatggtcgacggcatttagggatgcaagctatgttaatgccggtcagatccagagcagtttcgaggaagaggagccgtcgaagtttctgctggagcgtctttcgaagcgttggcaacaggtccatgaggccgatacagacagtaaaccgcgtttaaggctcatcgagaaccgttttgaggagcttgttcgtaaagccgaatttacttttacgcctgatgaagaaggtcaggagcgtcgtttgtccgagctgagtgacggtcagcgctctctgttccatatcgctcttacagcggcaacgctcgaaaccgagcgggaagcattttctttgcctgctgatgacagctcatttgaacaggataagttacgccgtattcacctgacgattcttgccatcgaagaaccagaaaacagcctgtcaccgttctttttatctcgcatcatcaagcaggcgagagagattggcgcactgccttccgcgcaggttctgctatctagccattccccatctatcctgagccggatagagccggaggaagtgagatattttcgtatggaccggagcgctcggtgctcatcgatccgagaactgaccctgcctgaagatgatgttgaggcaagcgtttatgtcaggctggctgtaaaggcataccccgaactttattttgcgcgatttgtaatcctgggtgagggagactcagagcgagtagttattccgaaaattgcggaagagatgggtgtttcccttgatccatcattcgttcccgtcgttccgctcggtggacggttcgtagcgcatttctggcggctgctgaatgatcttgagattccacatgccactttgctcgatcttgatctggggcgccgacatggtggggcgaatgccatgagaagctgccttcagaatttggccgctatcgggagtaatttggggagcaccaatggtgctaatgctgctcagcttaccgaccaacagctttataatgaaggcctgcaaggtcaatggcttcaagcattcaggagggaaggagttttcttttcctatcccattgatctcgattttgccatgttgctcgcctttccaaccgcttatcaggttgccaatccaggtggcaatggaccccagagtagtgctgctgctattcaagccaaaaaggtcagtacgctgaaaacaggtggtaatcctgccttgtataccgcgcattatgatgacgctttcaaatggtatccgtatctgttcctgagccgcagtaagcccgaaactcaccttgcggctttttcccgtatcgcgggcggcggtgttactgcgtccgctcctgtagagctcagggcgctcattgagtacgttacggataagcttaatctgtcaggagagaatgaatga

SEQ ID NO: 72255 - DNA, 1866 bp, Escherichia coli 2362-75
atgacccgcgtaagcagagacgactgggtacctcagggtgtcggtggtctggaagggagagcgtgggaggctttacgtgaaaccgatagcagcatccttgtgaccgctggtgccggtgccggaaaaactgagtttctggcacagaaggcgacctatcttctgcagacaggtatttgtccggcacccaaacgtattctggccatcagctttaaaaaagatgccgcccaaaacctcgccgaaagggttgcaaagcgttgcccgagagatcaggcgcggcgctttgattcgatgacttttgatgcctttaccaaggggcttctggaccggtttcgtccggctttacctgagccgttcaatgcgcccggtacgtatcagattgttaatccgtttcgtagggattatgacgattttattgagcgacatggctatcacggagtgagtgctcaacagcttgagagaagactgcttctgacagacctgccaattgacttgtcaaatggatctgaagtacatcgtgcgttagcagattactggcatgaacaattcttcgggggcgacgagatatccctgtccttcccgatgataaacaggcttgtaaaactgctgcttcaggaaaattcatatatccgccgggccttacaggcaacatatcccatcgtctttcttgatgaataccaggacaccacctatgcccagtatgacatgctgctaacggcattcgatggtagcgatgctgtctttacggcagtcggcgatgataagcagcgtatcatgggatgggcgggagccatgaatgacgcctttgaccagtttgaaaacgactttgctgccagacgcataacactgctttctaactggcggtcacatgtggatctggttcgtattcagcacgagattgcccgccggatagacgataatgtggaagaagtgcaggcacaagggacccgtgaaatcgaaggtgaggtttctgctatctggcaattccggagcgcagatgacgagaacaattatctggctgaatgggtgagccgtgaggttcagtcagagcgtgttgcaccacatgatgtagcgattctgatcagaatgcgggcagatcaggttgagggtgaaatagccccctcttttgcggcacgaggtctcaggatcagaaatgcggcccggtcagtcggtgaaattcagatacaggatctgcttggtgaagagctgaccggtatatttgttcctttactccgcctgggagcgacggagcgaagcccggaaaactgggagcagacccagcagaactatctgtttttggaggctgccgatccggataacgatctcacgcaggaacgattgctggttaagcttgaagcattcgtccgtaaattaaggacagagctagcgcatcgccagcctagtccggattcggcggaagagattgcagagatgcttcttgaatttgtcgggacccctaggcttcggcaatcctttcccgcttaccagcgtgcaagagattttgagagggtgtggagtggatttgtcactctcctgaaagagtgtgcagaacacagcagcagctggacggaggcgctggatgagttcgaaggtattggccaggtagctctgatgaccgtccataaaagcaaaggtcttgagttccatacgatgatattttatgggctcgacaatcagacttggtggagccttacgccgcaacggggtgaagagctaaacactttttttgttgcctttaccagagcaaagcagcgtgcgtttttctcccagtgcgttgagcgagggcatgctattggctggatacagcaattattggccccggcgggagtcgaaaccatagatggtacgactatattgggtactacgtga

SEQ ID NO: 72256 - DNA, 2313 bp, Methylovorus sp. MP688
gtgcatcttcactcatatcgtctcaggaattttcgacgcctgaaggatgctcatatagagctagctgacgacatatcaatatttgtaggatcgaataacagcggaaaaacgtcagcaactcaggccatccatgcgtttgtcacaggtggaagagatcgtttcagtctttatgatttcagttcttcttgttggaaagccttcgatgaagctggaggcattaacctggccgaaccagttcccgacggtctctctcttccaagcatagagcttgatctctggttcgaagttgctgcgtcagacctctatctagtgattcccttgcttccgagtacagcatgggaaggaacaaaggtcggcatacgggtttcgctggctgcacgaaatcccattaacctcattcaaaattaccaagaagccaaggctaaaggtagagagcaggccgcggaactgccgccagggtcagaatatgttccttggcctcgctccctgacagactatcttcagcgcgaactcaagagcgaatatgagctgcgctacttcatcttggatcgcacccactttgatgagaatttccgtgagatcggggactatatcccagaagaattaagtggagaaccgggtggcggaacaatcctaaaatcgcttatccatatcgacagtttgggggctcaacgacacctggccgaccccaatccggaagccggcgggagatcggaagacctatcaaaacgtttgagccgcttctacaagcgcaaccttaatcaaaggcaagacgatcacacagctctcaaggcgttgttcgactctgagcaagcgctcaacattcacttagatggcgtattcaagccgatgcttgatcggctcgcgaagctaggttatccgggcattaataacccgcgattgaagattatgtcggcgctagaccccgcccacgtcatgagccaggacgcgcgtgtccactaccagatcggagacggcgaagacattgccacacttcctgacagttacaacggacttgggttcaagaatttgatttatatggtcgtggagatattggacgcccaagcgagatgggggacgatggacaatcgccctccattgcacctgattttcgtggaggaaccagaggcccatctgcacgcccaactccagcaggtattcatccggaatgtgcttgagcttctgaacatagaaggcgacgacggaagtatttttggcagccaaatggtcataacgactcactcgccgcacattctttacgaacgaggattcaagccaatccgctatttccgcaggaagaaagttggcaatgaacagttgaccgaggttctaaatctatctgccttctaccaagcccagccagatgatcgggattttctagaaaaatatttgaagctgacgcactgcgacctcttcttcgcagatgccgctattcttgttgaaggcaatgttgaaagattgctcctacccctaatgatccggaaggtggcgaaaactctccgatcagcttgtctatgtattttggaggtcggaggggcctttggtcatcgtttccaatcgctcatagaatttctcggtctaacgacactaatcgttaccgatattgatagcgtcgccctcgtggctcctgaagccggcgatgcagtcgatgatgaggaagtcgaggagttcgaggttcctgccgatgaagaggaaagcctagctcggcatgatcaggatgaaggacaaaatccggttggtgagccggtggcagccccacttaagaaaaaatacggtaaagcttgtttgcccaatcaaccaggcgctgcaacctcgaatcaaacccttataaagtggcttcctggcaagctaacgatcgaagacttgcgcaacgccttggaagccgacaaaactcacgagcttgtagacggcgcaaaggttcgcgtcgcctatcagaccgaacgggccgttacttggaacggttccactgaaaacctttgcgggcgcacgcttgaggaggattttggccttgaaaatccagagtggtctcaagccgcagcgaggaagcctcttggcctgattgtgaagggggggatcgccgatcccagcgcgcttgcaaaaggcctccatcagaaggtttcgcggaaaaatttcgataagacgaaattcgcactcgctttactcactgaaaacgaggatgcgtggcatgtcccggcatacatccgtgacggattggtttggctaaagggcgaagtgcagatcgaacttgagaccttattgcctgatgccgttcccgtcgcagaagttggctcgataggggctgaacatgattag

SEQ ID NO: 72257 - DNA, 1947 bp, Methylovorus sp. MP688
atgattagccgagcaaataagccggatacccaggcagacatcgacctgcgaaactgtcttgggaacgttccaccacgcagcttcataatgaaggccggtgccggctccggaaaaaccacctctctcattaaggggctgtcatcggccatccaaatacacggagagaaactgaagaaagcccgtcagcgcatcgcctgcattacttacacggagatcgcagccggagagatatggagggatgtcggcagtgatccgctggttcacgtttcgacgattcacagcttcatgtggctgctagccaaaccgtttcagaacgacattcgcgtctgggtctctgcgcgcatcgcggaaaaaattgaagcgcttgtacagaaacaggcaagctatggccccagggttcaacagcgcacaaaagacaaggacgcccgagacctggagcgtctccacaggcagtcggggcgaatcgctgctgtaaaaggcttccgatacggaacaggtagcgactacgtaaagggaattttggggcatgacgacattttgaggcttgtgccctacctcatcgctgagcgtcctctctttcgaacccttctcgcgcgccaatttcctttcatatttgtggacgagagtcaggacacaaccacagaagtcattgaggcactgaagaccgttgagcgcgagcccggcgtcacactttgcctcggctttttcggcgacccgatgcaacgcatttatgccacgggaactggtttggttgaagccgaacccaattgggccgacattcctaaaccggagaattttcggtgttcaactaaggttttgaatcttgcaaacgctattcgtcgcgatggtgatgacctcgttcaggttcctggccaacgtctaggccctgagggcatcagaccaactcctgaaggttccgcccacctttttatcttgcctgcggacgatacgcgagatgccaacttagctagagtgcgcgactggatggcggcgcaaactggtgataatcgctggcgacttggtgatggtaacgaagagcagatcaagcttcttgtcattgttcaccagatggctgcgaaacgcttaggattcggagagctttactcagcgctcaactccaaagcgccggcagcattcaaagacggttttctggatggctctgcatggccactttcaccgtgtgtgaaatttctgattccgatagcagttgcccatacagaggggcggcagctcgaagtgatgcggctgatccgggagtactcgccccttcttgagaaagaaactctagccggggcgaacgtcgcagaacggctaaaaacacttagagagcttgttgtctcaattgcagaaggcatagccgggaattccaacgtaacgattggcgatcttttgaagcaagtgtatgccgcaggattactaatccttgatccccggctagcatcttacttggacccagaagcagctccacctgccccgaccgcagaaggagaagaaaatgacgacggccaagaagacgatgagtccaataaggaaatggcctcgatggatgcttttttggcatgtcctgcttcacagcttctggcgtaccagacttatatttcggagcgttccccctttagtactcagcaaggcatcaaaggggctgaattcgatagggtgctcgtcgtgctagacgatgcggaaagtacgcatttccagttttcttatgaaaaatacctaggccttaaagcgccttcggatactgaccgaaaacacatcgaggcgggtgaagaaacgactgtagatcgaacgcgccgtcttttctatgtaagttgcacaagagcactaaaagacttggcagtcgtcctcttcacggccgattccgaacaggctgaggcacatgtacgccagcttgatctttttgaagatgactccatccatgttcaagccgtctttgaagaatcataa

SEQ ID NO: 72258 - DNA, 2073 bp, Escherichia coli O83:H1 str. NRG 857C; identical to SEQ ID NO: 72136

SEQ ID NO: 72259 - DNA, 1734 bp, Escherichia coli O83:H1 str. NRG 857C; identical to SEQ ID NO: 72137

SEQ ID NO: 72260 - DNA, 1941 bp, Alistipes sp. HGB5
atgtatttatctgaaattaatatcagcggatataaattgtttggaagcgattttcgcgcaacttttaatgagggattatcagtaattgttggagaaaatggttcgggaaaatctgctattattgacgcaataaggcttctgttaaatgaagacgaatatgggcgtataggtatttctgcatctgattttcatcgaccatttgataaacctgctaaaagtttaggcagtgacaatattaagatatctgcacggtttaataaattatcggacgttgagcaagtagcatacctgccatggattaatccagataatatgatagaagccttgcttaatttcaacgctgaaaacaaacaagataacaaaggtagatacaagcggaatatatgggggaataagatcgcttccggtatttttgagtggaatcttcttgacgcaattcattgtatatatcttccccctcttcgaaacgctcttgaaaaattagaatcgtataagggttcacgtttagcaagattaattaaaaatttaagtcctgctatccctgagggagagaaacatcctcttgagactgaattcagtacatttcaacaaaaacttttagaggatgaaactataaaaaaagtcgatgcgacaattaaaagaaatataattgaaagcgcgggaaccatttttggtcaagatgctatgatccagtttgctgaaattaacttcaatcgtattgttgaaagattacggctattattttatcctataatccccaatgctggtaaggtcaatgagtatgaaatgtttcgagacctcaatgagaatagtttgggacacaataatattttgtatttagcgacagtattagctgaattagagggtttgagcaaaaatgaaacattacataagattctgttgattgaagagcccgaagctcacttgcaccctcaattattatcaaagttgttgtattttatatctagcaaatctaaagaggctaatattcaggttattataaccactcactcttccatagtagcatctgccgtgggtatcgataatgtgaaggtactgtcatgtacagggttaggcaagaatccagattatatatcattaagtgagtgtgggtttaatgataattgtaagttttttctttcgagatggctcgacactacaaaatgcgcattactgtttgcaaaaaatgtattatttgttgagggtattgctgaaatgttactactccctgagttggcaaaagtttattttgcagacctaatccgtcaggggcgattaaagtctgaactaaacactctcgaagattttggtatatcaataataaatatagggggtgtatattttgattatttcatgcaaatatttggaggatatacaattaaaaaggaaggtgaacttaccagatgtgctagtataaatgtgcgttgtgcaggaataacagataatgatcctcctaaagatactgccccaataaaatatgcagaaggagacaatagacttttgtttatgataaaacaattggagcagaactcaaaaaatgcacggttatttacaaacttgaaaacatttgaatatgatttagctcttgagacagggaatattattccattatttaaccttctacttgaaaagatagatacaaatggggcaacaaaaaggaaagccacagaatattctactatagattggattcaaaaagagcgtgatactgataaagagaatatggaagcatttttcacggaaaaagctgaagcagccaaatttctcctagatactattgaaaatgggacctttataacgaaaggtgaatttgcccaattattagcgttaaaaatggttaacgaagaaatcagactaatagtgcccacatatattaaaaacgctttggattggttggtagaaccatatatcaataaggatgatgaaaaagaagcgaaatag

SEQ ID NO: 72261 - DNA, 1905 bp, Alistipes sp. HGB5
atgaaaaagaagcgaaatagaatatacgagcaattaggcttgtcaatagatacgaatgatcctgaaatagaaaagctatcagagaatcaactcgattttattctgcatgatatcagtcatagttgttatttagaggcgtgtcccggtgctggcaaaacagaggtaataggattgaaatctgcatatgaaattagaacttggaaagaagtgttttgtggattttgcattatctcatttactaataaagcggcgggtgaaataaaaagtcgaatcgaaaaatatgcaggtaatcgtgcctcaagccaccctcattttattggaaccttagatagttggatttataattatatatttattcctttttgtacctctgatgttcagaatcataaagtttctattattgaggttggtagtaatgcaaattttcttaatgcatattgttgcaagacaggatatataacagcaacgagaacgatacctatttttgctaataagtattacttcgattgtatttcccaagattttgttattatcattgacagagcaaaggtttctctaagcgattatttgaatagtgatgcctttagggcctatcgcgctgataaagattggttaactaataaaaaagtatatgaatcgtttatgaaaacgaagaacgcctttaatgaaaaggggttctttacatttgaagacgtagaaaattgttgctttaaattattaatgcaaagaaaagaaatcgctactagactagcaacgcgatttccgctaataataattgatgagtgtcaagacctatctcctgtacaaattgagttattgagtattttaagagaaaatggaactagattaatccttgtaggagatatcaatcaatctatatatggttttagacaagctaatcctgaatatttacttaaatatgttagacgaaatgatatagtcaagttatcattgacagataattatagaagtaatcaatccatagttaattgtttttcccatattataccaagtaatcctccgataaaaggaaaaagacaagcactatttgatagaagcgtgttagtatgggaatatgatgatgatacgctttttactcttcctcggagatatgttgattttttgaaacaaagtgatatagccccatgcaatagtagtatattggtccggagtaataattttagaaataagttcatgggtaacatgatagatgagaataatccttacaccttattagccatggctatatacttatggaaaaaaacagcaaaaacaaaaacagatactcaactctcaatatattatgctggtaagtatttaagtcaagtctgctataacggagatggcaataagcgagatttcttttgtccttccaattttgagtcattaacgtggagaaaactaattatgaacattcttgcgggaatagatgatttattattcccatttgaaaacctacaagggcagaaatataagtggtgtgaatgggctagaaaagctcgtacatattttgacaaactaaagaatgatttcccggaatgttctgataatattgacaatgcgaaaacaaaaagattaccaaatggatatggtaatgaagaagtattattatatttggaggcaatgaacaatattaatgaattgcccattacaaccattcacgatgctaaagggcaaactttcgattcggtactcttaatatcagaaaaagacaaacactcaaaaggcggccattttgagcaatggtttaattcgaataatgttgaatataaaagattaggatatgtagcagcgtcaagagcaaagcacttgctaattatcgctgtaccaattttaactcaagagcagaaacaacatatgatagaaatagggttaattgagaatcctgttcttgccttattctga

SEQ ID NO: 72262 - DNA, 2013 bp, Clostridium sp. HGF2
gtgtgtcgccagaaaggacaaaatatgcaattatcaaagataaaaattaaaaactacagattgcttattgatgccgaactggaggttgagcctaaaacaacattgattgttggacgtaataacacagccaaaacatcatgctttgagtgtattggcaatgtgctggacggagcccccttttccttcaatgattacccactgcaaaagcgagagaacctctataccaagatagctctattcatggaaaagaagatcacatttgaggaacttgccaagcagctggaacccatatccatagaatttcttgtggattactctctcgatgatccggaggataacttgggagcattgtcaccttttatcattgatgtagatgtagacactactacagcattaatccgtgttgagttcagattaaaggcagatgagaaagctttgtggaaactattggaggaaagctattacaaagacggagtctttactcttgatgatgacacccacaatgccattgttgcgaatttctataagctatttgaattgacggtttatgcggtgaatcctaaaaatccagaagaaaagcaagtcaaaaagcacaaagaactgaaagagctttttccgttccatatcattccggctgaacgactcctcggcgaagatggtactcagaacagctctctgtctgcactgatttcggatttctttgatatgagtgaagacgaattagatccaagcattacaaaaaaggtgaaggaacttcgttcgattgtcgaaaatgcaaacaaaagtgttcaacaacaaagtaatgagatactaagtacgcttgtaagtagttcggtcggttttggttatccaaatagcgaagaactacagttgggtgttacaactcagttaagcattgatgagcagataaaaaatcaaacgcaactttcttacacagcaggcgcaagtaaggaaagccttcccagcaaatacaacggattgggatataaaaatctgattaaaatggagtttcttcttgctgcatttgccaagaaggtggaaaagtgtggcactgcctgcattcccctgcttttcattgaagaaccagaatctcatatgcacccacaaatgcagcacgcctttgcggaatatttggaggcttttcttggaaaaatcacctctgtcgggattcaaacttttttgacttctcattccgcccatgttgccaatacaatggtcttctctaaaattcgatatactcagaaaactaaggatggcgtaacttataaaaacctgagtacatttgctcaggaaaatcccacccacatcgatttcattagaaaatatttaactctaaccaaatgtgatttattctttgctgataaagctatttttgtagaaggtgcatcagaacgtctgctgcttccagacatgattgaaaagtgtgcaaaggctggggattttgattctcaggcgtataaattgcctgcgcagtactatacgctgatagaaatcggtggagcatatgcttacaaatttatcccttttatcgagttcttaggaattccatgccttattcttactgatttggattctgtattaggaacagaaggaaaaaacggcagaacatattataaatctgttccggtttaccttggtgagacaacatcaaatgaaactataaagtggtggtggagaaaaagcaaaggtcttagcgaggatgataaagggaaaattcccattactgagattacatcaatgacagccgatgaaaaaacaaaaggcaaatgtcaccttgaatttcaaactaaggaacaaggactatgcggacactccttggaagaagctatccggaatgtcaatcgtgcacattatgaattggaggacactataactgaagatgatattgagttttctggaaagagtaagacagattttgcacttgatcttgtttatgagtgtgatgattataccattccagcttatatcaaatctggattgaagtggctcaatgaacaaaaaatacttgagtaa

SEQ ID NO: 72263 - DNA, 1746 bp, Clostridium sp. HGF2
atgattgaaaatcttcatggtcgcaattatgaacttgccaaagctgaagctgacaaagtagatgaacagattatcgaagtgttgcaagcaggtcacagctttcgtgtcgaagctggcgctggctctggtaagacttactcacttaataaagttattgaatggattcaatcaaataagtgggcggagtacagccgcaagaagcaaaatgtaatctgcattacttatacaaatgctgctgtaaatgtaattgcagaaaggttatcaaaggattctttcatccttccgtctacaatacattcctttgcgtggaatgcaattaagcaatatcagagttttctaatcaatattgttaccaatgcccccgactttttgccagatgaaggagattttctcaagattaccgaagttacatataccttggggcataggtacaaagaaaacggtattcaatatttatatcatgacgatgttctgaaattattttgcatactcttggataacgcaaaattccgtcgtgtgttttcagacaagtatcctttgattttgattgacgaataccaagattcctatagcccgatcatagaacgtttcataaaatattttattgcagaggaaaagggtccacaattcggatttttcggtgatgcatggcaaaccatatatcaatccaataaggcctgtggagttattgaacatgataagcttaaggttatcaagaaaggatccaattttagatctgcgccgaaaattgttgacctcttgaatgaaattcgtccagatttaccgcaaacatcagcaatagatgactttgaaggagaagtgtttgttattacgtgcgaggattatactggacctcgtcgtgcagaccgtaatttcaagaacgaattacctccagaggaattgaaatcacgattaaacaaagttactgaaaaaataaaacaagaaacacctgcggatgaagaattaaaagttctaatgattacgcacaaggttcttgctacacagcaaggatacgagaaactcctggatattctgaatgacggattgagagacaaagaagacccgttcctattgttctttatggagaccgttgaaccgatctatcatgcgcttaacacctccgatatgcagttgctttttgatacacttggaattaagcgttatccaattaccaagaaggctgagaaaaataagtggaaagaactacagcgtcaacttgatgaggcacgcaagaaaagagccattgatgtttttgaaattatcaaccggactaaattgattcctataccacccaaattagatggttggtatcatttgtaccagaatacacctgaaacaatatatgcttctaatacttcaatagaagcgttcttgaatctggattacgcacagtttattgctgtgaaagacttcttacatccagaagcacagtattctacagaacacggagttaaaggagaagaatacgacaatgtgatttttgttatcagtaaaggatggaaccagtatcaatttgaaacctatgctccaatgataacaaaaaaagctgtcatcccaagtggaaaacaagcttcctttgagcgtaaccgcaatttattttatgtatgttgttcaaggccaaagaaaaggttgattttctttgtaacggttcctattgattccaccttcaaatcgtttttggttgaacttgttggagaacagaatatttttaccttcagccagtacatcgaaagaaaaatcgattaa

SEQ ID NO: 72264 - DNA, 1836 bp, Pseudoalteromonas sp. SM9913
atgtctattttagttaattcggtaagaatttctggcttcagagggatctctaatttagagttaagcttacctaaagttgtagttcttattggtcaaaataatgctggtaaaacctctatcatcaaagcgttacagcttgctattggtgattattcaagacatttaacagatgaagatttttacattgattgttatgataatgttcgttcagaaattattgttgatatttctattgtccctgtagatgggagtagtcaaagagcaaacattttcgcagacgaatgggttgaagtttttggcgattggattcaagcagatctagaagaaaatgactttgtcgcaatacggacgatttgtgaaaaggatagtattaagggtggttttaaagttagtcgctaccctttgtctcgatggccgggatttgagaactggactgatgaatcagcgaagataaataataaaatttcaaaacgtatagatgcgataccatttgtggcaattgatgcccaaagagatattcatcaggagttacgtgaaaaaacttcttacattgggaaagttttatctgacattagctttgaaagtgatgataaagatgctcttgaagagctgatagcggaactcaatgaaagtgcagtagagaaaagctcagtcttaagtgaattgaaaacacaccttgattctctaagtcagtcatttgaggggcaaggtcaagctgatatcaccccgtttcccaaaaagataagagatttatcaaagcgattttctattcactttggtgaagacgattctaactcgttttctatggaatatcatggaatgggaacaagaagctgggcttcaatgctcacagttaaagcgtttattgatattttggagaaaaaacatgtagaagaggaagagtgtttttttcctcttattgcagcagaagaacctgaagcacacttacacccaaatgcacaacgaacgctttataagcaactcactgacattaaggggcaaacgataataagctctcattctccgtacttggcagcattagcaaatcagcaagatttgagggtaataactaaaaatattgatcaaggtactcgtgttttttctttgaacgaagctctagaaccagaagatcttagaaaaattcatcgtgaggttattcattctaaaggagaattgctgttctctactgcaataatcttatcagaaggagaaactgaagcacaggctcttcctttattgttcgaaaggtacttttctcaagcacctttcaacttaggaataaatttcattggtgttggtggttcaggttcaaaatacaagccatatttaacgtttgctagagatttcaatatacctgtttttatattttcagatggggaagaaaaaccaataaagggtttacaaaaacaatttaactccttgtttggtggagtcgatgtaacgacagccaccaatgtaacaatactggaaggaactgattttgagggatatttgctaaatagtggttttcaaggagagatagaggcggccataaaagcacatgacggtgataacagaattactaagtatatttcaaataaacaaggcaagcagactaaagctgtaatttcggataaaccaccatgtgagacttgtaatcagccaatttatgaacccggtttatacgattattctggtgatgagggctataaaaaagcaattttggaaattttagattctgacaaaactaaatatgccaaagtcgttgctgatcacttgagcaccctagaacctgaagatttgccacctaaaattatagcattgtttgagcaaattaaagcaggagtaaaactatga

SEQ ID NO: 72265 - DNA, 1917 bp, Pseudoalteromonas sp. SM9913
atgatttctttatccccttctcagcaagagattgtagaatttgatattaaatcagcaatccaaatccttgcttctgctggttcgggtaaaacgagggtcttgaccgaaagaattagatatattctgaataatactaaaaaagataaggtgttagcacttacctttaccaacaaagcagctcaagaaatgcaagaacgtttggcagattttgttggagtggaagaacgtacatgggtatctacgattcattcagttgctcagagtattatagaaagttatggtcatactataggtttatccagtgacttgcatatctatgagcgagatcaagatcgtatggagctgtttttacagtcattgcgagatagtaacatcaatatagatgagtatctaaacatcaatgatcctgctgaaaaacgtaagcgaaatcaggtcatgcaagactatatggatgcttttgctgaaatcaagagagagttgcttacagagcgtgatgaaattgaagttagattcccgaatgagccgcgattttatgatatttatcaagactatcaagaagcattattaaacagtggtgggatagactttaatgatattttgttcttagcttataaaatcctcaataaacattctaatatagctagaacatatcaggttatgtacaaacatgtttgtgtggatgaagctcaggacttaaataaagctcaatatgaactgataaaggttttttgtggagagcggattaaaagtatcttgatggtaggtgatcctaatcaaatgatttatgggtttaatggttcaaaagattactttgaaaaagatttcttaaatgattttaaaccaaaaacattcactttgagagaaaattaccgcagtagcaaagaagtaatcaagttggcaaatgtgattaagcctaattctcagattaatcatgaggcggcattcaatgggtatgcaattatacaaccgtgtttcaatgaagaagttgaggctaattggctgattagaggtattaaaagtcttttagaagcaaaagaacattatgagattgagggtgaaatttctttagaaaagatggttgtaattggaagaaataaatttgtttttaacaagttaaaagaaaagcttgatgaaaataacattacatatcactttaataagggcgaacgacaaactgagccagattctttatttggtaaaattctagattatgcaattcgcttaaagttaaaccccaaagattggatagatggaaagaagctgtgttcgttattgaaagttcaacaacctaacgagtggaatgacaataatcttctgcttacatggtcacaggcggttgaatcatcagctctaccattagcacaagttcaagctttcctcttacaagagatccataagatagatgatgaacagccaaatatccgaaaattttatatggcccttaaagataagctaggtgaatatagttcagcagaacttacagagaaagagcagattgaattggttattagtgttcaagagcttgatgaatttcaaaaaagatggaccactttcaaacgtagaagtttaggtgtaagcctaaagtcatttagaaatgcaatgacattaggaaaacttgactctgcaacacaaggaaaaggtttaacactaagtacagtccatacaatgaaaggtttagagaaagatatcgtctttctaattggtatgtgtgatggagttttccccgattaccgagcaacaagcccaaaagatttaaatgaagaaaaaaacaatgcttttgttgcagtaacacgagccaaaaggtggttatacatcagttacccacaataccgaatgatgccttggggaagtgaaaagcatcataatgcatcaaggtttataaataaattggctgcgaatcctatgattaacgaatag

SEQ ID NO: 72266 - DNA, 1701 bp, Escherichia coli W; identical to SEQ ID NO: 71984

SEQ ID NO: 72267 - DNA, 1626 bp, Escherichia coli W; identical to SEQ ID NO: 71985

SEQ ID NO: 72268 - DNA, 2091 bp, Ruminiclostridium thermocellum DSM 1313; identical to SEQ ID NO: 72214

SEQ ID NO: 72269 - DNA, 1740 bp, Ruminiclostridium thermocellum DSM 1313; identical to SEQ ID NO: 72215

SEQ ID NO: 72270 - DNA, 1968 bp, Lactobacillus iners ATCC 55195
atggagtttaatgatggattaaatgtaatcattggagctaacaattcaggaaaaactggtcttatacatgctattaggttacttagttcaccatctgatattaatattaatgattttaataaaaataatcttatcaattataaagagaaatatattgatgaagcaccttctataaggatagaatatgatatacagcacgaaatttttgaagaagatactacagatgagagcattttaaaaattttaccatttttaggcatggaaaagatggcggaaagccgtataagcactgaaaaagacacaaaatataatatttatgcaactatacaggcaacattttgcttagatagtaaatttactgaggaatataaaaaagaggttcaagacataagtaattttgatgactactttttaatgcttaacagatatataaatgatcattatttatggatatatacaaatggtaaaaccgaaactaatattgattcaaaattggctaaaaaaatctttgatatacaatatattaatgcggaaagaacaggtactgatgttgctatagaaataaaaaaagatatcagttctttattaaaagatagcgaaaaaaagagagagtatgacgcacttatttcagaacttaatgataaattaaaagaacttcttgaaccatctattactaagatgtcaaatttatttaactacgaaaaaaatgagataggcttagaaaaaggcaatatttccataacttcccaaataaactcaaaactatccgcagaggattcctatataacagaggtaaaggatactaaatttaattataacttgccattagtatataatggcttgggatataataatctagttaatatatatatgtttattaaattgtcagatgtgaaaaaagggaaagattttaaaattttgtgtcttgaagagccagaggcacatttacatccagcaatgcaatacaaattgttcaaatttattagtaacttaaataaaagcaacaaattgaatcagcaggtttttgtaactacgcactcaagtaatataactgcggtgtctggtttagattcaatgtatataattcagtatgatagacaaggagaggtttcagattgttttcaacagagcttgaagcgccaattaacggataaagacgacagcacttttaaatcagatgctaaaaatcatttaaataaatttttagatgttactcgttctgatatgctgttcgcagacaaaataatactagttgaaggtattgctgaaaaaatactcttgccgatattcatggaaaaactaggttatccatatgaagatgaccatatatcaattgtagaaataggtggaaagcattttgaatattttatagaattatttaatggtaacccagtaaaaaagaaaattctttgtattaccgacaacgattttaaatggtttaatgatgatggagaaaattgtttgttcaaagaatacttagaatatgaagctccacatcttaaaaagttaataagccgttataagtttaatgaatttaaaatagtcactcaaataaaaggtggaagcacatttgaagacgagttatttatagaaaactttaaaaatgaagatattgtatcatccctatttgggttaccactaagtaatacaatgaaagaattttgcaaaaacaatggattttctataaatgattggattaaaaataaagaattaattgatggcaggagtattaaattaatatcgaagtacctggattgttataagaaaaaaatagaattagatccagagaatcaagagttttatgaaaaattgattttttctaagttgttcttacactatgccagcaataaaaaaggtgatgtagcattaagtttaatcacagataaaaatttttttgatgacaaagatataagcaaacttatcgtaccggggtatattatggaggggttggaatggttaaatcaataa

SEQ ID NO: 72271 - DNA, 1929 bp, Lactobacillus iners ATCC 55195
atggttaaatcaataacttcaggagatatacttacaaaaaatgaattattgaatcatattaagatttatgcaggaccaggagccggtaaaactcattttattgtagaaaatataaagaatataatatcgacaaataaattaattactaattcagaaaacagaaagattttatgtataacttatacaaataaagctgtagatgaaatagctaacagacttcaaggatttaatgagtatattgaaattaatacaatacacggatttattattgaaaatattattaaaccatttcaaactgatctaataaacataatgaaaaatgattttaatataaaagtgtgcaatggaagtactattagttcacaagtggagggattgtcattattacatggtatagataaggaaaccatatataaatacattaacatagaaaaaaatacttcggattcctattcatatagtaaaatgaaaatgagtgaagtacaagtagatgtggataaatttataaatggtataagattaaataaagatttgaaatctagtttaactaatccaaagaatttttctgtggaagatattgttcctttaaaaaaatatatttggtctgaagtgagaaagcttacacatgatgaaattttgtatttcggatatcgaattattcaaacgaatccaatagctttatatacgttgcgagttaagtttccttttatttttatagacgaatttcaagataccaatcctatacaaacagaaataataaaacttataggcagtaaatctacaaaaattataatagttggagatgttgcccaatctatttatagttttcaaggagctaaggtttctgattttttagagtttaatataaataatgaagttgaagagtactctattgatagtaatcgtagatcaacagaaaacattgtaaatttttgtaattttattagatgttcagacaaaaatatttttcaatcaagtataaggaaatataaagatgacaaaacaattattgaaaaaataagcataaaattcttactgggtagaagtgatgaagtaaaaagaacactttattctattttaaacgataatggagttatactggctcgtagttgggtagatgcatttaaatttattcagaatatagaagaaaatcaatctgttattctgaaaaaaatttataacagttattataacacaccaattatgattagagatgaaataataaaacataataatgtgatgtgggttaaagcttttaaaattatatttaacttgtgggaaggttataataataaatcttttggtgatattatattaacactgcaaaagtattttcaaatatctccatctaagatagaaataaatcatatatattcaatatacgaatttttaaaagaattatttatagatgtaagctctgacacattaacagtggatataattgaaaaatttaatagtttaatttttcagaagaagaatactattttaaaaaaattgtttggaatcaatgatataggaatttatattttttcagaatatgacaaagaagatttgaaacaaaatgtaaagtgtctaaaatggaatacgtcatattgtctatttaatgaggttttttgtgagaatagtaaatatatgacagttcatcaatctaaaggattagaatgggataaagtaattgtaagcttaaatcccaactcatttgataaaagagaaggagttgatttgaataaaatgtttacttctcctgtattagttaatgaaacagcgttagatgaatttacacgcttattttatgtagcctgtagtcgtgcaaaaaatgaactttacattcatttagaagacgaatctttgcagtcagttattagaagtagtttagaaaactttcaagaaaaaagtggtatagatattaattatgagtttatacaataa

SEQ ID NO: 72272 - DNA, 1980 bp, Mobiluncus curtisii subsp. holmesii ATCC 35242
atggctaaaatgcgattatcgaagataaagattaaaaactacagattgcttattgatgccgaattggatgtcgatgcaaaaacaacccttattgttggcaggaataatacggccaagacttcctgtagtaactgtatcaacaccgtgctacaaggaaacgatttttcatataatgattatcctatatcaaagcgagaaaacctctgcaacctgttttttcagttcatgaagaaagaattgagttatgaagatctctgcagaggaatacaacctatttctatagagtttgtagttgattattcattggatgatcaagatacaaaattgggggcattatcacctttcattattgacgttgatgtggataccactacagcgttaattcgtgcggagtatcagttgaaaactgacgaaagcaaactgcgggaactgtttaaggatagttgctatagtaatgctaaatttgcgcctaaagcagaggacatgcacgctatgcttgcaagcaatttttcgaggttgtttggcttaattatctatgcggttaatccaaagaatttagaagattggcaagttaaaagtcatagagaacttaaagaccttttcccttattatccgattcctgcagaacgcatacttggagaagatggtactcaaaagaacgagtcccttagttcgttgatcgcggactatttcagcttgaacgaggaagatttgacacctgatatagcagagaaagtcaaggaactccgtgcagtagttgatggtgcaaacaaaaatgtgcaaaaagaaagcgatcgaatactcagtgacttggtcagcaaggcagttggttttggatatcctaatgttgaagaattgcagcttggtgttactactgagttaaaaattgacgatcaaataaaaaaccagacacggctttcatatagctctggcgccggtgacgaaagcctgcccagctcccataacggattggggtacaagaatttgattaaaatggaatttctcttggctgcgtttgcacgagatgttgagaaaaagggagacgcctgcattccattgttgttcattgaagaacctgagtcacatatgcatcctcaaatgcagcatgcgtttgcggagcatttagaaaaattcctcgataaaattacaactgttcatattcagacgtttttaactactcactctgcacatatagcgaatactatggatttctctaaaatccggtatgcgaaaaagtctaaatctggagttgtttataagaaccttgatatttttgtgagagaaaatgctgacaacatggatttcatcaagaaataccttacccttagcagatgcgatttgttctttgcagataaaatcatttttgttgagggtgcttcggagcggttgctgctaccggatatgatagagaaatgcgagaaagaaaaactgtttgattcagaaaaatataaactgcccgcacagtattatgctttgatcgaaattggaggagcatacgcatacaaattcataccttttgcagacttccttggactcccttgcttaatccttacggatatagattctatgatagatggcagaacaaaggctgttgtcagcaaaggtaagactacctccaatgcaacaataaaatggtggatgcgcaaaattaagggtattccgcagaatagtaaagataagatttaccttgcggatatcgccgctgcaacagatgcagaaaagactttggggaaatgtcatattgaatatcaaacttcggaaaatgggatatgtggcagatctttggaagaagccatcatgaatgtgaatcgtagtcattatgggttcacagaacctgttgccgaagaagatttggagtttactgagaaaagcaagacggactttgcactcaatctgatttgcaacaatcctaattattctattcctcaatatattaaaaatggtttaatatggcttaatcggcagccagttcttgaatga

SEQ ID NO: 72273 - DNA, 1746 bp, Mobiluncus curtisii subsp. holmesii ATCC 35242
ttgtctaagaattatgagtatttaaattataacatagctaaggcggaagcagataaagtcgacgaacaaataatttctgcactcaaggctgggcgtagcttccgcgtggaggcaggcgctggttctggaaaaacctactcactaaaccgtgtaatcgaatggattcaagcaaataagtggaatgattatcgccgacaaaagcagaatgtaatatgtattacatatacaaatgcagctgttgatgtgatttcgcagcgcttatcccaagattcatttattcttccgtcgacaatccattcatttgcttggaatgcaatcaagcagtatcaaagtacccttattagtattatcgagaatgatgcgtcattaacaacgacggaaacggacttcagcaaggtgttagagattcgttatactttaggacaccgttatgtatcccaaggagttcattacttgcaccataatgatgttttgaaacttttttgtactatgctggataatgcaaaatttcgccgtgttttctctgacaattatccgttgattttaattgatgaataccaagattcctacaaaccgattatcacacgttttataaacttttttattgcagaaggaataggcccacaatttggctttttcggagatgcatggcaaactatttaccaaaccaacaacgcttgcggtgcgatagagcacagcaagcttcaggaaattaaaaagggttcaaactttagatcagctcccagaattgtgaagcttttaaatgatattcgcccagatttaccacaacaatctgcaatagataattttgaaggtgaagtagttgttgtgacttgcgatgatttttctggagaacgtcgaacagaacggacattcaaagacgatctccccgcagaagaactgaaatctagactgttccagctttcagaacacatcaagaaaaacgtgtcaaaggatgaaaatatcaaaattttgatgattactcataaggttcttgccacacagcaaggatatgagcgtctattagccattattgatgatggactccgagataaacaagatccatttttgctattctttatgaataccgttgaaccgatttatgaagcactcagcacatcaaatatgcaacttctgtttgatacgcttggaatcagacgatatcctatcacgaaaaaagctgataagatgaaatggaaagagtttgagtcgcagctaaagaaagctcgtaatggcagagccattgatgttatcaacactatcgtagagacaaagttagtgcccattccatcattggttgatggatactaccatctatattttgatgcccctgatacaatctatggattggatgcaacaatccaggatgttttagatttagattacagtcaatttaaggctgccattgaatttctgtaccctgaatcagagttttcgacagaacatggtgttaagggcgaagaatacgataatgttgtcttcgttatcagtaagggatggaaccaatatcaatttgagacttattcacctatgataactgggaaagttccaataccagtaggtaaagaggcatcatatgaacgaaatagaaatttgttttatgtatgctgctcaagaccaaagaaaagattatttttatttgtttcaatacctcttaattccacttttagaaattttctaatcgatatagttggattagaaaatatttatacatttaatgaatatttagataataaagccaaataa
